United States Patent Application Publication US 2014/0230087 A1 - sequence listing, part 3

SEQ ID NO: 852 - DNA, 1328 bp, Zea mays
  Intron number 2 from transcript GRMZM2G180724_T01 (locus G RMZM2G180724) derived from phytozome v7.0 (chr-ID 7; pos 1 49274071 to 149275398)
acaaggcccgccgcctcggctacaaggccaagcaggtagatcttctcccattggcgcgtgccaactttgatgcgatggatttgtggatagggtgtggtggtgcagggattaccgtcatttaggattagtccctgtttggattctttgaattgaatttgattctaataatcgtaatttagacatatattaagtaagttaatatgatattatgcggattatatttttacactattgtttgtaatatgtggtaggtatttatttgctacatttcatctataggggtgagcgagccgaagagcatgttataagttgcatagtagaaacatagtctggtgatacataaaatcaatttccattctccacccaaaggatttgatataagcttatatataaactttggaaagtgcaaattccaagccaaataggctattctattaagtagattttaattcctccgaaatgaatggatccaaacggccccttattgattttccaaagtgctataattatatgctggtttgtcttaattttttaagcctttctgcaagccagttgtgtaagtgtattattttttgtgattgtgtcaaatcatcctggacgaaatgaacgcttgtttaggttccagaggactcgcttattttatttgccttttttgaatgctgtagtatatttgtttctgctgatatacagtgtttatttcttgactagtattttggtattacgagtcctttcctctaattctgtagattctaacctcctgatgagtcataacatgcagttgttcaatatatttgttgtatattgtactgagtagtttctatggggatctattgttcagttaagtattttccattggacgcttttgtagcgatgggtttgtgaattgtgatgaatttaaggtctgtttggtttcctacctaaggtgccacaatctgtctaagcttagtcactcatattgaccttaggcaaaaaaaagttaggcatgttgtggcgccttaggcagctaaccaaagagccccagtctctggctctctgcggggagtgagtttgtggtatggcaggcttgattttggaagtagttgttataaagcttcctgcctatggtagcattgcttgtcaacctattgtcatttaaccagtcactgcatatcctttatgtttcccgtgaagctggatggtttgtttgatacatgttctctgtgatagtttcacttgtcagtagaaatgaacaactcgtacttgtctgagtaataatgcattgaactagttcactctgaaaatttgagtagttgctgggtctgaacgttgtgttatttttgttcaggggt

SEQ ID NO: 853 - DNA, 9495 bp, Zea mays
  Intron number 1 from transcript GRMZM2G591728_T01 (locus G RMZM2G591728) derived from phytozome v7.0 (chr-ID 10; pos 139798568 to 139808062 reverse strand)
ttacgtttgtgatagtcgcctagagggggggtgaatagggcgaaactgaaatttacaaatataaacacaactacaagccggggttagcgttaggaataaagaacgagtccgcaagagagggcgcaaaacaaatcccaagcgaataggcaagtgagacacggagatttgttttaccgaggttcggttcttgcaaacctactccccgttgaggaggccacaaaggccgggtctctttcaacccttccctctctcaaacgatccacggatcgaatgagcttctcttctcaaatcaaagccgggaacaaaacttccccgcaagggccaccacacaattggtgcctcttgccttgattacaatggagttgtgatctcaagaacaagtgagaaagaaaagaagcaatccaagcgcaagagctcaaatgaatacggcaaatcactctctctagtcactagggcgttgtgatgaattggagaggatttgatctctttgtatgtgtctagaattgaatgcctagctcttgtaagtggttgggaagtagaaaacttggatgcaatgaatggtggggtggttggggtatttatagccccaaccaccaaaacttgaccgttggctggaggcgtctgctcgatggcgcaccggacagtccggtgcacaccggacagtccggtgcccctgccacgtcatcactgccgttggattctagccgttggagcttctgacttgtgggtccgcctgggtgtccggtgcacaccggacatatactgtttgatgtccggtgcaccggtatgggcgtgcctgacgtctgcgcgtgctgcgcgcgcaataaatgcaccgcagggagccgttggcgccgcagggagccgttgctccgctggcacaccggacagtccggtgcacaccggacagtccggtgaattttagcggagcggctgccgcgcgaacccgaggctggcgagttcctaaggccgacctcccttggcgcaccggacactgtccggtgtacaccggacagtccggtgaattatagccgagtcgccttggaaattcccgaaggtggcgagtttgagtctgagtcccctggtgcaccggacaggtactgttcactgtccggtggcacaccggacagtccggtgcgccagaccaggggtgccttcggttgcccctttgttcttttattgaatccaaaacttggtctttttattggctgagtgtgaaccttttacacctgtatacactatacacttgggcaaacaagttagtccaaagatttgtgttgggcaattcaaccaccaaaactatttaggaactaggtgtaagcctaattccctttcaatctccccctttttggtgattgatgccaacacaaaccaaagcaaatatagaagtgcataattgaactagtttgcataatgtaagtgtaaaggttgcttggaattgtgccaataaaactacttataagatacgcatggaatgtttctttcttatttaacattttggaccacgtttgcaccatttgttttgtttttgcaaatccttttgtaaatccatttcaaagatcttttgcaaatagtcaaaggtaaatgaataagagttgcaaagcatattcaagatttgaaattttctccccctgtttcaaatgcttttcctttgactaaacaaaactccccctaaaagagatccacctcttagtgttcaagagggttttgatataccattttgaaatactacttgctctcccttttgaacacaataggataccaagtgataaatacttctttgaaaacactaagtttttgaaattggtggtggtgcggtccttttgctttgggctcatttctccccctttttggcatgaatcgccaaaaacggaatcattagagccctctaagaactatcttcccctttggtcataagtaaatgagttaagattataccaaagacgaagttcttttccttgatgctcatttctccccaaggaatagagagttgcttggagtgatggcgaagtatgagttacggagtggaagcctttgtcttcaccgaagactccaattccctttcaatatacctatgacttggtttggaatagacttgaaaacacattagtcatagcatataaaagagatatgatcaaaggtattcaaatgagctatgtgtgcaagctagcaaaagaaatttctagaatcaagaatattgagctcatgcctaagtctggtaaaagtttgttcatcaagaggcttggtaaagatatcggctaattgatctttagtattaatgtaagaaatctcgatatctcccttttgttggtgatccctaagaaaatgataccgaatggctatgtgcttagtgcggctatgctcgacgggattgtcggccattttgattgcactctcattatcacacagcaaagggactttggttaatttgtaaccgtagtcccgcagggtttgcctcatccaaagcaattgcgcgcaacaatgacctgcggcaatgtactcggcttcggcggtggaaagagcgaccgaattttgcttctttgaagcccaagacaccaaggatcttcccaagaactggcaagtccccgatgtgctcttcctattaattttacaccccgcccaatcggcatccgaataaccaatcaaatcaaatgtggatccccgagggtaccaaagcccaaacttaggtgtataagccaaatatctcaagattcgttttacggccgtaaggtgagattccttagggtcggattggaatcttgcacacatgcaaacggaaagcataatatccggtcgtgatgcacataagtagagtaaagaacctatcatcgaccggtataccttttgatccacggacttacctcccgtgtcgaggtcgagatgcccattggttcccatgggtgtcttgatgggcttggcatccttcattccaaacttgcaaagaatgtcttgagtatacttggtttggctaatgaaggtgccctcctggagttgcttgacttgaaatcctagaaaatacttcaactcccccatcatcgacatctcgaatttctgtgtcataatcctactaaactcttcacatgtagactcgttagtagacccaaatataatatcatcaacataaatttggcatacaaacaagtcattttcaagagttttagtaaagagtgtaggatcggccttgccgactttgaagccatttgcaataaggaaatctctaagacattcataccatgctcttggggcttgcttgagcccataaagcgccttagagagcctataaacatgattagggtactcactgtcttcaaagccgggaggttgctcaacatagacctcttccttgattggtccgttgaggaaggcacttttcacgtccatttgataaagcttaaagccatggtaagtagcataggccaataatatgcgaattgattcaagcctagctacgggtgcataggtttcaccgaaatccaaaccttcgacttgggaatatcccttggccacaagtcgtgctttgttccttgtcaccacaccatgctcatcttgcttgttgcggaagacccatttggttcctacaacattttggttaggacgtggaactaaatgccatacctcatttctagtgaagttgttgagctcctcttgcatcgccaccacccaatccgaatcttgaagtgcttcctctaccttgtgtggctcaatagaggaaacaaacgagtaatgttcacaaaaatgtgcaacacgagatcgagtagttaccccctcttgaatgtcgccgaggatggtgtcgacggggtgatctcgttggattgcttggtggactcttgggtgtggcggtcttggttcttgctcatcctccttttcttgatcatttgcatcttccccttgattgttgccatcatcttgaggtggctcatttgcttgatcttctacttcatcaacttgagcttcaacctcattttgagtcggtggagatgcctgtgtggaggaggacggttgatcttgtgcatttggaggctcttcggattccttaggacacacatccccaatggacatgttccttagcgcgatgcatggagcctgttcttcacctatctcatcaagatcaacttgctctacttgagagccgttagtctcatcaaacacaacgtcacaagaaacttcaacaagtcctgaggacttgttaaagactctatatgcccttgtgtatgagtcatatcctagtaaaaagccttctacagttttaggagcaaatttagattttctacctctcttaacaagaataaaacatttgctaccaaaaactctaaaatatgaaatgttgggctttttaccggttaggagttcataagatgtcttcttgaggattaggtgtagatataaccggttgatggcgtagcaggcagtgttgaccgcctcggcccaaaaccgatccgaagtcttgtactcatcaagcatggtccttgccatgtccaatagagttctattcttcctctccactacaccattttgttgtggcgtgtagggagaagagaactcatgcttgatgccctcctcctcaaggaagccttcaatttgagaattcttgaactctgtcccgttgtcgcttcttattttcttgatccttaagccgaactcattttgagcccgtctcaagaatccctttaaagtctcttgggtttgaaatttttcctgtaaaaagaatacccaagtgaagcgagaataatcatccacaattacaagacaatacttactcccgccgatgcttatgtaagcaatcgggccgaatagatccatgtggagtagctcaagcggcctgtcggtcgtcatgatgttcttgtgtggatgttgaactccaacttgcttccctgcctggcatgcgctacaaatcctgtctttctcaaaatgaacattcgttaatcctaaaatgtgctctccctttagaagcttatgaagattcttcatcccaacatgggctagtcggcggtgccagagccaacccatgttagtcttagcaattaagcatgtgtcgagttcagctctatcaaaatctaccaagtatagctgaccctctaacacacccttaaatgctattgaatcatcacttcttctaaagacagtgacacctacatcagtaaaaagacagttgtagcccatttgacacaattgggaaacagaaagcaagttgtaatctaaagaatcaacaagaaagacattggaaatagaatggtcaggagatatagcaattttaccaagtcctttgaccaaaccttgatttccatccccgaatgtgatagctcgttggggatcttggtttttctcatatgaggagaacatccttttctccccggtcatgtggtttgtgcacccgctgtcgagtatccaacttgagcccccggatgcataaacctacaaaacaattttagttcttgactttaggtacccaaacggttttgggtcctttggcattagaaacaagaactttgggtacccaaacacaagtcttggagcccttgtgttttcccccaacaaatttggcaactaccttgccggatttgctagtaagcacataagatgcatcaaatgttttaaatgaaatggcatgatcatttgatgcattaggaattttcttcttaggcaacttagcatgggttggttgcctagaactagatgtctcacccttatacataaaggcatgattaggaccagagtgagacttcctagaatgaatcttcctaattttgctctcaggatagccggcagggtataaaatgtaaccctcgttatcctgaggcatgggagccttgcccttaacaaagttggacaatctcttaggaggggcactaattttgacattgtctcccctttggaagccaatgccatccttaatgcccgggcgtctcccattataaagcatgcttctagcaaatttaaatttttcattctctaagttatgctcggcaattttagcatctaatattgctatatgatcattttgttttttaattaaagccatgtgatcatgaatagcattaacatcaacatctctacatctagtacaaatagatacatgctcaacaatagatgtagagggtttgcaagaattaagttcaacaatcttagcttgaagaatatcattcttatctctaagatcggaaatagtaactttgcaaacatcaaaatctttagccttagcaatcaaattttcattctctaatctaaggctagcaagagaaatgtttaattcttcaatcctagcaagcaactcatcattattatctctaggattgggaattgaaacattacaaacataagaatcaaccttagcatttaaactagcattttcatgtctaaggttgtcaatcatctcacggcaagtgcttagctcactagataatttttaacatttctcaatttctagagcataagcctttttaaccttaacatgtttcttgttttctttaattagacaatcctcttgggaatccaaaaggtcatccttttcatgaatagcactaaccaattcatttaatttttccttttgagctatgttaaggttagcaaaaagggaacgcaaattatcttcctcatcactagcattgtcatcactagaggattcatatttagtggaggagttagatttaacctttttctttttgccatcctttgccatgaggcacttgtggccgacgttggggaagaggagtcccttggtgacggcgatgttggcggcgtcctcgtcgtcggaggagtcgcttgagctctcgtcggaatcccattcccgacaaacatgggcatcgccgcccttcttcttgtagtatcttttcttctcctttcttctccccttcttgtcgtcgccacggtcactgtcactagatataggacatttagcaataaaatgaccgggcttaccacatttgtagcagaccttcttggagcgggacttgtagtctttccctctcctttgcttgaggatttggcggaagctcttgatgacgagcgccatctcctcattgtcgagcttggaggcgtctattggttgtcgacttggtgtagactcctccttcttctcctccgttgccttgaatgcaacgggttgggcttcggatgagtcgccaagctcgttgattttcctcgagccttctatcatgcactcaaaacttacaaaatgcccgataacttcctcgggggtcattttagtatatctaggattaccacgaatcaattgaacttgagtgggattaagaaaaatgagagatcttaaaataacatttaccacttcgtggtcgtcccacttcttgctcccgaggttgcgcacttggttcaccaaagtcttgagccggttgtacatgtgttgtggctcctcccctttgtgaagccggaaccgaccgagctccccctcgatcgtttcccgcttggtgatcttggtgagctcgtctccctcgtgcgcggttttgagtacatcccaaatctccttggcgctcttcaacccttgtactttgttatactcctctctacttagagaggcgaggagtattgttgttgcttgagagttgaagtgctcgatttgggccacctcatcctcatcatagtcctcatcccctacggatggtacctgcgcgccaaactcaacaacatcccatatgcttttgtggagcgaggttagatgaaatcgcattaaatcgctccacctagcgtaatcttcaccatcaaaagttggtggtttgcctaatgggacggaaagtaaaggtgtatgtttggaaatgcgagggtatcgtagggggatcttactatacttcttgcgctcttggcgcttagaagtgacggagggcgcatcggagttggaggtcgatgttgatgaagtgtcggtctcgtagtagaccaccttcctcatcctcttgtgcttgtcgcctttccgatgcggcttgtgggaagaagatttttccttcttctctttgtggtgagaagaagatttcttctccttccctttgttggaggagctcttcttcttctccctccttttggtgcgggactcttccgatgaagtgctcccttggcttgtagtgggcttttcgccggtctccatctccttcttggcgtgatctcccgacatcacttcgagcggttaggctctaatgaagcaccgggctttgataccaattgatagtcgcctagagggggggtgaatagggcgaaactgaaatttacaaatataaacacaactacaagccggggttagcgttaggaataaagaacgagtccgcaagagagggcgcaaaacaaatcccaagcgaataggcaagtgagacacggagatttgttttaccgaggttcggttcttgcaaacctactccccgttgaggaggccacaaaggccgggtctctttcaacccttccctctctcaaacgatccacggatcgaatgagcttctcttctcaaatcaaagccgggaacaaaacttccccgcaagggccaccacacaattggtgcctcttgccttgattacaatggagttgtgatctcaagaacaagtgagaaagaaaagaagcaatccaagcgcaagagctcaaatgaacacggcaaatcactctctctagtcactagggcgttgtgatgaattggagaggatttgatctctttgtatgtgtctagaattgaatgcctagctcttgtaagtggttgggaagtggaaaacttggatgcaatgaatggtggggtggttggggtatttatagccccaaccaccaaacttgaccgttggctggaggcgtctgctcgatggcgcaccggacagtccggtgcacaccggacagtccggtgcccctgccacgtcatcactgccgttggattctagccgttggagcttctgacttgtgggtccgcctgggtgtcccggtgcacaccggacatgtactgtttgatgtccgatgcaccggtatgggcgtgcctgacgtctgcgcgtgctgcgcgcgcaataaatgcaccgcagggagccgttggcgccgcagggagccgttgctccgctggcacaccggacagtccggtgcacaccggacagtccggtgaattttagcggagcggctgccgcgcgaacccgaggctggcgagttcctaaggccgacctcccttggcgcaccggacactgtccggtgtacaccggacagtccggtgaattatagccgagtcgccttggaaattcccgaaggtggcgagtttgagtctgagtcccctggtgcaccggacaggtactgttcactgtccggtggcacaccggacagtccggtgcgccagaccaggggtgccttcggttgcccctttgttcttttattgaatccaaaacttggtctttttattggctgagtgtgaaccttttacacctgtatacactatacacttgggcaaacaagttagtccaaagatttgtgttgggcaattcaaccaccaaaactatttaggaactaggtgtaagcctaattccctttcagtttgcagat

SEQ ID NO: 854 - DNA, 2502 bp, Zea mays
  Intron number 1 from transcript GRMZM2G028014_T01 (locus G RMZM2G028014) derived from phytozome v7.0 (chr-ID 10; pos 87008326 to 87010827)
gtcaacgacgacctcctgcgctacctttctcagaggtcggggaagttttttcaactccgtttacatttctttctgttgaaggatggatggagacacgggctccagctaactcgtggttcgcactgtgcgtgattaccgcagccagtttttggaaatgtttaatactttaatctttctaacatttctttactgcggttccaccaactcaagtttcatttagagcagaatgttggtcttccttcgtctgattttttgtgtgtactggatttggttacttaggataaaatgggatgctgtgagtaggttaatcagtctaagatcgttacaacaggtctgaactcaccacctttttcacttgcagaaaagagggtacatgtttgataatgatttcttctccttataatatttttaggacaaaacaattttaaaacttattaaccaaataaaattggatggaaaagtgcgattattgaaagtatgcatcttacatgtgtcttttgtgtatcattcgtctctagcccttgaattttccagaggaactgtgggtcagttgcaatccgatcctttgggcacgaccacaaacaaaattgtatggaaacacaattattaacaacatgcactttacatgtgtcattcatctctagtccttgaacttttttctgtattgacctagctagattttctctagctgttaggcttgtcgatgctccaaatgactgtaagtcagttgcaacttgcgagcagatcctttggccacggccaaggttaagagcaggatttctgggattagacaaatttcaatatccatttgttgtttgataggatataggaattgaatatcaggatttctgggattagacaaatttcaatatccatttgttgtttgataggatataggaattgaatatctttagcatggaaacttatttctttcaaaaaattgcttctcaaaggatgaatgagcagttcacaatgaactaatagggtccatgatttctatcaaaaacctttctcttgtagttgaagcattagccattgttgctggaatgaatccaaacattacaagctggtgaaacttttattcttatgtctttgtcacctttggcaaatgacaaactatcttgtcacagacctttattttttcagtaaccctgtttcatgcattcttgagaagaaacattcatgtagtgggtagcaagaggaggtccttgactatgcagacggtagtcatggttggtactggggcgaggctgttcacctcagggccctatattggggaagtaaaataggggtagagatgggaagggagataagtcttttcttaagttcatggttacatgattacatctaggtttatgtaagcaatgagtctcaacaacctcctagttctgagaattatcaatccaaccactattaactcaaagcaatctaagaatctgaactaagagaccaatcaaactccaaagtcctaacagactggaactgtagcttccgagcatgctgtcacgccattttgttactgttgttatcgtgctgttcttcttggcctggtgggaatagtggttgccccacataacaatttgtctctgatgtttagagtatctggaagcttggcagatcttttacgctatctgatttcttaagagtttgttacagtatttccgaatgtactggtatttgaggaagaaaattaacttgtgcctgctatgtacgtgtaaaaacttgaccaacctatgaggaactaggtgcctttttatttatgaagaataggcaggaacaaggacttgaactaggtggtttgggtatacatccatgccttcaacgagtaaactcagttcctgttcctcctgctacatattcataataatagcttgatgttgaatgttgacttgacaagtttgattatgccatgcagcttgacattagtctacaatcatttactagaactagattcagtttatatagctatcaaagggaaaagataatcatgtgattgattttttttttgtttagtatttgcctcaagttcacaaactgaagtaggtcacctatcatttgtttatgcactcctttttttgggacctggtatggagtctgatttacatcacttaccagcttcagcaagtttgaatacttgtttatgctgagataatgcatatccatgttagagttgttttattgtggctcatctcctgcattgtttcaatcctttagcaagatgtgatatgtagattgtttgtatagtgtcaactcaagcagtatggaaatattctttttggattgtgtgttgaattttgcctcctaattagatttaaataaattttgattgattggtttaagaactggcattgatttactgaagaattgttttgtaacttttgttcaacatttactgaagtattgatttactggattatttcgattgactaaaaacaagctcatccagatttacacactttgcatgcagggccccctcattgaagtgcctccatctctccgcct

SEQ ID NO: 855 - DNA, 1640 bp, Zea mays
  Intron number 2 from transcript GRMZM2G477872_T01 (locus G RMZM2G477872) derived from phytozome v7.0 (chr-ID 1; pos 1 97071252 to 197072891)
cgacgctgctcaactccgccgtcaacgccgcccaggtaataacgacacgacggaccccgccgccgtcgtcgtcgtcgtgtttcatctacgtacgccgccgcagccgcgatgcactagtagtagctgttccgttcgtcgcattgattccttccttggttttctttgtggctttgtctctcctccttcctcctatggatggtgcatgcatatagcattagcattgctgctgcaagctgcaaggagttttcttttttctttttttcccgaaaagatcgacttctatctgcctattttttacatatatgatttcgtataatttcgttcgtcggaaagatagaaattaaaagggctgtggatttggtgagacacgtcgaatggattgtcctcccatcctaaacacctttgctctgatccgttttccgttgaggtgcttgcgaacgatccaagctgcagcaacaggtgcacgcaataaatacgtccgtccgtccgtgtagcgtttttaggttacaccggagctccgtgcaaggagaaacgtgtatcgatctcgctagcagccgcgcttgtacaccggttaaactttttaaaactggctagatttgataatatcaatatttatagttcgaaacatgtttgtttttaaaaaaacatattccattatagattaatctacttattacgcatcctaatatcagtatattagaaaagtttaaccactctaaaagtcagatatatgttctttccaaataaacagaggaagtagttagcagagcatggttggttccatctactactgtcgataaaaaaaagatcaaattctgcaagtttgaaacaacaaatactagtacgacgtacgttggaccatattaaaacaacacttgcatcattcagagttatggcactatgcatggatcttatagtatttcctgagatttaggacgttgaaagaagcaattagagtaatgtatagtggattgctggcggatctttgtagttagctttctattattaatttatgatcaacttgtgactaaactggctatagcagtatagcctgcttttcttctctctctcctcagtcttgccaagcttcgagttcctcatttactcgtggtaggaagcagcgcagaccatgacgttgacgagaccgcctttaatgtgggcctgtccgatcccccagcctgccgcatcatcagtagtgcttcttggcgtccccctgcgcgctgggagtgaaccaagagaacccaacacgtctgctagattcctcatgattaatgaggctcatcttgtgcccaaatagatagtgggacattgatgcatcagcaggttctatgctgtaagaaaaacataaataaaaattacaaaatcacgactgtaagcgggtttgtaaatctgcagacaaccttaggccagttcgaattgaacacatggagttcagtccagaatcgaaaggataccgcgcctcgttacggttacgctgctgcgtgctttagcgagagctaaaatacaagtgtatggcatgcatgtgtttgttttacaatgcaaagttggtaggtcatattcggggaaaaagagagagagagagagagagatttctgatgatgagtttattttgctttcaggaattagcgacgtctgtccat

SEQ ID NO: 856 - DNA, 746 bp, Zea mays
  Intron number 3 from transcript GRMZM2G087619_T01 (locus G RMZM2G087619) derived from phytozome v7.0 (chr-ID 3; pos 1 75103267 to 175104012)
gtcaaaattttcttctccacagtgaagtaagaaaaaaatctactccttccattgttattctcttataccttgttaaaaccatcgttcacatctgatgcatttgttcaccatgttgcttgcaattattctgtgttgttaatactatgtatcagttttttttgtaactacttagctttaatgcagaaatctaggagctctcatatcatcaagactttcaatactgggtttcaaaaaatgtaaatgtcgggcattcgggctgaatactttttacagctgaagctaaaattgtcaaataattaggcttcatctacctataaaaaatcgctttgcaactttgcagctgcagatattacaacaatttcatataaatttttaaagaaaaagcgtataggatcatctcacgatgttggaaccaagagggatgtacctatttggtgcagcgggtttagtgacatgccatggccaccataggagttgtgtatggtaaccatttatctatattagtgaacaatcatttcccttcatttatagtcttgccatgacactgttctttctttcctttttgtctgggtggggggtggtagaaatggtattgcaagttctgcaaaatcaaaattccaatgattagtacttttgctttagaactctgtgcgcaaaagggagatgccttcaagtgtcatttctgtaattcaattaccatatctgtattttaggtattagttttgatcactttgttatttgtctag

SEQ ID NO: 857 - DNA, 18290 bp, Zea mays
  Intron number 5 from transcript GRMZM5G809546_T01 (locus G RMZM5G809546) derived from phytozome v7.0 (chr-ID 10; pos 52426409 to 52444698 reverse strand)
gggaacttcagcgatctgcatatttaccatttaaggtttcatactgaatatacttttatagttttatttgactcatgatgttacagacataggatcaagagatgcaggaatggaggggggagggggagggggaggggacgttaggagaaaaagaaaggtcatgggtacacatggtaccaagggttgatagtgggagagcaaggagatagaggaaataccatttattttgcaacctttactgatagcctccccctctgtatattggaggaggttacttgtcctctaagccaactacctagattatatgttggcacaatttaatctcgttgcagtcatgtcttagcgatcctaattataaaaggaaatacatgaataagggatactcgtaggtccaacatggaccccacacgtccaaccttctgaggctagcgcctataactgcgggcaaaccatggcacatgacttttcatatattttgcatgttaaaaagtgaatttccatttgaaaattttggttcttctgatatgaaatatcagtgttttcaaactatcatcagcttaaatttgattaacattgaggttaagtgtaaattcacttttgttttacatcatatgttgctatgtttttattctgaacaagattcgacctaaaacttcatatcgaaactgtgttattgtttcttcttgttagagctccagggtcaaattccttttcagacaagagaaatagtgctctctattctagtcttagtgggggtgtactggcgctgttttatttttcttcttaatataatgttacatagttctcctgcgtgttcgaaaaaaactatatgttattcacaagcatggtgtagcttgataagccttcattttagaggtttgtatttgacattaatgattatattatactttattcttgtacatactgaattctgtgtgagctgttttttttcccgaacacgcaggagagctgcgtatcatttcattagaagaaggatggtatttacaatgacctaacacaccactctcacacacacacacaaatatcaagaggtataacctcctcctagccgaggttgaacacaaaagctaggctcgaaagacgggtcaagcctttggcccccgcaaaacaccacatattgaactcatcattggctgaggtaagcaatccagctatagaaggctgagcaccattgaaaacacaatcattgcggtgtctccagatagtccaagcccccaggatcaccaaggagttaaagccatctctgaggtccttaggaataacctctgccgatctaccccaccaagcttcaaaattgatatcttccatgtcgggggaaagggcagacatgccgacacgttggagaagaagataccaaaattgcctcgcgaggacacaggaaaaaagtaagtgatgaatagactcttcttcctggtcacataaggggcaagaactaggatggggaagacccctcatagcgagccggtcaggcgtccaacatttattatgtaggaccaaccagaggaaaaactgacacttaggtggcgcctaggtgctccacactctttcaaagcccgccagggaggtagaaccgcagaacattatctcataagcagatttggccgaataggtaccattggtagagaacctccaataatgtttatctggaacttccggttgaagatcaacgtcagccacaacatctgccagcaaaatgaagtcagcaatgacctcccaagttaccactccccttaaattctcaatccatgaagagctacacagagcatcaaccactgtccttcgctttaccagccttttaggaaccaaactaaaaacatgaggggccaagtctgcaatcctctgacccaagagccatctgtcatgccaaaaaagagtggactgcccatcagccactatggaggccattgccaacgagcacaagctatccaagaaccggtttgatcggaacgggaaatcagtccaaggtttggaagaatcagttttttggagccaaatccatcttacacgtagggccctatttaagcattgaagatcagagataccaagttcccccaactctttggggcgtgttaccttgccccagtccaccaaacaatggccaccattagcctctttacgccctctccacaagaacccgcggtggattttatcaatggctttaatagcccacttaggcaaatccagagccatcatttgataaataatagtagcagtaagcacaaattgcatctgggtagctctgccagcacgggtcatcaggtcagctttccaagctggtaagagatcagccaccttgtcaataagaggctgaagctgagctttagataacttcttcagagagagagggagacccaagtatttaattggaaaagtttcaaatctgcagggaaggagctgctggaccaaattcaaatcagcatgtgtgcaacggatgggtacaatactgctcttcgctatattagttctcaaccagaagcttccctgaacagatccaaaatcctcacagcagtgtttaggtccctgggctctggttttaggaagagagccacgtcgtctgcatagagcgagatccggtgctgaaaggaattagaagaaatgggctgcagcaacccatgctcctcagtcttgataaaaagcacagtgaggatgtcatgggcatcatagggagcggtcaccaccatgcagtccgcacccgcaggaaaggaaagaataagattgagatgatgaattgtggagagttggttagcagcagataagtccaagaaagtaggagttagttgagagtttgtaggagaagttgattagccatagggctatttataagccgcatggcagcagggaataaatcaagcaagatcattatcaaaccaatctctctctctctggcaatgaccctcccaagcgcctagggctgctaccctagaaccaagcctgcggtagaggggtataacctcgtcggagaagacagctatccccatggatagaaggtccatgacacctggtatcagagccaggttatcctcaccaccaccagccgcccatcctcaccaccaccagccgccgccccatcagccgccacaacgccctcccacccgccctctccaactccagatgcattcactcggctcgaagagagttttggccgtttcgcagagaagtgggatcagttcgttgtgatgttccaccgctacaaggagaagacagagaaggaactccaagcagcggtgcggcttcaggcggcagcgcgagggttcctggcacgccgccaggtacagtcccttcgtggggagaagcaccttgctgtggcctccagggccaccccatggccgtcatcacatgagcagaccgtggtgcgcctgcaagccgcagtgcacgacttccttgttaggcgggcggtgcggaagctgcacttgctgatcagctcatcgctgcaccaactcgcagcctgcgcgcccaaccaccaggtctcgtctatactttttgaaccccctgcagaagtcgagatctgggtatgcagcccccctgcacggccaaagagggtcgtctccttcatttgggcaactgccttggtgctggacaaacccaacataagaacgggctggttcctccttcacctttcatccaacgtgaagtccgcactccgcgacaggaagcacacttgggtcagttcatcaaccagttcttctccggttcttgtcaagctggatagggtgttttgctctgtggactgggagcagcaattccctggttgcttattgcaaagtgcagcctccgatgattcagaccattgtcctcttgttttaggtctgaaagatgtgttccatggcaaaaaacgattccattttgagtctttctggcccaagttttatggttttcaggagactgtttcttcaacttgggattcggtggaagcgactgcttgccccctggagtccctagctcttaaattgaaagccactgctagaggcctgcaaagttggagtgaccgtaaagtgggaaattttagtaagcagcgtgcgttggcaagagagattatctaccagttcgagcttgcgagggagttcagacagctttctgagttggagatttggatgttaaacagactcaagaagcattctttggcattggcgtcgctcattcgtacagttgctagactccgctctagggtgtcttggttgagacatggtgatgccaacaccaaggttttccatgcatgtgctcgttataggaagaagaagaacttcatcgccaagttgtctaatggtgaagggctggttactagtcatgatgataaagtggaggtgctgctcaattattttacggagctgattggtagcagcagcgacagggagtcttctattgatcttgaggcccttgggatccaacaccatcttctggatcaccttgtcagctcatgttcggaagaagaagtttgggataccatcaagctgatgccctctgacaaagcgccggggcccgatggcttcacgagaagattttataaggtgtgttggccgatcattaagaaggacatcatggcggctgttgcagcagtttggaggaaggactttcggaattttcgggctcttaattcagcctttgttatcctccttcccaaggttgagaacccgtctaatgccaaggagtttaggcctataagcctcattcatagttttgccaaactaattacgaagatccttgcaaaccggttgggaggtcaacttgatagtatggtgtccaagaaccaaaatgctttcatcaagggaagatttattcaagacaacttcatgttggtccaacaaacagcccgcttccttcattctcagaatcagccaacaattatgctgaaactggacatatcaaaggcgtttgattcagtatcatggcccttcttgttggaagtcttgcggagtctggggtttggtgctggatggtgtgacattgtgagtgggctgcttgccacatcctcctctcagattctccttaatggtattctaggggacttcattccgcacagaagagggctgcggcagggagaccccctctcccctatgttattcattttggtgatggacgttctaaacctcatggtggggcgagctgttgaagctgggctgttgcagcccctgtcaactcgttcctttctgcatagagtctctctttacgcggatgatgttgcacttttcatcaaacctacaacggatgaccttgttctggtgggagatatactcaggctgtttggtgaagcttccggtctccaaacaaatattcagaaaagtagtattatccctatcaggtgctcacagtcggaggtagccactgttcaggatcatctgccttgcaagctggaggaattcccttttaaatatttggggctgccgctgtccttaaaaaggctcaataaagcgcaattacaacccttcattgaccgcttggcgaactctctcccgggttggaaggctgatcttatgactaaggcaggaagagcggtccaggttcaatttgtgttgacagctactgttgtctatcatgctatggctctagatctccctccttgggccctcaaggccatggataaaatcaggagaaattttctttggcgtggcagaagcgaaactaatggaggtcattgtctgattgcttggcctaaagtcactagacctaaggagctgggcggcctcggcatctctaatttacagtctttgaattgggctcttcgtgttagatggctttggcttcaaaagactagtccggacaaggcttgggcttcttttcaactccagttttcagatcaggtgaagtctctcttcgatcttgccttagtctctgaagttggagatggcagcaacaccttgttttggtgtgacagatggctgttagggcagcgcctggttgatctgcccccccacctatgtgctatgattcctaagagagtagctaacaagagaacggtcgctgagggtttaactgatatggcttgggttcacgatcttcgtggtacggtcactgctgtggtcatcgctgagttcattaacttagcggaagctgtttcagaggtgttgttgttgcctgatacccctgataagcatatctggagattctcaagctcgggccaatattcaacaaagtctgcttatgagatgatcttcatgggctcaatcactttcgagcattgcgatcttatttggaaaagttgggcgcctccaaagtgtcgattcttcttatggctggttgcccacaaccgttgctggacgtccgaccggttggctaggcgcaacctcgaccatcccgacgcttgtgtcctttgtgaccaggaggaggagacgatcaaccatctgctgctgtcttgcgttttcgctccacaattctggtttatccttctccaaaggattgggcttgctggtgtggcaccgcaaccgggtgaagaggacttcatggcatggtggaaaggcatctccactcccttggggggatcttctcaggctagccttaattctatagtgatcttgggggcgtggtgtctttggaagcatcggaatgattgtgttttcaatgggatgagtccaaatctttctgctgccttagccatggttggacatgatattatgctttggaagctggctggtgccaatggtctgtcgctgccagatgttgctacctaagtgatattgtgcttcatgtgtgattgtgtgtttggggcttttatgtttgtctatgtttctctcctcttgttatcccctgtaattcttgtgtggcctcttggctataacttttgtgtttttgcttcttctattaatataaaaaaatacgcaattctcttgcgtattcgagaaaaaactctttccttgggatccaggaggacaggaggacataactgcagttcaaatttatattttagttccacaattattttgtattttcgtcttaaataataaaggtaagccgagatgtaaaaggcttaaccttaagtcgtgtcaggtaagtctatggcagctcgaggacgagctggtcctcaagggagggggagatgtcatgggcatcatagggagcggtcaccaccatgcagtccgcacccgcaggaaaggaaagaataagattgagatgagctgggataaggctagagaataagattgagatgagagaattgtggagagttggttagcagcagataagtccaagaaagtaggagttagttgagagtttgtaggagaagttggttagtcatagggctatttataagccgcatggcagcagagaataaatcaagcaagatcattatcaaaccaatctctctctcttgcaatgaccctctcaagcgcctagggctgctaccctagaaccaagactgcagcagaggggtataacctcgtcggagaagacagctatccccatggaccgaaggtccatgacagaggacatccataacaattataaaaagtagcggagacaaggggtcaccttgccgcaagccccttctatgagaaatgaacctcccaaggaccccattgagcaggatctgggtggaagaggtcataagaaaactacttatcacatccctccacacgggaccaaagcctaatttttccagaacttcaagaaggaaaggccaagagaccgagtcgaaggccttggaaatgtccaacttcaagagaattctgggccgatttttagcatgaaggaatcttgccgtctgctggacaagcataaaattgtcttgtatgaagcgacctttgatgaaggcgctttgagctttagagaccagcccctccatatggcacctcaacctatttgcaagaaccttagtcaccaacttggcgaaactgtggatcaaactaatgggtctgcaatccttggcagcaatagcatcgttatgttttggcagcagcgtaatgaaggctgtgttaagaaatctgaaattcctgaaatctctcccccaaatagttgaaacagctgccagaatgtcatcttttataataggccaacaacatttataaaaatgcccggtgaatccatctgggccaggagccttgtccgaggggagctgcttgatagtgttcaagatctcctcagtaattaaaagctcaagagcctgaaggtcatgttgctgcaatcctaaggcatcaaggttgatagtttggtttctctgcacttcacttccaattagattcatataaaaatcccagaaaacctcagccttcccatcatgggaggtgaacagctggtctccatcccttattgaagcaataaagttcttcctcttgcgaaatcttgagcaagcatgaaataacttggtgttggcatcgccgtccttgagccaagacagccgagatctggtcctggccaccgtcctgagcagggaagcaagaaacaggcaatgtttcttcaatcgctgtagcagccagcattcgagatgagtaagaggtctaccatcccttgccgattctagctgcaacatcacttctctagctaactcgagctgtaacttgaagttgcccacttttctgtcactccatcgctgtagccccctggctgtagccttgaacttgagggagagggattgaagggggcaagcattattctggacagagttccaagcattagaaactgcatcatgaaagccctcaaattttgtccaaaaagactcaaagtgaaatctcctcttgccccgaagatgcttcaatccaagaaggagaggacaatgatcagagccctcagaagcagaacattggagtaggaaatctaggaatttctgctcccactccaaggaacagaaaactttgtcaagtcgcaccaacacatcatgtgcccctgcccaggtgaacttccttccatgcagatctatgtccttgattcctaaatcatgaatacatttcctgaatcttcccatcatgattcggttgagattaggattatttttgtcttcatctctataaatcaagttgaagtctccaccaacaatccaaggtccagcgcaattagctctaataaggcgcagttcttgcaggaacatgagcttcctatcgttaccctgaggcccgtatacacaggtcaaccaccactcatcaccaatagttggacagaatttgacagaatacatcaattcgggagtcgacaatagctccaaatttagacctccaggccagcagtataccaccactagcaccaacagaatgaagagccacgaaattgttgtcaaaatcaggacctaataacgagagaacaaggcgatgactgcagctttgcatcttggtctcttgtaaacaaattatgtctgcacggaccgactctactagacttcttacagaatcttgtctcgcaacggaatttaagccgcggacattccagaacagaattgttgaagggtccattagtaaacacttagaggacaacacacatccaccacattagcagaccaaggtggccgctccacccaagtaatctgggactgcccaaccaaaaagtgctgcaagggcttgaatctgtgaataggaaagagggtggcagaaaagcttggcataagtctccagatcctcacagttgagctgagtcgcgtctgaagtattatgaattgccttcatcaccaccatcttggccctggggatctgcggaatgtgctcagcgcccagaccagccacccgtcgactacggcagagttcctgcgaaggaatggcaggttttctccgcttcgtagcatttggagtaggaagtaaactaccaatcttcttggacaccatctcaaagaactgttgtttagaaggagattcttcctttggtgcgtcaacctgtccaactgaatcatgttgtcttcttctactgtagactttaagtgctgtctcgtaaggatttggttgcattctgcagctttggattatgggcgagtttaagatagctgattccagcggctcacttaaccccagcgacctgggagaaatgggcgggagggtggataagtgagctgctacctgacactggggcgagacaggcctatcaatttccagcggcccagcagaatgttggggggaaattaatgcaacctgccccagcggcccatcgtcagagtgggtctctttgaaactgtcaacacatagattgtccaacatatttattttctcggaaaccagtccacaattctgttcattagccccaacatgcggctctgggttggatccgtcctgtaataacatcccgcgtatgcacggaacagatgctgcccctaaaactgactcctcgggaatgtgcatcatcattgaatattctacacagccgccattgggcaccggacccagtgtgccctcctcccgctgcccaggcctattaaattccagcggcccagcagaatgttggggggaaattaatgtgacctgctccagcggcccatcgtcagagtgagtctcttcgaatctgccatcccataaattgtccagcataattatttccttagaaacaagtccagcacagtagccccaacatgcggttccaggtcggatccgcccagcaataaagtcttgcgcatgcatggatcagatgctgtccccaaaactgactcctcagaactgtgcatcttcaaggaaagtgaatcagaaattgaaggctgatttaatgttgcttcgcctagtgtgcccaggagtgattctccagtttcccgctgccctccttccatacgccgagaaggcagttgcgggcccaaacgagaatggactgggcgccgcccaccatcactgcaccttggacgtctcgctggcgacccagggaaggaggaatcatcgtcaccatcggggggtcgctgtcgttcaacggagtgggggtatgtcatgtacgaccgcacttacaggcgccgtcgtgacgccaggagggctgcagatcacgcagccaaggcagacaccacaatcagtggctaagtttagaaagataaggattagtttcccccttgcatgccttaataataggagggattggttaagattagtttccttttcatatgccttaatcataggaaaggttggttgaaccaaaggctatatatatgccgtgtaataggctgggaaataatcaagcaagatcaattatccaaaactgctcttctcccttgtctctctcaagccaccggtgaggaatccctcacggtgaaggtctggagcgcgactacgaactgcgtagccgcggtccagcgacgttgggcgtcgaggcgcttgacaacctggtatcagcgtcacgtcgatcctcacccacccgctcttgccctccaccatccccttccacgcccaccgcctccaccgaccactccatcaccatggctgagcccaccatcaaggacctcatggagctgatgcagtctttccaaaccgagttggctgccgtgaaagccaccatgaaggacaagtcgtcctcgtcgtccaccgacggcggcggcgagcgcgaggatccccctcgtgtggatcggccccccaggttccagaagctcgactttccccggttcgatggcaccaccgacccgatgctcttcatcaacaaatgcgaatcctatttttgccaacagcgcaccatggcggaggaacgcgtgtggatggcctcttataatctagaggacgtcgcgcagctgtggttcatccagctgcaggacgacgagggcacaccatcctgggggcggttcaaggacctcctcaatcttcgcttcgggccaccactccgctcagcgcccctgttcgagttggcggagtgtcgccgcaccgggaccgtggaggaatactccaaccggttccaggccctgctgccgcgcgcgggtcgcctcacggagggccagcgtgtccaactctacacaggcggtctccttcccccattgagccacgtcgtttgcatccacaacccggagacacttgatggggccatgagtctcgcccgtcaggccgagcagctggagttggcacgggcaccgccaccggccgccaggggagcccctcgcgcccttcccccagcgctggcgcccaagcagccgctgctcgccctccctgcaccacccgcgggcgcaccccagccgcgaccagagggtccgcccttgaagcggctgtcaccggaggaacaggcggaacggcgccgcctcggcctctgcttcaactgcaatgagccgtacaaccgcggccacaaccgtgtctgccgccgcatcttctacctccatggcgtcgagctcacggccgctgccgaggaactcgcaggggacgacccgcaggacgacgcccctgtcttctccctcagggcagtcactggcatgcccatctgcaattccatgcaggtgcgggccaccctaggcgccaccaccctcctcgcgctcctggacaccggctccacgcataacttcattggggaggatgccgcccgccgcaccggcctgccgatccagccgcagccgcacctcacggccactgtggccaatggtgaacgcgtcacctgcccaggagtcattcgccgcgcccaggtcatcatcgagggcgagccattcttcatcgacctcttcgtcatgccgctcgcagggtacgacctcgtcctggggactcaatggatggtcacccttggtcgcatggtgtgggatttcgtcgaccgctccgtctccttcctgcaccaaggccgccaggtctcctggtcggacgtcgccgaccgtcagcatcccctgctcgccgctaccatgacaccgagcgccctccttgaggagctcttgcactccttcgacagggtgtttgctgagccggcgggtctgcccccacagcgagctcgggaccacgccatcgtcctcaagccaggctctacacctgtggcggtccggccgtaccgctacccggtggcgcacaaggatgagttggagcggcaatgcgccgccatgttgacccaaggcatcgtacgccgcagcgactcggcgttctcctcaccagttctgctggtcaagaagcacgatggggcttggcggttttgcgtggactaccgcgcccttaatgccctcaccgtcaaagatgccttccccatccccatcgtcgacgagctccttgacgagctgcatggtgcgcagttcttcacgaagctggaccttcgctccggttatcaccaagtccggatgcggccggctgacgtgcacaagacgacgttccgcacccacgacgacttctacgagttcctggtgatgccgttcggattatgcaacgcaccggcaaccttccaggcgctcatgaacgacgtgctccggccattcctccgtcggttcgttcttgtcttttttgatgacattttgatttatagcaagacctgggcagatcacttgcgccacatccgcaccgtcctcgacgaacttctccgccatgtcctcttcgtcaagcgatccaagtgcatttttgggtccccatcggtggcgtacctaggccacgtcatcttcgcccacggtgtggccatggacccggccaaggtgcaggccattcacgactggccgacacctcggtcggcgcgcgcggtgcgtgggtttttgggcctcgctgggtactaccgcaagttcgtccatgactacggcaagattgcagcacccctcaccgcgctgatgaagaaggagggcttctcctggagcgacgaggcccaggcagccttccaggacctcaagatggccgtgacctcggctccggttttggcgctgccggatttcaccaaggccttcatcgtcgagtgtgacgcatccacacacgactttggggcggtcttactgcaagaacatcatccgatcgcctacttcagcaggccagtcgccccccgtcaccgcgcgctggcagcttatgagcgggagctcatcgggctggtgcacgccgtgcgacactggcggccgtacctgtgggggcgcgcgttcctcgtccgcaccgaccactacagcctcaagttcctcctcgaccagcgcctttcgacaatcccgcaacaccattgggtgggcaagctcctcggcttcgacttctcggtggagtacaagccgggcgccacgaacaccgtcgccgacgcgctgtctcggcgcgacaccgacgcggaaggctcggtcttggtgctgtccgcgccccgcttcgacttcgtcgaccgtctccgtcaggctcaacttcaggacccggccctggtcgccatccgggatgaactcgcggccggcacaaggggcgcaccatggtcgctgctcgacggcatggtggcatacgcagaccggctgtacatcccgccggactccccgctgctgctagaagtggtggccgctacgcacgacgacggtcatgaaggggtgcaacgcactctccatcgcctccgccgcgatttcttcttccccgccatgcgccgtgtggtccaagacttcgtccgcgcctacgctacgtgccagcgcaacaagtctgagcacctacacccggcgggcctgctgctgcccctgcccgttccccaggtcgtgtggtccgacatcggcttggatttcatcgaggcgctgccccgcgttgggggtaaatcagtgatcctcaccgtggtcgacaggttcagcaaatattgtcattttcttcctctggctcacccctacagtgctgagtctgtggcccaggcattcttcggcgagatcgttcgcctccatgggattcctcagtccatggtgtcggaccgggactccgtgttcacctcggcgttctggaaggagttaatgcgcctcacaggcaccaagctgcacatgacgtccaccttccacccgcagtccgatggccagacggaggcggccaacaaagtcatcgtcatgtacctccggtgtttcactggggaccgaccccgtcagtggttgcgttggctaccgtgggcggagtacgtctacaacacggcgtaccaatcatcactcagggacactcctttcaaggtggtttacggcagggatcctccctccatccgttcttatgagcctggcgatacccgggtggcggcggtggccaagacaatggctgaacgcgaggagctcctagcggatgttcactaccgtctggaacaagcccaggccgtccagaagaagttctacgaccgcctgcaccgaccggtctcctataccgtgggcgactgggtgctgctgcgcctgcgtcatcgggcagcctcctcccttccccacgcgcccaagggcaagctgaagccgcgcttcgtcgggccgtatcaaatcacagagctcatcaatccggtggcagttcgcctagcgctacctccgcgtgccaagttgcacgatgtcttccacgtcggccttctcaagaagttcgtcggcgtcccaccagctacaccacctcctcttccacccactcacaatggggcggtgatcccagaaccggagcaggctgttcggtacagggtggccaggggtattcagcaggtgctcatccgctggaaagggcaggccactactgatgctacatgggaagatgtcgccgacttccgcgacaaatttccccattttcagctcgaggacgagctgatcgtcgagggggggagagatgtcatgtacggccgcacttacaggcgccgtcgtgacgccaggagggctgcagatcgcgcagccaaggcaggcaccacaatcagtggctaagtttagaaagataaggattagtttcccccttgcatgccttaataataggagggattggttaagattagtttccttttcatatgccttaatcataggaaaggttggttgaaccaaaggctatatatatgccgtgtaataggctgggaaataatcaagcaagatcaattatccaaaactgctcttctcccttgtctctctcaagccaccggtgaggaatccctcacggtgaaggtctggagcgcgactacgaactgcgtagccgcggtccagcgacgttgggcgtcgaggcgcttgacagggtaatagtagctttttccgaggcatcgtctggggtgaccatcaggctgatcttgtaggacaaacaacacttttctcctgccgcagaccctggctttgagatgatgagagtcatgtcacgatgtagatttctcggatccagacaccacaccttcaacatgaaggacaataggtcagtctacaatgctgttgccgggtgcaactcggaaataatgcacgaatctcgcaacagatgatctgctgtagatcgagaccatgcatgggctggaatgcccctgatctccacattaatcaaggccgggagcgatgtcgcaaccgcatttgcacaacgcgtccacctcttaaacacgagatcaaactgtgggcctctgaaaatacttccaccattgaatacccttgaagctgttctctcatccggcaagaacaaaatgaaatcctcgggcattgcctgatgaatggacattgcacccacctcgacgttaaaacttcgagcaacttcattgatgatctcggcccctaggacctctggcctagtaccaactattgtgataaacagcgccttccgcaatgctgcgtcctcacgcgccatctccgccgagaattccagcacacaggaaggagggaacagaggcctaacttgttgatcatttttctgctccttcattgtaatctcctccaaagccgttggagctacaatatcgtcagaagatacagaagctggtgataactgttgctttgccgcctcctgacgcagtttcgcccgacgcctcttcctctttctgcgatgaactggtggagcagcctccccggagcccgacgccaacagcaggggtgaatgatattcgtccccggtggccggctgcaacggggagattcgcttccatactgattccttgcacttgaacgtctggaaatcgcctccttgagcgctagagccttgcatccttgttaagcgctgccacaccggaacgcgggaactttggcgcgcacggtgcgacctcgctgtcttctttgtatcagcctggtacgagcacgcagaagctcggtggccgaaaccgtggcacaccaaacaacgcgtgggtcgtctacatgcagcaacgaagtgggagggagacaaacagttgaagcatctaccttggagatcctttggggaccatcgacgaggatcagatgcagcacgtctagctcgcctatgcaccacctcctgccaatcaccttcagcgtgagaagggagcactggcggtccagactgcactgtcagacgccagcccgtcttctctgccgatatgaaccgatgggaaaccttcaatggagaggaaacgtcaacagtcggtggagaaggttccggtctcccaccaaggacgagcacgacctctttataggatcgggacaccgtccccgcgccaccggaactcgaagggacagggctggcgtccttccatctttgagactttgcccgcccaccctgggaagccaaaacggtgtgcacagaagaacctgaggctggaagggatgggggagttgaggaggtggtcgcggggttcgggatgaggtccggcgagatgggatggtggtcgatggtgtcctggagggagatggctgggctgggcatgggaggcaaggggctcggcgttggagacgaggggctgggggctggacgcggggtgggagacgaggggctcatctcgtctggcatctctttacataccttgctgtataactcaatagattcccttttcccctagtcccctaccactatgattcttagaaatatgtcccttcgatgcagcttatcaatgctttagagttgagtaaagagaccatgaagacggtcgtgtgagctgttgttggggctatatgtacgaaaagctgagaagcatatcctgtccgttgctgcgaaaattgcggattagtaaattgtatggcatgttgacatggacaacaaaatgcttgtgtctttctgacatggacattacaattgcatgtgctagtgtgttctaatttcaactgatagtgtattgctgaggtgaacagcttgcacgttgaaatatataggtagtggggtttaaatttataagagagataggtttgataagacatatgccatatgtatgaatcaggattagatcagttcatgaatgttcttgtagatttgcccacgatgatttggaggctgttagggtcctccaaaatagcatgtttgcagcataaatgaaggagattgaagaacttttattttgttcctaggctcgtagtctttgttctatctttcaaactcataataaacttgtttttgtgcaaccttgtaaaataccgaaggatgtattaattacttctatactgttatgagcaggtcaacagttctggagtc

SEQ ID NO: 858 - DNA, 1260 bp, Zea mays
  Intron number 2 from transcript GRMZM2G170760_T03 (locus G RMZM2G170760) derived from phytozome v7.0 (chr-ID 8; pos 6 4166588 to 64167847)
ttgcccgccgtcttgccaagacccgcaactggatcgtaagttctatgcctgaatgctatttttccttgttggtgcttagtcttgagatttagttgtttttggatgtaattttaattggacattctctttgcgaacattctgcacacaatcatgcatcgtattaaggagatttgggttatactctggatgatatatttccctgatgggatatggaatatctgtttgagttgattgtaagcatgaacgaagccttgattcaaatagaatgcagagcattgggtgagtaagtgtgaacaattgacttgattcaaatgacattacaacacacagtatgctgcttgttaattgcgtccagccagaagattgataaggctagcaagaagggatttgacagtgctgtcatttaggtgcttgaacattatggattcacagaaacaagtgtgtcttttatggcgcttcccccctctctcaatggctatctgtattttatattggaggagatgagaatttggggccttggcttggaggtcgaaagcttcaggaattgtcataggtcaggggctaggactaacctgattagtgcaggctagggtcattcttcggatttttctttcaggtgtttgtggttcttctagtgctatataaggcgtcccctgcttactctccggtgagatatgagggttgtgttgtatgggatgttctttctttctcttacctctaattaaaagatgcacagatctcctgcgtgttctagagaaagaatcttacttatggttgataccctaggcaagttaatactatttacgatttgagatgaaaatatgtgacttcaaatgtaatatgtttttatcaaagatttacaactggatagcagaagttgcaatgcgttgttttgtttggaaatatagagtttcagtgtatgctagattagtagattggctgtttatagttttctgaatcatgttaaataaatggggttttgaaggaagtttaaagttgcattcttttttgcattgaaactttttggatctagcttatatgatgtttctgataattgtttgaaaatgattggttctcttttggtagtaactagtatttccattcaaggttcttcatgaatgattagcaaagctaaatgttgcagttacgagaaaaaaattaaaattgttctctgatttcatatgctggtaattaatttcatatatatcctttttgtcacatgcaggttgctctaaaagcacttgtagtgatccatagact

SEQ ID NO: 859 - DNA, 6754 bp, Zea mays
  Intron number 1 from transcript GRMZM2G158237_T02 (locus G RMZM2G158237) derived from phytozome v7.0 (chr-ID 7; pos 1 76222893 to 176229646 reverse strand)
tcttcctcgccttctctgcctactcccgtcgccaggtgtggctttccgctctcgagtttgtctggtcaggttcagtcgttaagatgcctaactgactatacttagttttctaagatagttcagattgattagtgtgtggagtcaagatgcgatgttgaaggggattttagtggatttctcagtgctgggtcgctttatcctgtgtagggaatcgagctctagctgctcgtactagcatttttgcaatatgatgtctgatattagaatgtctgttgctagtatgatgtcgctaagtaattttagggagctggttcccatgtcgacagtacttttgcagtggaggtggtaaaggcatacatgcgatttgttttgctaccttgtcgatgccattgtttttattgctgaattgtgtagtcgtgcggcttggctacaacattggaactatcatgtgtattgattattttcagtaccccgctttatgttgatgatgcggctatcttcatttatccaacccgtaatgacctgcaagcagtcaaacaaatcttcaatgcgtttggagccgccacgggtctaacaacaaattttgagaaaagctccatccaccccatccgtcatgaaaatgcggatttgtccaacatccttcagccgttcccgggatgctgcaaaaccttcccttgccgatacctcggccttcaactccacactcgtctgctccaaaaaattcatatccaaccactagtgcagaagattggacaacgacttgtcggatggataggtcgactgcttaactacgcaggacgcctcaccctagtatcttcagtgctctcctccatgtcgatctaccacctaattgtctccccccttgcgaaatgggctagaaagcaaattgataagattcggcgatctttcctctggaaaggcgagcataacgcgcatggggggcactgcctagttaattggcaaacggtgactagaccaaaggacctagggggactaggggtgctcgatcttgagaaattcagtcgtgccctccagctccattggctttggcaagaatggactgacggctcaaaaccttgggaagggctccaggtcccttgcaacaagctagatcgcctgccgtttcaggcttccaccactgtggtgattggtaacggcatcaaagcaaagttttggcaccataactggctggatggagaggcgctacgcaacttggcccctgtaacaccccgggctttaagggacaaagccgggtgcatctcatacatgtgccaaagaagacaacatatataatcacagagtgtatagagataaatgtcacaataatcaaagtacttattacatagcggaagacttacaaaaataaagataaatatagcaggatctaaaaactatccttggcgccagaaagtcaactgggagacgccacctagatcgaatcgaactccttgttatggctcctcttgaaccacccgctcttctcctgtgggaggggtgtgagacagcaagagtgagctcacatacgttcatcgctcaataagttgtggggaataatgtgcatgaactcgccaaaggtgggagctcatgaagtgtaaggcttatcaaataaaatggttaaagctgagcattgcttttaatgttggtcaaacttttattagcaattactaggtgtaagtaaataccaaaccttaataaaagtaatagaacaaaattaataaataatcccatgcaaatgcaaatgacaaattgaatttaggttccataaattaatcatgtgagggtccaagccgctcatgaccgtgagcacggctagtatactagttttacactctacagaggttgcgcatctttacccacaagccgtgttacccatctgccaaggggtcatgaatctcatacacctctaccaaggaagcgaggcagggtaacactacgaggcctttacaaagttccactagcttcagaaatcccgctacagtttataggaagctccagtgcaggaatccctcgcctgaccgccatcgcagcaaaatcaacccaaggacctccctacactgaccactcccctactgcccttgcccctttcgggtaaggaagacctccactagctttcctagttaatcagccaagggcgtcccattaaacccttgtggtagcactgttttcccgggtggtcgctccatgttccaattaacataatgatcttatcatgaacataaataacataacaaaaataattggaacatggatgtaatgaagtattatcccaaaaccacataatgcaatagcataactacccaagtgaatcaggggtaaacaaggtaaacaggataaacagactagggtgacctattgggtcccatcaaaattaaacttatgcattgataagtgataataaagaacattattgggcaacaaatgtgatcaagagcacaacttgcctggcacttgagattccagttaccagggtgattcttcagatcctcgaaaccacacgctagtcgcatcaatacaaacaaacagtgtataggcaaaattaacatcacaccaaacataagcacaaactgggtaataataatatacgcgttgctacgagatcgcgggatcgagaaccactaaaatcggggttacggttgaggagttatgattttataaacgatttatgtgattaaaacattaagctacattataaattggttagtataaatcatatgagagaatatcttataaataattaactcactttgatctaagttataaatggaccatatatcatattttaatagattataatgataagcagattaacaagactatccaacatcagttaaatatagatataattataaaataatgagatttggtataataaatgtttttaatgcgtagtaaatacttatacgaaactaacgcaactaaaacgagtcaattctgaattaaaaccaaagagttatgaatttctaaaggttttatgcgtttggtacaagattaattacgatataaattttaatgtgactttcatgtcaaaacagagacactaggtgataaacaataatattatagaattatagaaattggaatgactcaatttggaattagtatgaattttctatgatttatacaagttctagcgattatttttgtattaaaatcaatttctaaattaaataactgaattctcagagttgtggactgggcgcatgaattctggaaagcgcaggggctcaagcgtaagtttccagagactcaatctactcccgcagtggaccacgggttgaataaatggtaggccaggggctcttttacaaataagcatggtgaagggggtattcttggttctcggtcgttcgatttgaaactggcggtccagattagatctaatctctcccgaaccggtaccaaatagtggccgcccgatcacgatcctacggctaagacccaacgcatcccctgatctaatgtaagccgcgcgatcccagatccacgccctagacttaaaacgccgagctgcttcgttgacccaatcttagccgtccgcgctaggatctacggcacacaatacattccccatatcaaatcctggccatagatcccatgatcaacgcccccagaatcatcttcctccctgcggctagcaggcagtgaacgacggccccgcacggtggagtagcacgccggagttaccccgcctagcgcaatgactagtgttgatatactacgcggaggtgactgcgagttcactagggaaggactcacctgcggttaggagcgaagcctggcgtagtgcagtccatggcagtgcctgtgtcccccgcgagccgtcacctcacaaccacgatcacacaactccagtctccatgaccccgtgatcagcacacgctagcaaccctcctcgactaaactttgagggctcggcgagggcgatgatcgatctctctctgttcccttacgcccgcactcgacggtggccatggctgtcctttctcacggcggcgacgcgctctcccatcgctccctctacgtgttctcggtgttttgacgatggcagaaaggggcgttcatgcctgcatacttatacatgcagaggggaaccgcttcctggtggagctggtagaaggcccgacgattacgtgattggagtttgtttcggcgggggtggttgtgatctggtgatgtcatgcacgccagtttgttatggcatcggcaagatacagggccccatcggcagtggtgataaccggcgtgtgcacatgcatgatggagccgagaggctcatgtcggataggtgtgggctgctaccagactcaatttggctgtcaggtttgttattcctttatcatttttttgtttttctattttgcttttaaatccaggtttttaattcccgttttcttttctacttcattctccctatttcaaaatagattcagtttcaattttcgaattaaatttgaatacagttcaactccaactaaattaaatgctcacacaaaacccttacatggataaaagactattaataaatttatttatttatttatcatcatcctatttaggtaaaagcattgtttaaaatatgaaatttcctacacccaaaaataggtacgttacgagaaaaaaatctagtatataaaatcctttcgagagtattcaaacaagggaattcatatagggatgcttttataaagtctttattagaaatcactcattctaggagatgtgacttcgaggaatcaaaagatattataatcctaaatctttagagaattttactcatctcccagaataagattttggatgttacaaattctacctttcaacttaacttgtctcaaaaatttgagtacaaatgcaatcatgcaagaactccagcatggaatgcacattcacgtatttattttttttatttatcatttgactactttatttcctttagttgattatgcgcaaagaaaagaagatcaagaaattctcaaaattctagcatagaagtatatttatttatttatcgtattatatttctcttataccaattttaggcattacagcccctcacctcttcgagctggtcagaaggaagaacaaatcagtggcccaagaactgaccaacagtgcttggattcagtctctgcggggggaaatcacaaccaccacgtaaattgaggaatttgtctacctctggattaggatccaacaggtgagcttgcagccagatgtagaggacaccttagtctagaaatggacacaacatggactctactcctccagttcagcctacagagcccaattcttgggttcctacattagccacaagatcagcctcatttggcgggctggcgggctagaacagagaacaaatgcaaattcttcgcttgggtgctcatccgaaataagctcctcacgacagacaacctagcacgacgtggatggccgcaccaaccgtcttacgccctctgcaacggacctttagaatcaggactccatctgtgcctaacctgccccttcgcacaggaggtctggaacacagttcttagagcatctccaaaagctccccagaagtctcccctaaatccaattttttgggaaaaacacaaaaacgtgtctccaacagttcccctaaagcgctttcaactttttcatagcccttaaaactccctcatttgtagctacaaatgaggggttttttgggctcaccagaaacaatctgtctctttaagagatatgttggagaaatgattaaaatctacccacactaattatttagatgtcccttaaagctgattttgatgagtcgttttctggagagctcttggagatgctcttagagcatctccaagagcttcccagaagtctcctaaatcaagtttttttttgggaaaaacacaaaaacgtgtctccaacagttcctctaaaacgctcccaactttttcatagcccttaaaactccctcatttatagcaacaaatgaggggttttttgggctcccagaaacaatctgctgctttaagggggatctgttggagaaataattaaaatctacccccactaattttttagatgccccttaaaacttattttgaggagtcattttctggggagctcttggagatgctcttacttgggaaagcttttcccttccacaacaggttgatttgaacaacatctctagcattagagagtggtgggagcagacggaaactctcttctcacaagatcgcaaaagggcgttcaatggtgtggtcatctatactatgtggaacctttggaaggagcgcaatcgaagaatctttgagcattgctcgttgtcaccactccagatcacagggagagtgagggagtgtgttttgctctataacaatgcatatagtcgccttggtttgtactagagctgcatgtcttgttccttcttgggtgcccgatcctttggcctgagtgtcgccggccctgtgtactctaactcttttccctctcttaattgaaaggcagagctcctgccacttcgttaaaaaaaatatttttagtagctagtcatgttgcgtgacattctgaattgatgcgtggtatgtatttatttctttattaccgaagatgatggagatgcattgtatgtactaatatgacactttatcagagaaaatcaaagaaaaaaagaactatgacagtacttgaatgataagaatttcaaaagatttatcttacttttttctcatgttgcatagggcgttgcagaggttcaattaccagcagttactca

SEQ ID NO: 860 - DNA, 546 bp, Zea mays
  Intron number 10 from transcript GRMZM2G071270_T01 (locus GRMZM2G071270) derived from phytozome v7.0 (chr-ID 3; pos 145805956 to 145806501 reverse strand)
agaggaagcaagcaaatttttttgatttgttgcaggtaactgtcatgctttgagttgtgaagatatcgtcaatttgatttgtgtctatatttacctaattatgagtcgtatatatatcgatcaatgtggtaatattgtaagttataatgcaaggctaacaactctagctatatggatgcataataccatttcaaattagttgcagttcttcattgtgcactttatgttcttatgctagcatacaatatcgttaagcttcttggttatttatgattttgttgaacactggcaccctgaactgtgaatctgttgtcctattttgtcatgttgctttcctcaaactctccacttgccaatttaagtaaaaatggcagtgcttattgatagtaaggatgattgtcataaaattctgccaagttttacctttccactgcatcatgtaggaaaatctatgcaccatctacaaattcatatgaagagaccatgtatgtaaagaagtgaatttatattttttttctcaaatgatgtccttcattgtaggaattt

SEQ ID NO: 861 - DNA, 48073 bp, Zea mays
  Intron number 1 from transcript GRMZM2G574858_T01 (locus G RMZM2G574858) derived from phytozome v7.0 (chr-ID 4; pos 3 5493326 to 35541398)
aagaattgaggtaagaggtttgttttcggccgtggattggaaatccaagggtcaggacggtttaatgcgagggagagattttggaccataggatcttgatccgatggctagatttgagtaccggttcgcagggctcggatttaatctgagcgcttgaactaagatccaacggctatgggcctatatcagtctgatgtcgtcctgatgtgatctgggccctccatctctaatcgggcggccagggcttatccataccccttcgtcgcggccattttcaaaaagagcccctcgggtttcggtgaattaacccgccgtccagtcgggttgttcactgagtttgggaaagtttgtagtttagcccttgcactttatagaatttgatttgcggtccagagcttaaggaaaatcagataaaagaatttagaatttgattttcaatacaaaaataattctagaaacttgtataattcatattaaattcattttaactctaaattaattcattccagtggcattagttttgttttaatattgtctatcaactagtaacactgtttagccatgaaacttgaattagaattattcatttgaattaatctattctaagtgcttaataatttcagaaattcataacttaacaactgtagctccgaatttaatgtttcttgttcctacgacctcgtagcttcgcgtagattattattactcagttattcttatgcttggtgtgatgttaattttgcctatacatgtttgtctgtattgctacgactagcgtgaggtcacgagtcacctgaagagcaagttggtacctggaatctcaagtctcaggcaagttgtgcccttgatcacttctttttacccattcatgttctgattaatcataatgatctgcataggttaattttgatgggacccaataggtcaccctagtttgactatctttatgccttgtttaccacaaaacttctgggtagtacttgctagtgctttatgtggatttgggcattgagatacacattattcatgattatacttttgttatccgttgttatttattgttcatgataagatcattatgttaattggaacatggagcgaccacccgggaaaacagtgctaccacaagggtataatggaaggcccttggctgattaattaggaaagctagtggaggactaccttacccgaaaggggcaagggcagtaggggagtggtcagtgtagggaggtccttggttgattttgctgcgatggcggtcaggcaagggatccctgcattgaagcttcctataaactgtagcgggttttctgaagctagtggaactttgtaaaggcctcgtagtgttaccctgcctcgcttccttggtagaggtgtatggggcccgtacaaccccgtggcaaatgggtaacatgacttgtgggtaaagatgtgcaacctctgcagagtgtaaaactggtatactagccgtgctcacggtcatgagcagctcggaccctcacatgattaatttatggaactaaattcaatttgtcatatgcattgcatcgcaggtgatgttattacttttcttaattggtttggtatttacttatacttagtaactgctaataaaattttgaccaactttaaaagcaatgctcagctctaaccatcctctttggtaagccttacacttcacgtgagctcccacctttggcgagttcatgcacattattccccacaacttgttgagcgatgaacgtatgtgagctcactcttgttgtctcacacccccccacacaggtcaagaacaggtaccacgggatgaggcgcatggaggatgctgcgatgtgttcgtgagaggtctaggccgtcgtctcccagtcaactttgggttgttggaccgttgtctccttataatgtaattatttatatattttgtatagaactcctattatatagtaaagatgtgacattcgatcttgtgccatgattcatcatatgtgtgagacttggtcccagcacacctggtgattatgttcgcgcccgggtcttggtgcccctaaaatccgggtgtgacaagtatgcacgagctttcatatgagatgaaaccctggggtaaagaacaatatcataacaattttggttgatatagtttcattgctcgctctggcgtaagctacccagtgccaacgtttcggaagagatgacccggggcctggatggaagagtggttttatgtgaaaaatgatttgaaggcgagagaagacattaaagagatcatcatgcgccccatctggtcccgcttcggcctccaaaagccgaaggtagaaattgatgaggcagccgaagcatgccgaagggccttcagcacagtttgctcttttattgggacaacagacttagttcaggaacatgtagcctacaggatatggccactgatagacagctgggaaatgccaaaagaaaccatcactaaccctagcgaaggcggcctggttcgattgaaagtacaccttcaggtttggagaccagtttgtcgaactagatgatgactggctgaagtctggttgaaaatactagcgatgagttacttggagcatattccaagtccgaagataatgcactatctgcagccttcaggagccgaaaaaagaaaagattaaataggatttttgatgctattggatttgtgtaccctgactatcgctacctgccacgggggcagaaaaggaagggtgcaacttctagacaggttgccgctttggctgctccaagcgagccagcgccgaagagtaaaaagttgaaagtcctcactcaccggtcctattatattgagccggtcgtggtgcccgagtttggcgggaagacttcttcagctgctgatccgaaggagccaattcctcctacacagaaggctgaagaaccggccaccatgccgaaggcaccctcagccgaacaagctaaggcaaaaactagtaaagataaggccgaaaagccaaagactgaaggaacaaaaatgttagaagttttaagcccttcggtggaagtaacaatgccaaagatacaaaaaggtcttgcggccactcccaaaagaagaaggatggcaagcgtactagatgtgctagaaacggtaaaggcttcaagctctactccagggaaaattgccaaggcttcgaaaatgcaaattgaagccaaaacaaaattgaccgaagccaaagctgcaatgagccaggctagtgctgaagctgggccttcagagcctgctaaggaaaaaccctcggaaattggagagaaagcaacggaggaagaggctatagaatagactttgcctaaaaaagttgtcgctcctactcccgaagaaccttccgaagaccttaattatgttattcgacatgcttcgggaaaaaggttatctgaggaagaaatttttgaagctaaacactatgcccgagaactgaagtacccgaaaggggccttagtgtttaatggtacggatgaagatgattttttgtattgcctctcagacaacaaagaattgtccgtctgctgggacatggccagaagtatgggctttccgaagctcgaagctggcctctgtgccatgacgaaggacgatattgctgatagccttgcatacaatagtctgaaggtacaaaaattgtgaattttgaattttatggattctgtaatagagtcttttgttctcatgttaatccattcattctttcttgtagggcttaatacttagcaatgccttaagggcgcaaaagaatgctgaagacgagagttgcactattgctctcaacaaccttcgaacataggttatcaagctgagaaacgaagccacggaaaaagacaaaattctacttacattggtggacaaagtaaagggggatgaagctaactttaaggctcaatctgaaattcaaaagaatgagattgaagaccttcgaaaacaactagctgaggccaaattaaaatgcgttgttgccgaagctgaccgagatgccagtgagtactggagaaattattttgaaaaaacagttgcagagcttcgcgcatcaaaagaaagatgttttgaaaaatctgtggaatgtgtaaaaagataaagactagcttcaccaatgtgggcgcctactcaaacgaagacaacttcgtacggggcgaccctgagggcgtcatcgagtggatcagcaatgaagccgaagcttttgaggagattttgagtgaccgcggggacgtctgtgcattctctggtgcgaggggggttgcagccattttggagaaggcaggttgtgaacatgttaaaaacttggcccaggccgaagctgccttctccgtcgacgatacgaaggacccctcggccgaagcgagttcaataggtggaaaaattttcactgatatctgggaaaatggcggccgagggatggctcatgaaataatgaagaaaagcgaaaaagatattcatgacgctcgagaagcaacgaaagaagctgaaaaagttgcggaactcgaaagacgaataggtatcacttaatggcttttagctttgttgtttatttttgtgacttcgaactaatttatgtcttctaccgcagctgaactatctcctcccccagagccattcgacccactggccgacccagagacaaagaaaacgatagaaattattaatatggacgaagctattgtagatgaagttgttaccaagctgctaaccgaagctgcagaaaaagttctgaaggaagaagagtagctattgtaaaacattttctagaatattaatgtaacatttgctgaactatgtttgtaatattcagtacttatagatgtgaatgtaacatatgagtggtttgtaattcaattctttgcgagcatgaaactttttttacataccgtttttgagcctgtggcgaaaaaacaccttcccttcttttcatgcttcgtaaagaagagcttttatgcttcgtaaaaatcatccatactttgtaaaacatcaatgcttggtaaacaatagatccctttttccgcatcagaactgatgaagctgtgattctcagcttactttgtgccttggcatcttttcattttttataaagcattgcccgaagatcggcctcgttttcaattgatgccattgatgtcatattatgtatgatgtgatgctatgcgatatgatgcgatgatatgatgcaaagaatgatgctaatgtatgaacccatccgaagcttcatccacaatcttcattccttaaggaatgactgaaacctctttgccgtttatttttcggctgcaccgtttatttttcggtgtaagttctgcattccctaaggaacgtcttttgaacttcttcgccgtctatttcggtggtattcacgttgacttttcgcgcttcgccttatatttcggtgatatttggctctgcattccctaaggaacgacttttgagcagaaaacttacgcttcgctcccttaggaacggctttttgaagctttggcaaacttacgctgcgctctttaagaacgactttttgtagcttcggtgaaacttttattgcaatttttagctctgcattcctaaaggaatatctctttgtagcttcggcattctcgtaagtctatgacgaaggtatatttcattttgacataaacgaagctagtacaggaaattaaaaaataacaagaaaactaggtttacattgattgttccttattaaaaagaaaacgacagtgaatgtaaaactgtgccaaaggtaggatatctctcaatatatatgttttgattctggcacagtactattaactgtgcgagtttcggacccctccctgaaatcttgttgctgatgggctagatgactcccttctggctgctgacctcgtgagtaggcaggctgtagtggtggcagaggtggaagctgtggccaagaaacttgtggctggctagccgaagcaacagaagctgcgggatgattacccacatattctagtatgtagggtgaatgacatgaagcagtgtgcaggaccttcttcggttgactttgccgggcttcggcttctgcaatctctttttgcttttggatggtgatttgacacgttcttgtattgtggcccttgtcttcaccacaaaataggcagtagatcttcctgggctggtccccatatcttcctccgaagcccctggcgcctctgcctcttggagctggcggccggaaagagctttgttgttgcctcgaagcttgcaaagaatactgcggcctctgctattgacttcctctgtcatcagtctaggtgaagttgtgaattgacctgacgtgcctcgggtggattcttccttcaaagcccctggtcatttcagagaacatgtatgcttcctcccttctttggcggaagtcattgttagcccggatgtactcatccatcttgtgaagcagcttctccagagtttgtgggggctttctagcgaaatactgaatagtaggtcctggacgaagccccttaatcatggcctcaatgacgatttcattgggcactataggcgcttgtgctctgagacgcaagaatcttcgtacatattcctgaaggtactcctcgtgatcttgcgtgcattgaaacaaggcctgagctatgactggcttcgtctggaagccttggaaacttgtcaccagcatatccttgagcttctgccatgaagtgatggtccctagccgaagagaagaataccatgtttgggccacattccgaactgccatgacgaaggacttggccatgacagctgcattgcctccatatgaagatatagttgcttcataactcatcaaaaactgcttcgggtctgaatgcccatcatacatgggaaggtgaggtggcttgtatgatgggggccatgggatagcctgcagttctgctgccaagggagatgcatcatcaaaagtaaaggtatcatgattaaaatcatcataccatccattgttgttgaacaagccttcttgatgaagctccctgtgttggggcctttgatcttgttcgtcttgaacaagatggcgtacttcttcagtggcttcgtcgatctgcctttgaagatcagccaacagggccatcttctccttcttcctttgcacttgctgatgtattatctccatgtttctgatttcttggtccaactcctcctccggaagtgttggactagtggccttcctcttctggcttcgggcctctcgaagagaaagggtctcctggttcgggtccaatggctgcagtgcggcagcccctggcgctgaagctttcttaggtggcatgacgaaggtcagtgcttgccgaaggtggtcaaaaaaagggttcaccggaggtgggcgccaatgttggggacttgttctcaaatactatgaattaagaacaaggcaacacaagatattaaatgttaatgcccttcgtccttcgaaacattatttcccttaggatataatgatcttcgaacgacggtcatgaaggacataccttcatcattgcagtatatattaataaaagaagaagcacatgaaatataagagacaacatgaacaatcatataacgttgttaattcattcttattatattaccatgaaaaggcagaaacaatattgaattacaaaggtaccttcgacttgacagaaggcaaaaagtacaagcgtgacgcaagagcaagtaccagtccgcgtgaacagtacggggatactgttcatctatttatagatacgggacacaacccgtgtaaaattacattcagaccctttacatttgctaataactttaaggtaatccaccaaggtctaaatagtcttttcccttttaagtcggttcccttttctatcgtcatgccgaagctcccttgcacgtagcttcggcactgcgtcaaccttcgtattgttcgtgattttcacactgtgtgattctgatccgagaccgaaggcacctgttcacatattacactcggaaaacattgttaaattatgtttttgaggaccttcggaagacgaaggcccccaataattagttaactggactttaatctaagtcattacttgattataaatcatcttttaggccaaagataaccctcagatcatgaaactatattaatattagaataagctaaccccgaaaacatagattaaccaaattagttacctaattataaaagtatgggatatcatataatcaatgttgctactgcgtagtaaatatttatacgaagctaatgcaactagaacgagtcaattcagaattaaaacgggggagttatgaatttttgaagttattaagtgcttagtatagaataagttaagtgaataattttaattcaaatttcatagctaaacaaagatactagatgataaacaatattaaaacaaaattattgcaactggaatgaatcaatttggagttaaaatgaattaaacaagtttctagaattatttctaaactaaaaatcattttctgaattgttttatcccttttattcttctcctgggctgcggtcaccatttactagaagcatagggtggattctacaaattctaggactaccttgtgatggttttataacagactgaggctgcaagcgatttgaataaaaagcaggggctcatatgcaaataatcctcgacgaagggggtaccaaacgatctaagccactcgatcctaaaccaagggctcagattagagctcgcataagatgaaccggtacgcttctccagtcgcgagatctaaatcctagggtcccgattttatgaatccccaaacccatcacgtccgcccgatcagatccggacggcacggattgaagccccaaaaaggtttagctagatctaatcacagtcgctagcgtctgatcaaatggccaggagcttgtcttctcctatcagcacgaggacgcggcggcgccgaccccgcaccgcgacggaaactcgccgaagttcttccagccagcgtccaagtgccctaagctcgaagcaacccggtgcaaaataaagaaggcatacgatgaacttaatggacaagttcttactacgagacgtgcgacagaacatgctgcccatggcatggctcgggcacacgacgaattccaatcgattgcaccccagcgatctccccagcttcgctgggacccgcacacccgaggcgaggtccaacggatctccttcatcacttgacacattaaatccagtggcacgacaggatctagttcgcggcggcgccatcctttcttgctctctctctctcccctcgtcaatggcgcacgacacggttaatcgagatagatgacacagcgagagcggccgaattatataaggcggggagagtccgggcatgcgcggggccaagtccatggttccaggcggctggtgaggattcggttgcataatcccacaaatttgaatacaaagtgcaacaatacaatagcttcagcatgagatgcataatcccatatttatttatttgctatttaactactttaattcccataattgagtatgcacaaagaaaaataaaaaggaattcaaggaatccccaaaacacccacttatttatttatctattaattttattattattttatatcaattttgggctttacacaagagaaatacacaattgctaaacaagcacaacagagacaggttggggaagaagaggtgtccggacttgccggtgttgatcatcgaagttgtgaatggaagcaacgcacacaaagttcacacccaagaacacacacatgatgatagacactagtagtgataggggaaaaaagggaaaagcgcagctgctaatagtcatcaagcagggtcgatgccaattcttcaaagcgcggtggattatgatgtcaatatttgaaagagaaatgtgcccttgggccatttctaagtattttggtgatttagtgtccaacacaagtgcttaagtgataaactatgccaaatggtggataaggtgcaaatcaatacaaaggtatgattctagacttagtacattgttttttgtgtactaacatgattgtctaagtgctagaatcagagaaaatacaattggaaaagcttggctcgaagcagccaagagtctgctcagtctgggtgcaccggacagtgtccggtggtgcaccggacagtgtccggtgcgccaggctagatctggcgaactggccgctctcgggacttcgacggtgatgtacgactataaatcaccggactgtccggtgagccaacagtcggcccggccaacggtcggccgcgtaatccgcgcgcgacgcgtggcagagccaacggtcagaagggagcaccggactgtccggtgtgcaccggacagtgtccggtgcgccaacggctctgaaccaccaacggtcggcttcgccaaagaaggaaagaaatccgcaccagacaatgttcggtggtgcaccggactgtccggtgtgccaggcgacagaaggcaagaattgccttcctggaatgctctcaacggctcctagctgccttggggctataaaagggacccctaggcgcatggaggaatacatcaagcattctctaagcactcataagcaccaagacttcaattccgcgcattcgattctttgtgatagcaactagagctccatttgagtagagaactctttgagttgtgttgagagctcgtgttgtgacttgtgtgcgtattgtcgctctgattttgtgtcttgtgtgtgttgctcatccatcccttactctgtgcttctttgtgaacatcaaagtgtaagggcgagaggctccaagttgtggagatacctcgcaagcgggatatagtaatcaaagcaaaacactgtggtattcaagtgggtctttggaccgcttcagaggggttgattgcaaccctcgtccgttgggacgccacaacgtggagtaggcaagtgttgaacttggccgaaccacgggataaaccactgtgtctatctgtgattaatcttcttgtggttatcgtgtcttgcaaggattcttctctagccacttggctttattgtgctaactcctaacaaagttttgtggcattaaagttcaagtttcacaggatcacctattcacccccccccccccccctctaggtgatctcaattggtatcggagctgttctcttcaagaaagggactaatcgcccgaagagatggatcctaagggcaaggggatggtggtcaatgataaggaggagtccttcgtcaatgatccaaaggatgacaagcctactgactcaggctcgggccacaaaagaaaagacgggaggaagaagaaaacaaggcgcatcaaggagatagtctactacgacagcgacgaatcttcctcttcccaaaaggacgactgacaacgactacgagaaaaagaagacggttaattcaaacttttcctttgattattctcgtattccgcaaagttccaatgctcatttgctttccattcccctcggtaaacccccccactttgatggagaggactacggattttggagtcacaaaatgcgtagccacttgttctctctccatccaagtatatgggagatagtagaaagtggaatgcactttgatagtacggatagtcccatgttcattaatgagcaaattcacaaaaatgcacaagctactactgttcttctagcttcattgtgcagggatgaataccataaggtgagcggcttggataacgccaagcagatttgggacaccctcaaaatctcacatgaggggaacgacgtcaccatgctcaccaagatggagttggtggagggcgaacttgggagattcgcaatgatcaggggcgaggagccaacccaaacgtacaaccggctcaagaccctcgtcaacaaaataaggagctatggaagcacgcgatggacggaccacgacgtcgtctgcctaatgctaaggtcttttactgtccttgatccacatcttgtgaacaatattcgtgagaatcctaggtacaccaagatgatgcccgaggagatacttggaaagtttgtaagcgggcggatgatgatcaaggaggcaagatacgttgacgatgcgttgaacgccccaatccacgggcctcaaaccgttgctctcaaagcaacaaggagcaaggaagtgctacctagcaaggtggcacaagttgaggcggcgggactcaatgaggaagagatggccctcatcattaagcgtttcaagacggcgctaaggggtcacaaggagcatcccaacaagaccaagacgaaggggaaacgctcatgcttcaaatgtggtaagattggtcattttatcgctaattgtcccgataatgatagtgaccaggaacaagggaacaagagggaaaataaaaaggcttacaagaaggctaagggcgaggcacaccttggaaaggagtgggactcggattgttcgtcgtccgactccgacaacgaaggattcgccgccaccgccttcaacaagtcggccctcttccccaacgagcatcacacctgcctcatggcaagggaaaagaaggtaagcactcataatactagtacttatgcttcttcaagtgatgaagaatctagcgatgatgaaatagactattcatgtttattcaagggcctagatagaactaaggttgataagattaatgaattaattgatgccttgaatgataaaaataggttattagaaaagcaagaggatcttttgtatgaagaacatgataagtttgtagaggcacaaaaatcccttgctttagaaattaaaaggaatgaaatgctttcttgtgaattatctacatgtcatgactctatttctagcctaaaaagcataaatgatgatttgagtgctaagttagaaatagctaataaatcaacatcttgtgtagaacatgttgtagttcgcaataggtgtaaagatgttaatgttgatgcttgtagtgaacacctagtttcaatttctaaattgaatgatgaagtggctagtcttaatgcccaacttaagactagcaagagtgaatttgacaaactaaaatttgcaagggatgcctacacgattggtagacacccctcaattaaggatggtcttggcttcaagagggaagtcaagaacttaacaagccataaggcttccatctccgctaaggagaaagggaaggcccctatggctagtagtgctcaaaagaaccatgctttcatgtatcatgataggagacattctaggaatgtttatagaagttatgatgcttttgattctcatgccatgattgcttctagttcttctattatgcatgatagaaatttggctaagaaaaatgttgttcatcatatgcctagaagaaatattgttcatgttcctaggaaagtaatgaatgaaccttctacaatttattatgcttgcaatgcttcctttgctatttgtagaaaggataagaaggtaatcgctaggaaattaggggccaaatgtaagggagacaagacttgcatttgggtccctaagactattgtaactaaccttgtaggacccaacatgagttgggtacctaagacccaagcctaaatttgccttgcaggtttatgcatccaggggctcaagctggattatcgacagcggatgcacaaaccacatgacgggggaaaagaggatgttctcttcctacatcaagaacaaggatcctcaagattcaatcacatttggtgatgggaaccaaggcaaggtgaaagggttaggaaaaattgctatttcatccgagcactctatttctaatgtgttcttagttgaatcgcttggatataacttattgtctgtgagtcaactttgtaatatgggatataactgtttattcacaaatgtagatgtgtctatctttagaagaagtgatgattcattagcttttaagggtgtactagacgacaaactttatttagttgattttgcaaaagaggaggccggtctagatgcatgcttaattgctaaaactagcatgggctggttgtggcatcgccgtttagcacatgtggggatgaagaaccttcacaagcttctaaagggagaacacgtgacaggtctaactaatgtaactttcgaaaaagatagaccttgtgcagcttgtcaagcaggtaaacaggtgggaagctctcatcatgccaaaaatgtgatgacaacatcaagacccctggagttacttcatatggacctcttcagacccgtcgcctatctaagtataggaggaagtaagtatggacttgttatagttgatgatttttctcgcttcacttgggtattctttttgcaggataaatctgaaacccaagggaccctcaagcgcttcctaaggagagctcaaaatgagtttgagctcaaggtgaagaagataaggagcgacaacgggtccgagtatgccttaatcggtctccctcgatctattggggcctgtttggttctttagtccatatactaaagtttaattatggtattaaagtttagctcctaccttgtttggttttagagactaaaattattcaaaatacattaaatgttatttagtccagagactaaagtttaattatagcactaaagtttaatccctaccttgtttgattctagagactaaaattattcaaaacacattaaataaatcataagatgatcaaaatatcccttaacattctcctgctactagtgcaactgaaataaaggagagacaaaaagtggaattaatatggtttattcacttttagttaacctttgagagactagagactaaaattgtttagtctctattttagcacaccgtttgacaatttatagactaaatgaaactaaaatataacaactaatttttagtccctcaaactaaatgagggcctttctcgattcctaatttgctatgcacctatgttttctggtcgctcgaccagctagtcgaattgggggacgatcaggcgactaatctcgattagtcgtggactaggtcgacctggtcgtttactagtcgtcctgttcatccaggacctatgtatataccattatactatatagtatgtaattatataactatatatgaaggatagggtaaacatgatatgaattcagcaatacggaatactgatttaagaaattgagagaagacatttgttcatccaatccaagtatccaactgaaaacaacaaagaaacacttactagttactaatactaccagtcccagatacaagtctacatgaataggatggagtacaagaacaaaaactctagaagtccagaatgacagaacacatacaaggatgaagaacagaactacagaaaagaatacctccagaaaataaactcatgtcggcgaagtctagaaccgcgcactgatgatctagggttgtgcgtgtctgtgaactggggccgatgaagtctggattctggaatcgcatgctgatgatcgccggtgaagtctggaacgagaagtctagaaggagccgctaggaaaatagagaagaagagaagaaaaggaaagagatcgagatgccatgaaattaggagacgtgaaccgtcgggtaagggtttatagagacagcgttggcgttccatctccctataaccaggcctccaacaaaaaagcccacgaaatcaaaattttaggatcctaaaccccagtcgcgcagactcgactgatcgagcgactaattgctcctagtcgtcgactaggtggacgactgttgggggccttcgtctttcgaaggtcctcaaaaacacgactaacatgttttccaagtataatatactgtcacaggtaccttcgactttgagatgaaggtgcacacagtatgaaaggtgcggcctggaagaaggatgaatcaattccgaagctatggatggagaagcttcggcttagcgatggaaaatgaaaccgacctaaaggggaaaaggttgtctagccctcgacagattactccttagtcaatagtaaatgtcaaggacatggatgtaattttacacaggctatgtcctgtgcctataaatagatgaacagtaacaccgtactgttcacgttgttttgtattcacccgcacgtcactcttggattcttaccttctgtcaagtcgaaggtacaaatgtaattcaatatcattaatatttgtatttgatcatataataagaatataaataatctaatattttgatatgatcatgttctctatatgtctcttatattcctgccttttattgttatatattgagattatgagggtttgtccttcataaccttcgtctgaagatcattatatcctaagggagataatgcttcgaaggacgaaggtctttaaccattaacatttgtgttgccttgttcttaactcatagcatttgagaacaagtgaccaacattggcgcccacctccggtgaactcatttgaccaccttcagcaagttgtgaccttcgtcatgccgctgaagaaatcttcagggctaggggctgcactgcagccgctggacgtcaaccaaaacacattacgcgaagctagaagcaaaaaaaggaaggctactagtccgacaccccaggaggaagagctggaccaagaaatcagggacctcgaagccattcatcaataggtccagaggaaaaaggaaaagatgcttcctctcgtcgttctttagaagaagattgatgaggctgctgaagaaatgcgtcatctcactcaagatgaccaggaccgaaggcctcagcacagggagcttcgtcaagagagctcattcaacgaagatgaatggtacgatgacttccatcatggtaactttacttttgatgatgcttctcccctggcaacagaattacaggctatcccatgtccctaatcctacaagccaccctagttgcccatgtatgatgggcactcggacccaaagcaattcttgatgagctatgaggcaacaatatcctcatattgaggcaatgccgctgtcatggcaaagtccttcgtcatggcagttcgaagtgtggcccagacatgatactcttctctccgaccagggacaatcacgtcatggtagaagcttaaagacatgttgatcaccagtttccaagggtttcagacgaagccgatcactgcttaggccttgttccagtgcacacaagaccatgagagtaccttgaggcgtacgtccgaaggttcctacgtctgagagcacaagcgccgacagtgcctaatgaaattgtcattgaggtcatgatcaaaggacttcggccaagacctacggctcagtactttgccaggaaacctccacaaatcctggagaagcttcttcagaagatggatgaatacatccggctaataatgattttcgccagagaagggaagaagcctacattttttctgagatgaccaggggctttggtggaagaatacaccccaggcatgttagatcaatccataattatggtctaagtgatgacagaggaagccagcctcaaaggccacaacacagctcccaatcttcgggccagcaacaaagctcattcaggccaccagctccaaggggtagaggcgacaggggcttcggaggaaggtacggggatcagcccagaaagctctattgcttattctgtggagaagacaagggccacactacaagaacatgccaagttacaattcagaagcaaaaggagattgccgaagctgaagcgcggcagaatcagctgaagcaagttttacatactgcttcatgctattctccctatgtaccagagtacgtaggcaaccaacaaccttcggcttctgtagcttcggcaagtctgaaagggaaatagggtttaaccttttcctataaataattttggtggttgagtgcccaacacaaataaattggactaactagtttgctctagattatatattctacaagtgcataaaggttcaacacaaaccaataaaaagatcaaattagggttcaaaagaaaggagcaaaagaaactgaagagtaccctggtttggtgcaccggactctccggtgcaccaagaccgtacaagtccaaactcttcaccttcgggtttctcatgcgtcgctccgctataattcaccggactgtccggtgcaccaagcggagcaacggctaacagcgcaacggtcgactgcaatggacacctgcaaatgctacagtgcgcggacaattcacgcagaagtcagagcagcccactagaggcgcaccggacagtgaacagtacctgtccggtgcgacaccggactgtccagtgccactagaagacaaagttttaacgatcgaaaccgctagaaccctaacagttgggtgacgtggctgacgcaccggacagtgtccggtgcgcccattgacagtagccacccccaacggttgtttgggtggttgagggctataaatacccccaaccacctccactccaaccatccaagcattcactactcctcattcaatacaagagcaaagtgcaacactccaagacacaaatcaaagccaccaatccgatcaaagtccccaattcaattctagcgcattaggacttttgagaggatcacttgtgtttcttgttgctcttgtttgcttggcttggctttcttttctttctcacttcttactctcaagtgctttgtaagcgaggcaagagacaccaattgtgtggtgatccttgcggggtctaagtgacccgtgagattaaggaggaagcctcactcggtctaagtgaccgtttgagagagggaaagggttgaaagagacccggtctttgtgaccacctcaacgaggactaggttctttggaaccgaacctcggtaaaacaaatcactatgtcatccgctttattttcttggttgatttgtttcccctctctcccggacttaatattaattctaacgctaacctcggcttgtagtgtgtttaaaagttataaatttcagttttcgcctatccaccccccctctaggcgactttcaaagtcattctcaagcttcctgggccaagctccccttaccaccaccattaccagtaccacccactcatacccgaagccagcagctagaagggcatcaacatgttcaacaacaacgtgacttccgggaggagtccgaagctcgtacattcaacagcactgtaccagaatctaagcatatctactgaagaatatcctactattgatgtacctttatcttttatgccattttcatttttgtaagaaaaacaagtaacgaaggactaacttttgatttcatgtaataattgagcctgcttcaatgagtaaagagtaagttttcttcaccaaattccgaagctacaaaagtcgttcctaagggagcgcagagcatgacgaagctacaaaaagtcgttcctaagggagcgcagcgtaagttttctgctcaaaagtcgtccctaaggggatgcagagcatgacgaagctacaaaaagtcgttcctaaggaagcgcaacataagttttctgctcaaaagtcgttcctaaggggatgtagagccaaaaattccaccaaaatagaaggtgaagaagctctaaagtcattcctaagggggtgcagagcttaaatgccaccgaaatataaggtgaagaagctcaaaagtcgttcctaaggggatgcagagcttaaagactcaaaagttgttcctaaggggatgcggcgtcttgtgtgtttcagtgtgggcgcgcgtgtgtgtgtttgacgtctgtcggggaccataattaggggtaccctcaagactcctaatctcagcaggtaacccccatcagcacaaagctgcaaaggcctgatgggtacaattaagtcaaggctcggtccactcaagggacacgatctcgcctcgcccgagcccagcctcgggcaagggcagccgaccccggaggattcacgtctcgcctgaggaccccctcaagcaacgggcgcaccttcggctcgcccgaggcccagtcttcgccaagaagcaaccttggccaagtcgccacgccaaccgaccgtatcgcaggagcatttaacgcaaacatttaatgcaaaggtggcctgacaccttatcctgacgcgtgcccttcagtcgacagagccgaagtgaccgcagtcacttcgccgctccactgaccggcctgacaagaggacagcgccgcctgcgccgctccgactgctgtgccacttgacagagcgaggctgacagcagccaagtccggcctcaggcgccataggaaactccgcatcgcctgaccccagggctcggactcgggctcagccctggaagacgacgaactccgcttcgcccgaccctagggctcggactcgggctcagcctcggaagacgacgaactccgcttcgcccgaccccagggctcggactcgggctcagccctagaagacgacgaactccgcttcgcccgaccccagggctcggactcgggctcagccccggaagacgacgaactccgcttcgcccgaccccagggctcggactcgggctcagccccggaagacgacgaactccgcttcgcccgaccccagggctcggactcgggctcagccccagaagacgacgaactccgcatcgcccgaccccagggctcggactcagccctggcctcagccgacggtctccgcctcgcccgacccaggggctcggactcgacctcggcctcggaagacagactcgacctcgacctcggaggggcctccacctcgcccaacccagggctcggaccgaccacgtcacatgaggcgccatcattaccctaccccaagctaactcaggctacggggaacaagaccggcgtcccatctggctcgtcctggtaaacaagtaatgatggcgccctgcatgctctatgacgacggtggatctcagcccccttacggaagcaaggagacgtcagcaaggactcgacagccccgacagctgtccttccgccaggctccagcgctcctccgacgaccacgacaccacacgaaccgggtgccaaaacctctccggctgccacgatggcatgtacttagggcactagctctcctccgctagacatgttagcacactgctataccccccattgtacacctggatcctttccttacacctataaaagaaaggtctagggccctcttacagagggtgggccgcgcggggaaggacgggatggcgctcgcgtaagccgctcgctccctcccgcgtggacgcttgtaaccccctactgcaagcgcacccgacctgggcgtgggacaaacacgaaggccgcgggtttccccttttatgcctgtctccctccggcttcttccccccttcgcgctccgtctcgcgccgacccatctgggctggggcacgcggcgacaatttactcgtcggtccagggaccccccgggttcgaaacgtcgacagttggcgcgccaggtaggggcctgctgcgtgtcgacgaacagcttcccgtcaagctccagatgggcagtctccagcaacctttccagtccgggacggtgctccgtttcgggattcttgagttcatgtccctcgacggcagctacgacatgatactccttcccccgccgcgcgacagcgacaatgacggccgacaacctgcccgccggcggcagaatcgacgacgtcttacccacgtggtgggagaacaacattcgggcttgtcccgtcccctcccctgccgacggaggaggaggcggggcaaccaaggccaagcaggaggtggcacctcgtcggctgtcgagcgagtcgacggcgccggcgccccaacggggggcacgtcgggcatcgacctcgcgtctgagacgaagacgagcgtcgtctccctgcaacatgccaaccccaagcaaacggatgacgccagcacgctcgcaaaggacttgctgggcgtcaccctcgtacctgagacgacggtgcagtctgcccctgacatgacttcgtcaccgcccgtcgaccaagaggtaccgaccgattcccatctcgtgccttttagattcagcctcgacccaccaagcgacttcgctttggtggacgctctcatagagacgagtccaaaccctccggggtatcgtatgcggtcaccctgggaccggctgacggccgtctcaacctacgggccctcgggttccgaggaagatgacgagcccgactttagttgggatttctccggacttggtaaccccagtgccatgcgggactttatgaccgcatgcgacttctgcctttccgactgttccgacggtagccgcagcctcggcgacgaggactgcggcccaagtcgtgaatgtttccacgtcaatctatggggtcccgatgaaggcaaccatcttggtatgccagagaacggtgatccccctaggactgtgcctcgcgttgacatccttcgggagctagctgtggtccccgtcccggcgggggtcatgacccacagctcgagcaaatccgcgagatgcaggccaggctcgacgggggagcaggaacactttagccgttccgttgggacattgggcaggaatgggcaggccaacctccggccggagaagtgcgtcatctaccccagggcatccagcaccgcatcaccgacgatgtcagggtaaggccgccaccggtttccagtggggtcggccaaaacctggctgcagcggcaatacttctccgcgcgatgccggagccatttaccaccgaggggcggcgtatccagggagagctcaagaatctcctggaggataccacggtccgacgggccgaaagctctgcctcccgaaggcaggggaacccctcggaacatcgcgctgcgacttcccgattcatgcgggaagcctcagtccacaccgggcgcacgcacaacacagcgcctacggccccgggtcgcctcggcaacgagcaccatcaccgcaaccgtcgagcccacctcgacgagaaggtgcgtcgaggctaccaccccaggcgtgggggacgctatgacagcggggaggatcggagtccctcgcccgaaccacccggtccgcaggctttcagccgggccatacgacgggcgccgttcccgacccgggttccgaaccccgactactatcacaaagtactcgggggagacgagaccggaactgtggctcgtggactatcggctggcctgccacctgggtggaacggacgatgacaacctcatcatccgcaacctccccctgttcctctccaacaccgctcgagcctggctgaagcacctgcctccggggcagatctccaactaggacgacctggtccaagccttcgccagcaatttccagggcacgtacgtgcgcccagggaactcctgggatctccgaagctgccgccagtagccaggggagtctctccgggactacatccggcgattctcgaagcagcgcactgagctgcccaacgtcactgattcggatgtcatcggcgcgttcctcgccggcaccacctgccgcgacctggtgagcaagctgggtcgcaagacccccaccagggcgagcgagctgatggacttcgccaccaagttcgcctctggccaggaggcagttgaggccatcttccggaaggacaagcagccctagggccgcctaccggaagatgtccccgaggcgtcaactcagcgcagcaccaagaagaaaggcaagaagaagtcgcaagcgaaacgcgacgccaccgacgcggaccttgtcgccgccgccgagtataagaaccctcggaaacctcccggaggtgccaatctcttcgacaagatgctcaaggagccgtgcccctatcatcaggggcccgtcaagcacacccttgaggagtgcgccatgcttcggcgccactttcacaaggtcaggccacctgcggaaggtggtagggcccgcgacgacgataagaatgaagatcacaaggcaggagagttccccgaggtccacgactgcttcatgatctacggtgggcgagtggcgaacgcctcggctcggcaccgcaagcaagagcgtcaggaggtctgctcggtaaaggtggcggcgccagtctacctagactggtccgacaagcccatcaccttcgaccagggcgaccatcccgaccgcgtgccgagcccggggaaatacccgctcgttgtcgaccccgtcatcggcaacgtcaggctcactaaggtcctcatggacgggggcagcagcctcaacatcatctacgccgagaccctcgggctcctgcggatcgatctgtcctcggtccgggcaggcgctgcgccttttcacgggatcatccccgggaaacgcgtccagcccctcgaacaactcgatctatactcgtctgctttgggacaccctccaactttcgaagggagaccctcacgttcgaagtggtcgggtttcgaggaacctaccacgcagtgctggggaggccatgctacgccaagttcatggtcgtccccaactacacctacctcaagctcaagatgtcgggccccaacggggtcatcaccgtcggccccacataccgacacgcgtacgaatgcgacgtggagtgcgtggagtacgccgaggccctcgccgaattcgaggccctcatcaccgacctggagagcctctctaaggaggcgccagacgtgaagcgccacgccggcaacttcgagccagtggagacggttaaatccgtccctctcgaccccagcaacgacgcctccaagcagatccagatcagctctgagcttgaccccaaataggaagcagtgctcgtcgactttctccgcgcaaacgccgacgtcttcgcgtggagtccctcggacatgcccggcataccgagggatgtcgccgagcactcgctggatatccgagctggagcccgacccgtgaagcagcctctgcgccgattcgacgaagaaaagcgcagagccataggcgaggagatccacaagctaatggcggcagggttcatcaaagaggtattccatcccgaatggcttgccaaccctgtgcttgtgagaaagaaaggagggaaatggcggatgtgtgtagactacactggtctaagcaaagcatgtccgaaagttccctaccctctgcctcgcatcgatcagatcgtggattccactgctgggtgcgaaaccatgtctttcctcgatgcctactcagggtatcaccaaatcaggatgaaagagttcgaccagctcgcgacttctttcatcacacctttcggcatgtactgctatgttaccatgtcgttcggtttgaggaatgtgggtgtgacataccaaaggtgcatgaaccacgtgttcggtgaacacattggccgaacggtcgaggcctacgtcgatgacaccgtagtcaagacgaggaaggcctccgacctcctttccgaccttggagcgacattccaatgtctcaaggcgaaaggtgtaaaactcaatcccgaaaagtgtgtcttcggggtcccccgaggcatgctcttggggttcatcgtctccgagcggggcatcgaggccaacccggagaagatcgcggccatcaccagcatggggcccatcaaggacttgaaaggcgtacagagggtcacgggatgccttgcggctctgagccgtttcatctcgcgcctcggcgaaagaggcctgcctctgtaccgcctcttaaggaaggtcgagtgcttcacttggacccctgaggccaaggaagccctcgggaacctgaaggcgctcctcacgaacgcgcccatcctggtgccccctactgccggagaagccctcttgatctacgtcgctgctaccactcaggtggttagcgccgcgatcgtggttgagagacgagaagaagggcatgcattgcccgtccagagaccagtctacttcatcagtgaagtactgtccgaaactaagatccgctacccacaaattcagaagctgatgtacgcggtgatcctgacgcggcggaagttgcgacactacttcgagtctcatccggtaactgtggtgtcatccttccccctgggggagatcatccagtgccgagaggcctcgggtagaattgcaaagtgggcggtggaaatcatgggcgagacgatctcgttcgcccctcggaaggccatcaagtcccaggtcttggcgaactttgtggctgaatgggtcgacacccagctcccaacagctccgatccaaccggaactctggaccatgtttttcaacgggtcgctgatgaagacaggagcaggcacgggccttctcttcatctcgcccctcaggaagcacctacgctacgtgctacgcctccatttcccggtgtccaacaatgtcgccgagtgcgaggctctggtcaacgggttgcgcatcgccatcgagctaggggtccgacgcctcgacgctcgcggtgactcgcagctcgtcattgaccaagtcatgaagaactcccactgccgcgacccgaagatggaagcctactgtgatgaggttcggcgcctggaagacaagttctacgggctcgagctcaaccacatcgcctgacgctacaacgagactgcggacgagctggctataatagcctcgaggcgaacaacggttcccccggacgtcttctcccgagacctgcatcaaccctccgtcaaggccgacgacacacccaaacccgagaaggcctcggcccagcccgaggcacccttggctcagtccgaggcaccctcggctcggtccgaggcaccctcggctcggcctgaggtaccctcggcccccaagggtgaggctctgcgcgtcgaggaggagcggagcggggtcacgcctaatcgaaactggcagacctcgtacctgcaatatctccaccgaggagagctacccctcgaccgagccgaagctcggcggttggcgcagcgcgccaagtcgttcgtcttgctgggagatgggaaggagctctaccaccgcagcccctcatgcatcctccagcgatgcatttccattgccgaaggccaggagctcttacaagagatacactcgggggcttgcggccatcacgcagcgccttgagcccttgttggaaacgctttctgacaaggcttctactggccgaccgcggtggccgacaccactagaattgtccgcacctgccaagggtgtcaattctatgcaaggcagacccacctgcccgctcaggctctacagaccatacccatcacctggccgtttgctgtgtggggtctggacctcgtcggccccttgcagaaggcacccgagggctacacgcacctgttggtcgccatcgacaaattctccaagtggatcgaggtccgacccctaaacagcgtcaggtccgaacaggcggtggcgttcttcaccaacatcatccatcgctttggggtcctgaactccatcatcaccgacaacggcacccagttcactggcaagaagttcctggacttctgcgaggatcgccacatccgggtggactgggccgccgtggctcaccccatgacgaatgggcaagtagagcgtgccaatggcatgatcctgcaagggctcaagccatggatctacaacgacctcaacaagttcggcaagcgatggatgaaggagctctcctcggtgatctggagtctgaggacaacgccgagccggaacgtacaagctggccaacagtcaaggcgaggtctacgacaacgcttgaaacatccgacagctacgtcgcttctacccttaagatgctttcaagttattcgtacacctcgttcacacacaaagtctagtcatcaaggaagggtcagccttgcctcggcaaagcccgaccctccctcgggggctagaaggggggaaccccctctacgtcaaaattttcctcggaaaaagatcttttctgccagagtgtctttcgtgcttttcgactacttcgaaagtggatcctgaaaacgacggagtacacgtaagcagccaaggctgaccgagccgagggactcctatgcctctgggatacggatacctcactcatcaatttctgtgataagtaactcacgctcggataagtgattccgcggaccaaacaagtcttcacgctcaactcctctgccgaaacgatttttcgggccttctcgactacgtcggtgacagaaccctatggacgagtaagagtgcacgtaagcgacaaggccgaccgagccgagggattcctacgcctccaggatacggatacctcactcgtcaccttccgtgaaaagtaactctcgctcggacaagcaattctattaccgacaaatgagtccagatactcgaaacaataggaaaaggaacgcagccttacaacacggcgacagtatgtttgggcctcggcggccgcagaaaacatacgcacactacaagataacccgatcctgcaggctcggatcttgatagttgaagggagcagcagcaccctcggcgtcaactacaccttcggcaaagtccggcatagcctcagacggcgacgcggtcggaggatctccaccccgaaggacgacatcagcaccacgcccggaccatagccggcagggtcttctccaggaatccggctcgagcagatggctcggccggccacctcgaagcctcagccagctatcccccgaggacatcagcccggcccatggcctcggcaactcaactccggcgtcggtcccgccaagtggacgacccggccaggttccggccgatcaagtcttcttttcgagccaactccgcctctgtccgtgctgacaccggcacctccggcttcggctcatcgaagagcggccgagggttcctttaactaggcaagagaagcctcggacagcaaggccgaccgagccgagggactcctacgcctccgggatacggatacctcactcgtcaccttcgcacgaggcgactcacgcttggtgaagcagttcagatagccgacaggcgagtcttagtgctcgaaatgaggagaaaacacggctccgtgccaaaaatacatacatgttcaggccccgacagccataatgaacaagacaccagcactcaaggtgccattacaaacggaactccggttccacctccgcaggtacgaacaaccccacagattggggggcctgcggagcaacagaaggccgacgggtggctcgccgccgcccgctccaacaacgacgacgacgacttctgctccgaggggccgaacagcagcagcgatgacctcggggcaaatgctgctaccatagggccctcgcccacttcctcactcgagaggcaaggacgagcagaaggccgtagagtcggaggtcagtccgtgggcggcaccggctatctcgtcggcggagaaacctcttccggctgccgtggcggaaggcggcgccggaagcggctccgaagccgctcgggtcagagagccgggcacgcggcagctgccagcgccacgaacggcgaacgcccttccccccgatcactgagggaaggagcgggccgctgcccgcgcagagaccgaccccaactcggcgcactcccctccccagcactgatgatgaacacccttgaagctgagggaggggcagaggccgcagcccggcttgcttctccccacccaggggctggtggtcaccgtcttgggtgaccaccggcaaggggatacggtcgggctgcctgatgaaaatccttgaagccgaacgatggctgaaaggtaccaacttccacgaagttgtgttcctccaacgacgaggcggaaggactgtgggtgttcgccatccgggggctcggaaggtggaaagacacgatgcataggggagcgcgacagacatggtcgtctttcaaggggtcaccctccttttaaaggcgactctccccacttgcgacctcagccatcgcgggctaagtcttctccaacacgctccaaggtcctccccctacgacacgcgggctgggtcccacgcgtcatgcaaactggcccaaggcagaagaagccaaaccgccgcgcgcggtgcatgcaactgcctagcggttacaagcattccgccactttcgcctagaccagcgggtgaaagggcggacagccatgcagtcggcatgcaacagcgccaagtgggcgcaccccttcgactccaacgcgcccagcatggaggcccaggcccacacgtcatgcaaccggcgcgccggttgctacgtgcgagcaactgcaccgcccctcgcgccactaccgcacctcctcgactgcggaaccagtaccgcgactcgaggcaaccctgcgtatggcccaacagtaccagccaggcgcatcggtcacgggccagtcagccgcgggagaaggcgcgacggtcgatgtggccaaaaatgggccggcagtaatggcggtggcaggcgggcggaagcagcggtcacgtcgtcagccaagctcacgtcccctcatgggacagtgagagaaccctctcccacggcgtgaagacggcgcgcccgtgatccattccttgaacggctcgcgcacgcgcaacggctgccccgcgaaccactcgccccgtcgcattaactccgcggtgggacaggcggcacctttggcaggagaagcgggcgacgcttcgccttcgccataacgaccgcgtcaaaaaaggtgcgccacgtcgtttcaatttcgtatcattttccttttcagctttctctctcttataacagggaccgggaaaggggataccccgaaaaggatccttctccgcgaaggaaacgggccccgagcccccctactgatcagaggttcgaaggctggccccccggaggggttcaacagccgcctcagagcgctcgggctccacgcccactactggtcagaggttcgaaggccggcccctcggaagggtacaacggccgcctcaggccactcgggctccgcgcccacaactgatcaggggttcgtaggctggccctcgaagggttcacagccgcctcagacacagagcgagggatgaccctgggtacgttcaatacataaccaaggctcgggctacgctcccgaggtacctgttgggcctatgcttcgtcgccgaaggtcttatagaaagaagtagtcctcggatgaagctgtttgtataagatagccgaaggttcctcttcgtaaagcttcggcgttacaaaccgacttaaagatagaatgaccttttagtccataaaggtctgagtcaatgttgtaagtttttataaggggcatacttgtaattcctcacaggctgcgtcctgtgcctataaatagtgaacagtattccgttactgttcgggcattcgattaattgcaatcgcatctctcggaattcaactctttgccaaggcaaaggtattattgtattcaatgattttgtgtattaagtaaatgcaatgtaattcatctatgacatgtttattcctcttataccttttattttatgtcattttataatctttaccggaattttattacgaaggttcgagcttcgtagttatgcttttatcaaccttcgtctaggattcattattctcaaaagaataatgtttcatagacgaaggacattgacatttaacattttatgttgccttgttcttaattctaagcatttgagaacaagtctccaacattggcgcccacctccggtgaactcacttccactttttgagctgatggcttcgttcaatgaccaagctggagctgcttcggacccgaagctggtgctcccgatcacaggtggctcgtcctcagagccagctaacaagaagcagaagaaagaagcacagagaagggtacagcatgttggggtgcaaggacctttcatcaagtcaagatggtctcacattcccatcaccttctcccaagaggaccttcagctcaaagattacccacacaacgatgtcatggttatctcttgtgttatcaaaggatttctggtccacaatgtcttggttgacacagacagtgcagctgacatcatatttgctaaggccttcagacaaatgcaagagccagaagataagattcatgatgctacacatcctctctgtggcttcggaggaagacagattgtagcactgggcaagatcaccatgtcagtgaccttcgggttcatcaacaacactagaactgaacaagttgtgtttgacattgttgacatggaatacccttacaacgcaattattggtcgtggtactctcaatgccttcgaagcaatccttcatcctgcctatctttgcatgaagataccttcggaccagggacccattgctatccatggaagtcaggaagctgcaagaagggccgaaggcaattggactgactcaaaagcaatccataacatagatggagctgaagcttgtgaacagtacaaattcagaagggagaaagcagcttcagcagatcagccgaagcctatgctcttatgtgaggacatagcagagcagaaggtgttgttaggctctcaattgtccgaagagcaggagaaaaccttgataaggtttttgttcaataacaaagatgtttttgcatggtcagccaatgatctatgcggagttaatagagatgttattgagcactcactcaatgtcgatccatccttcagaccaagaaagcaaaggcttcggaaaatgtcagatgacaaggccgaaggtgctcgcaacgaagtcaaaagactcctcagtgcaggagttatcagagaagtgaagtacccagaatggctagctaacactgttatggtaaaaaaggccaatggcaagtggcgaatgtgcatcgattttacagatcttaacaaggcttgtccgaaggatgaattcccactaccaaggatagactctttagttgatgcagcagcttcttcagagctcatgagtctgttagactgttattcaggctatcaccagatttggatgaagaaggaagatgaaccgaagactagcttcataactccaagtggcacatattgctatcttcggatgcctgaggggctcaaaaacgctggaggaagtttcagccgaatgactgcgaaggttctccaatctcaaataggcagaaatgtgctaacttatgttgatgacatcattgtcaaaagcacgaagcaggagaatcatattgctgatctgcaggagaccttcgccagtttcaggcaagctggcttaaagttaaacccagaaaaatgcgtcttcggagtaaagaaggggaaatttcttggatgcttggtttcaacaaagggaattgaagctaatccaagtaaaatagaagctatacttcggatggagccaccaactacaaagaagggggctcaaagattgacaggaagattggcatctctcaatagattcatatccagatcagcagagagaaacttaccattcttcgaagtgctgaaatcagccgaagtttttcaatggggaccactccagcagaaggccttcgaagagctgaaacagtatttaataaatctaacaacattgactccaccaatgccaggggctcctttattattatatgtggcagcttcgcactcagcggtaagtgcagcgcttgtccaggagaagcttgatggtcaagtcaagaggcaggccccaatatattttgtatccgaggttcttagtttgtcaaagaaaaattatacagagctggagaaggtattgtatgctgtcttgatggcctccaggaagcttcggcattacttccaagcttacaacataattgttccttcatcacaacctctgaaggatattatgaggaatcgagaagctactggaaggattggaaaatgggctgcagagctcaatgaattttgtattgagtatgttcatagatcttcgattcagtcacaggcgctggcagactttattgctgattggacgccaggggctcaggaggaggaaacgaatacagacaacgaagcctggacagtgttttgtgatggatcttggggaaccttcgaagcaggagcggctgctgtgttggtttcaccttccaaagtcaaaacttgttatgcggcaaagcttgattttaattgcacaaataacattgctgagtacgaaccattgattctaggtcttcggaagttaaaagcaatgggaatcagaagggccatacttaaaactgattcccaggttgtttcgggtcatattgacaaaagttgtaaggctaaggatccgaagcttgaaaaatatctcgatatggttcgaagagttgaagcttccttcgaagggttttctgtcaaaaatatccctcgaggacaaaatgagcatgctgatctgctagctaagtcagcaacacaggggctgccgttaccttcggatgtgttcttcgaaacaataaaagcaccttcggtggaacttcttgaaagagcagttcttaatatatctcctgtttttagcgaagattggagaaccgagatcatctcttaccttcagggtaaattcctttcagatgacgaagcttataacaagaggatagaggcaagagctcgtccatatgtcatgatagaaggggagttgtacaaacatggagtttgtactccgctgctcaaatgcttatccagaaccgaaggtatagaattaatgaaagaaatacatgcaggcctgtgtggatctcacatcggatctaggccgttacttggaaaaattttccgccaagggttttattggccgaaggcagcttcggatgcagcagaattggttcaaaagtgcgaaggttgtcagaaatgtgcaagagatcaaaaacaaccttcgtccttaacacagctcatacaacccacttggccattgcaaaggtggggccttgacttgttaggtccattaccaccggcccaagggaacctgagatatgttgtagtagctgtggagtatttttctaaatggattgaggcgaagcctttagccacaataacttcggctaccgtccaaaagtttttctggcagaatattgtttgtcgtttcggggtgccaaaggctatcactgtggacaatgggacacagtttgactccgaagctttcagggatttctgtgaccaaattggtacgaagatccattttgcatcagttaggcatccggagtcaaatggactcgttgaaagagccaacggcattataatgacaggaatcatgaagttaatcttcaatcaacccagaggaaaatggccagatcagttaaccaaagtggtgtggagccacaacacgacaacatcaaggtctacaggcttcactccattcaagttgttattcggtgacgaagcaataactccagaggaagctaaaaccggatcaataaggatagtagcttcggcagaatcagattccgaagctgcttattctatagaaaaagatgctttagaagggatcagactgcaagccgtggagaatatcaataaatatcaagccgaaacagttaaatggcgcgatagaaaggttcggctaaaaaatattgagccagggcacttggtgcttcggagagtggccaacccagaaacagtgggtaaattgcagttgaaatgggacggacctttcttagtagcatcttcgtcaagacccggttcatacaggttgaaggatatggacggcaacgacattcctaggtcttggaatgcggatgagcttcggcgatattatgtataattcgatgtaatttttcatatttcttattttttctttcatggcacccttttcctttccaaagggggagaaaggtttttaatggggccagcatatgtaatttccttttttagttctataagagcaaaatcccccaaagaatgtaaatgtaaaagctgagaacgcaccatcgagtgccaaaaagtaaaggcgaagaagctccaaagtcgttcctaagggaatgcagagcttacagcgaaaagtcaacgctgattccgccaaaagtaaaggcgaagaagctccaaagtcgttcctaagggaatgcagagcttacagcgaaaagtcaacgctgattccgccaaaagtaaaggcgaagaagctccaaagtcgttcctaagggaatgcagagcttacagcgaaaagtcaacgctgattccgccaaaagtaaaggcgaagaagctccaaagtcgttcctaagggaatgcagagctaaggtgtgattgtttctaagaaaataatggttatgaatatggtttcggagacgtgtttggccattcacttgcacatcacattacatcatagcatttgcattcataaacattcatctaggcatatgtaggataatcatcttcatcgcataaatggttgcttcggcaagaagagaaaaaagaaagaaaaaaaagagcttcgtgcacaaagaagaaaggaaaatgttgttttctatgaaggagagcttcggaaaaaaggaaaatgttgttttctatgcttcgttgcgtacgaaaagaagggaaggtgtttttttcgccttcggctcaaaaaagaaaatttcgtccacatcaaagcatttctcatacatcagtgaaaggttaaggatatattacaaggtatgaacagaatacattaaaaacaagttttgtttacatttacaaaagttatctcaaaagtttttcaagtactgtctacagtctactatctaaatctccaaggagcttcggcttcggcgttatttttgatcatcagcttcggcttcgtcatcctacatgaataaggtcgttggaagtcaaaatcaagtttacaggaaaaggtaagcacaaggtatggtttcttactggatcaaggtgactacgagcttcgtctccagctttctctcgaccaccttttgtccatatcatttttacaaatcgattcgagatgcttcgggcgagatcagggatgtcatccaggattgatggtgacaaagtgaaatttggtctattgacaattttcccatgatcacagccagccttcaggaaggctgcagcagtccctcgagaagccacccaggcacagaagtcaccatgcccagctatgacttcgtcgagctcgtcgatctccccctcaatatgttcgaaggttttcggtagatcttcagctgagggggtgaatttttcactgctggctccaactgagtaaaaaatctttcttaatcgttgaatgcatctgttgctaaattccaagcatttttcttgaagacttgtcagtagttttctcaaatctgaattttgctgagcttcggcttcaagttttgcattaagatcttgtttttctcgttcgaactgctcagactggcggagaagcttcgtgttcagttctgatatttttgcttcagcttccgccaataaaccttcggttgcctggagctcaaagttctttttctcaaaagcatctgattgctcctttattttgttttccaaatttccaattataacttcatgctttttatcttcaagatcttgctgcatttgcaaggccttgctcaatagcatactctacacgaacacaaccttcgtcagacatgtttttattagaagcaataaaagttaagggacaagttattcaccttgaagttggagtaaaataaactaccaacgacatgctgtcgtcggtagcggctgatatctgtctctagcttcgggaatccaatactcttggacagagtgctgataactttggcccctgtttggtctcgaatacactctaatttctcatcatcaacgcctccgaagaggagtgccccaggtttgtatccacaggatttggcatactctttaagttcttctatttcagcttttgatagatgttctccaactaagttttggaacgcgaaagcttcgttttctgaagcttcatcagcaatttcttttcctttctttgacgctgcggtcacggcctcttcggcagcagtggtagcttcttctgcagccatgtctagcagtatttggtcaatatgttcaattgtgctctccaaattcaaatcttcagctgaggcagcttcggcagctgcggcctccgaaggtgtaatttcaatatctaccccttctgcagccgcttgtattttttgggccgaagctcttggcggcgttttgtcaattacctctgtcacggtaataattctttgtttctttgctttgattgttttcctcgatttctcgggctccttgtccttctgaaaaaactttgtcagttgaggacccagtggacttagcttcgcaggtaaggattcagtcattaccttcagaatttcctcaacaatagcagcagaaggtgatgcgggggtttcttctgcttcggatatttgttgcttcgagaagaagcctttcttttcttcggaattttcttctttattggctctttttcaccttcatctaaggcttcagttcctcttttccttttttggcctccggcacctttgttcagattttcgtagtctgggtattcgaaacccaaggcgtccaacactcgatttagccttcgtttcggatgggtgccgaaggccgcggtcatcagttgatcttcttttttggaataattgccaagtatctcattacacatcacctcaatcatatccagccactcttggcaaggagttttaaagtatttcttaaatttgaaatagtaaggtaaacgtacaagttcaccttttttcttctcccccttcagcttcggcatttcccactcttttacactaggaaaaaccttgaaagccaaaaattcctggaccaggtcccttgtactgatatgctctgcaattattttgaattcatacattgctttttgagtcggaccctctggtaacatgtgacactgggggcgggtttctccgaagattagtgcaagtgggctttgcacaagtttttccttatcgtcatcaaccttgacatagaaccattccgatttccaccctgccgcccatttgcttcggtagctgatcacaggatacttcgtagttttccgataagcaaaattataacaaccaaaattgtcatgtaatccatcctttctagcctttgtctgatagtgcagttcatgaactcggcaaaagctgtccgcaaacggttccaccgcctggcttcggagtgcctagatataaacattaagcctaacgatagcgttaggggttagctggtgaaaatagattccgaaattcttcaatatctctgcaataatcccatgaagggggaatcttaatccagccttcagaaagctcttaaaaataacaatttcatcttttccggctttggggtagtctcttctcccccgaagcgtaatagcttcttttgactttcagtaaaatagcctgactttaccatcttggacaaatcagccttcgaaacagtagatttcccgaagtccaagtggctgggtttgcttggcgtggcaaggtgataatcatcttcggggtcagtttcctcagcatcttctccttccgcttcagcgattgcttgttctgcatcatcaataggaatcttttccgaagtcactagcccggatcgttgcatggcttcggagatagggacagtctccgaagcttcagtttcgtccccctcacgctcaaccctagcggtagaacggactctggccatttaactatgaacttgtgaaactttaatacttttttctccgaagcaggcttcaagatggagcttcgttcgattccgacaaacaagcttcggcgacggttaaaattttaacagcaaaacaatgcaaatagcagtaaatgatgtggtaacttcacacctactcgtctgtttatatagtgccgcaggtaagaaggcgaagcgccagaagttttacaccaggcggacacccgctcgcactcgctgtacggtggaccacagagaccgaacagtaactctgcaaggtggggccgctacgcgcagggagattgaatcgtttctcgacaacgagctcagggaaggtgtttttgagaccttcggcgctccgaagcttaagaaacttttttcacggatcaagctcgttacgaaaaacgatctagcaccgcgaaaggggctactgttgggcctatgcttcgtcgccgaaggtcttatagaaagaagtagtcctcggatgaagctgtttgtataagatagccgaaggttcctcttcgtaaagcttcggcgttacaaaccgacttaaagatagaatgaccttttagtccataaaggtctgagtcaatgttgtaagtttttataaggggcatacttgtaattcctcacaggctgcgtcctgtgcctataaatagtgaacagtattccgttactgttcgggcattcgattaattgcaatcgcatctctcagaattcaactctttgccaaggcaaaggtattattgtattcaatgattttgtgtattaagtaaatgcaatgtaattcatctatgacatgtttattcctcttataccttttattttatgtcattttataatctttaccggaattttattatgaaggttcgagcttcgtagttatgcttttatcaaccttcgtctaggattcattattctcaaaagaataatgtttcatagacgaaggacattgacatttaacattttatgttgccttgttcttaattctaagcatttgagaacaagtctccaacagtaccctaggacatttctgagaccagcgggaacgatcttgtaacggaatcccatcagagggaggcatcgagccctcggaccccgtcaaaaggggaccgggtccggcagatcacccgcaggtacttttggagcgcgcctccgggcctctagccgacccctaacaaatgaggcacgggcgtccactcagattacccattagcagctcactggagacaccatgttcggcgccctccaagggcaacatggcgctttccccccctcctcctccttgcggaaaggcaacgcaggggcatatgtaaaaaaagtcgagtctgtccttgaccgtcctctcgctctgtgcggaggctcgggggctgctctcgcaaacccggctccgaccaaaccgttgacagcgtcaacataccagcccgagaacttgggacccgaccgtgcacccgggctacggccagctcgcatgagggaacaaccagaccggccgaagcatcgtgaaacgcattaagacctcgaaggagtctaaccactcctccgaggcctcgggggctacacccggcgggtgcgctcgcgtgcacccaccggaacaaaacgcaaccgagaaaggccggtccccttgcaaaaaagtgcgacaaaagcctccaagcgagtattaacactcccttcgaggctcgggggctactgtcggggaccataattaggggtaccctcaagactcctaatctcagctggtaacccccatcagcacaaagctgcaaaggcctgatgggtacaattaagtcaaggctcggtccactcaagggacacgatctcgcctcgcccgagcccagcctcgggcaagggcaaccgaccccggaggattcacgtctcgcccgaggaccccctcaagcaacgggcgcaccttcggctcgcccgaggcccagtcttcgccaagaagcaaccttggccaagtcgccacgccaaccgaccgtatcgcagaagcatttaacgcaaacatttaatgcaaaggtggtctgacaccttatcctgacgcgcgcccttcagtcgacagagccgaagtgaccgcagtcacttcgccgctccactgaccggcctgacaagaggacagcgccgcctgcgccgctccgactgctgtgccactcgacagagcgaggctgacagcagccaagtccggcctcaggcgccataggaaactccgcatcgcccgaccccagggctcggactcggcctcagccccggaagacgacgaactccgcttcgcccgaccccagggctcggactcaggctcagccccggaagacgacgaactccgctttgccccaccccagggctcggactcgggctcagccccggaagacgacgaactccgcttcgcccgaccccagggctcggactcgggctcagccccagaagacgacgaactccgcttcgcctgaccccagggctcggactcgggctcagccccggaagacgacaaactccgcatcgcccgaccccagggctcggactcagccctggcctcagccgacggtctccgcctcgcccgacccaggggctcggactcgacctcggcctcggaagacagactcgacctcgacctcggaggggcctccacctcgcccaacccagggctcggaccgaccacgtcacaggaggcgccatcattaccctaccccaagctaactcaggctacgaggaacaagaccggcgtcccatatggctcgtcccggtaaacaagtaatgatggcgccccgcatgctctatgacgacgacggctctcagcccccttacggaagcaaggagacgtcagcaaggactcgacagccccgacagctgtccttccgccaggctccagcactcctccgacggccacgacaccacacgaaccgggtgccaaaacctctccggctgccacgatggcatgtacttagggcactagctctcctccgctagacacgttagcacactgctataccccccattgtacaggatcctttccttacgcctataaaaggaaggtccagggccctcttacagagggtgggtcgcgcggggaaggacgggacggcgctcacgtaagccgctcgctccctcccacgtggatgcttgtaaccccctactgcaagcgcacccgacctgggcgcgggacaaacacgaaggtcgcgggtttccccttttacgcctatctctctccggcttcttccccccttcgcgctccatctcgcgccgacccatctgggctggggcacacggcgacaaattactcgtcggtccaaggacctaacgggttcgaaacgccgacaacgtcatcatcatattgcatcatatcatagcatcatttcgcacaacattacgtcatacatcatatcgcattaacggcaaaagggttggacacgaagtaaattttcggcaatactttgttaaatgaaaatgtgttgaggcacaaagcaaacttcgagaaacgcaattgtatcagaatggccatagaaggggcatctttctttacgacgcatgaaaagaagggaaggtgttttttcgccgaaggctcaaaaacggtatgtacataagtttcatgcatcgcaaagaaatatattacaacaatttacatgtctcatcaattgttcaaaacaccaaatgttacatagtaccactgcaataaagtttaatcttccttaagtattttctttgcggcttcgttcaacagcttgtcgatgacttcgtcgataatggagttagcaatgctcattatgtccaatgcttctttcatgaccggatcagctagggggttatatggctcgggcagtggtgacaattcagctgcagtaagtaagctgttagttcgaagccagaaaataagagccgaagctaaaattcaaaaacattacttatgcgcctttcgcgttcagcagcttcttcggctcgtctagcttcttctcgggcttcatgggtttccttttcatttttctttataatttcgttggccaattcctcaccaccattcaccaagacatcagaataaaattttccgcccactaaagtaacttcagccgaagggtcttttgtgtcatctgtggagaaggtagtctcagcctgggctgcagttttaatgtggtcgcaaccagccttctccaagattgccgcaatacctcgagcaccagaaaaggcacaaatatccccgcgatcgtttaggatttcttcaaaggcttcggcttccccgcttatccaatcaatgacgccttcggggtcgcctcggatgaagttttcttcaaaagaatatgcgcctactttagcaaaactggttttcaattttttcacgcaatccaaggatttctcgaaacacctttccttggattcacgaagctcctcaacgtttttctctagcctagtttttgaccattcactaatttcttgattagccttggcaactacaaagttctcgttggcctcggtgagctttttctgaagatcttcaatctcggctttatgagcttcgttctgagcgttgtatctcgcttcatcttccttcactttactcactaatgaaattagaattttgtccttctctaaggcttcatttctcagcttaattacctctgatcgaagattgccgagagctatagtgcaactttcatcttctgcattcttttgagccctcaaggcgttgctaaggattaagccctgcaagaaaaaaagaaaggattagcatgagaatgaaagacttcatttccaagttcataaactacaaagttcacaacttctataccttcatactgttgtatgtgaggctgcccgcgaggtcatccttcgacatggcggaaaggccagcttcgagcttcggaaatcccatacttttggccatctcccggcagacggatatctctttgttgtccgggagacagtatagaaaattatcttcgtctgtgtcgttgaacactaaggcccccttcggatattttagttctcgggcatagtgcttggactctaaaatttcctcttcggataaccttttccccgaagcatgtcgaataatatagtcaatatcttcggacggtgcttcgggagcaagtgattcagttttttctatcacatcccgctccgctgccatgccgacattgggagattcttgctcagccttaacttcagaagcggcaggctttgtctcagtgggcaccgaaggcccagcttcagcttcagcctgggccgtagtagcttcgacaactttctttgcgagggtaggagttagcgcctttgtggtctccatgactgcgtctagcacgctggccattctcctcctattgggagttgtggcgggagcctttgtcaccttcgacaattctgcctctaccagtgggctcaaaatttctgacaatactattgttttttccaactctggctctttggccgcatcatcttcggcttcggctgacccgactataggtaccttcggcactatagtcgatccttcagcgctcccgacgacgggagcagcttgttccgcttcggcaacgaaagaagtcccttcaccaaattcaggcactacaaccgttttaatatatcgtggctggtgggtcaaaacctttattttcttgcccttcggcacaacagtggtggccgaagcgacagtttttctcttttttccttgccttcgcaaggggtagcagtaataagggtatatgaagccaattgcatcgaaaaccctgttcaatcttttcttgccccgacccccaaatgctgaggacaaagcatcatcttcggctctggtatacgctccaagtaactcgtcgctagtaacctcaatacatttcagccactcgtcatttggctcgtcaaacctgtctctgtatctgaaggtatatttcaaacgaattaatccaccttcgctggacccggcaacagtctccttcagcatttcccagttgttcacaagtggccatactctataggctatgtgctcttggatcaggtctcttgtaccaatgaaagcataggcattactgaaagccttttgacatgcttcgacatcattatcaatcgccacagtcggccttcgaaggctgaagcgagaccagatggggcgttggatgatccccttgatgtcatccctttcaatcagattattcttaacatagaaccactcctccatctaggacccaggccacctcttccgaaatgttggaatcgggtaatttgcattagagcgagcaatgaatccataacaaacgaagttgttgtgatactgctctttgccagtggccttcgtctcgtacaacagttcatgcatactgcaaaaacacttcacgctcggttccagcccttggcttctcacagcccaaacaaacaagcccattctaattatagcttcaggagtaagttgatgaagaaagatctgaaatatttttagcacttcaaccaaaaatctgcttaatgggaaccgaagacccgccttcaaaaagcttttgtaaacaaccacctcattttcttcaagagcaggggcggtgctatctcctccaaccctcacaatggacatgtcacgaaagtatcttcctttcatggcgtcaacatgactttgcttaatggtcgactttccgaagatggtatggcttggtcaccagggccggtcctcagaatcttcatccccactttccacatcatagtcattgctatcgttggaatcttcagacaaatccaccattatttcctttgtgatcttttctgtatttgtttttgccatagattcgtaaaacccagcaagaaaagggtacgcaaccttcttctcctcatacatcttctccttctcggatatcttcttctcctcagacatcttctcttcagacatggaacaagcgcttgtctttaagacgaagctcaaaaatcaggcgagatctgataagcaagagttaaaaatttgagaaaataacgcaagcaacagaaatagcgtatcaaatgctaccgctgtgggtttctatttatatgcctagtgcattgcaacctggcgggccccatttatcattgactttcgctattctagagaagggaaagtgttttttcggaccttcggctaaatgccttcgtttatgtcgcagtacgcaacaaattaatactgcgaggggctactgttgggggcattcgtcttccgaaggtcctcaaaaacacgactaacatgttttccaagtataatatactgtcacaggtaccttcgactttgagatgaaggtgcacacgatatgaaaggcgcggcctggaagaaggatgaatcaattccgaagctatggatggagaagcttcggcttagcggtggaaaatgaaaccgacctaaaggggaaaatgctgtctagccctcgacagattactccttagtcaattgtaaatgtcaaggacatggatgtaattttacacaggctgtgtcctgtgcctataaatagatgaactctaacaccgtactgttcatgctattttgtattcacgtgcacgtcactcttggattcttaccttctgttaagccgaaggtataaatataatttaatattattaatatttgtatttgatcatataataaaaatataaataatctaatgatttgatatgatcatgttctttatatgtctcttatattcctaccttttattattatatattgagattacgagggtttattcttcgtaaccttcgtctgaagtttattatatcctaagggagataatgattcggaggacgaatatctttaaccattaacatttgtgttgtcttattcttaactcataacatttaaaaacaagtgaccaacaacgaccaaggcgattaggtgctctaatcgggtcgaatgtgctaatcgagcacccacccacctcactctcacctgtctcgtcgtcatttcctcctaaaatccccaagcctccaatccactgaactaaaccctagacatggcgggtagagactactgccggttgccggtgcgcccgcgcgacttctgaggccccgcccccgtcccggcgtcgccggaactggctccactgtcgcccccatcactgggactgggagagtgggagttcagagccgcagacgctggggcgccgggtcaccggaaggccgggaaggaaggtgtggccgcaagacgcaggcaggaggcatcgactcgactcaccatgtctcagtcaccgggaggacgggaaggcatgtttagcacgacgttgatcgttgccgttgccagtgtttcttcgatttttcttcttctcttttctagatcgtagagctttgacaaatgcagaaacgtagatcacgattggctcgaggtctccggtctcgggaacacccaatactagacgaccctggctccgacagatgcgcgcgaccgataatccgtttctcgtctctgtttcgtctagaagctgttgcaaacatgccgttgtgggtactacaataatttgtttgattttgcagacactttccccccgaatatatgttttctatgtacgcagtcatcatcagggatcgaggccatcgatgctacaataatttgtttgattttgcagacaccttccccccgaatatatgttttctatgtgtgtacctattggaaaacaaaaacaaaaacaaattcctcttttttttctcgaacgaaattcctctcctgtgatactgatatgtaaccagctacctgtctacctgtgtctgtaggcatatattacagcaggcagaggaaacctgagcgca

SEQ ID NO: 862 - DNA, 1833 bp, Zea mays
  Intron number 2 from transcript GRMZM2G012498_T01 (locus G RMZM2G012498) derived from phytozome v7.0 (chr-ID 8; pos 1 12976362 to 112978194 reverse strand)
ggtggcgcggctcctccggcggcccgccaagttcggtgagtatgcacgtttcgctactgtaaaagtggagtacgtagagtatgcatgaatctaaccagcgtatgcgtatcgatcgttgacaactacgtatgctgcatgagtccgtaaagctagctaattaaggtacgcgcgcgcgggtagataattaattgtatggattaagtaaccaagtcaaacatgtacaccatcaacatttaacagctagcgtacgtacttattaatgcgcttccaagagttttgaagtcttcgaaaactttggaatcttgaaggtacgctaatccatgcacgtacgtacgtatcttaattgagcaccaacaacagcaaatgcaaagaagcatctgcaggtaacagtatgatattcggcacaaccagattcttcacgctaagcttgttgatctaatgttatcgagaatttgtcgagcgcagcagccactcggcaaagtactttcttctggatttccggtagtgatgcatgcaaatagtagtgtcttttttatttcttcattttccacatatgagttgatattctgtccactttaaattatactagttagtcgctcgtatatttctacgatttttatatatcatataggtagactcctctcaaataagatatttattcaaacatatatatatatatatattatttttaaattattaatatatatatttatttacaatatttcttctttttataacaaacaacaggcatgaacctagggttatacaccatttttatttagatattccgtatgccgcgctcgctggaggaggcgatgcacgaagaaataactccaagcttaaatatagtagagattttgacttataaaaataaatttgccatatgtagttctagatatatgcataatgcatgactagaaaagctaaaaccatttatctatcagtttttctaatggtcagatgtctgatttctatcttctattcaagatatacctttatcatatatatatagtttccagacatcccctcctcgatcccctccgattgcaaatagggctggacaaaaaacttctagctcgttaactcgctcgactcgactcgtttataatttgtaacgagttgaccttgtatttcaactcgttacgataacgagccagctagctggctcgcgagctaactcgcgagccaaacgagttggagtaattagtcaaatcacaataatctctgatctaaaatagtcaatcttgtactctattatagttaatcttgttctttgttgagtgtggaatcataagttgcaaactctattcttttttctaaatcgatctccttcttttcttttgctacatatttttatatccgttcataaacactagacatgatattatcgagctggctcgcgagctaaacgagccaactcgagtcgaaccgagttagatctttagctcgttaacctaacgagtcgagacgagccagctcaagtcgagtcgagttgaggcagctcgatatccacccctaattgtaaagggcattcgagttttcaaacaaaccctaaaagattatagagtttgatgatatacaaactttattctatctgggaataatggtggtgtgggagtacatgtatgtatagtttgtgtggctgtgtgtgcaaacttgtgactcactcttacatatggatcgttcactcgaagcaaagtttagaacatggtgtgtcaatggtacctagtagcatggctgccgatgaattgccattgtgctgactttggttttttggttttaatttggcacttggcagggttcaccgaggagcccatccgggcgtgctgcggc

SEQ ID NO: 863 - DNA, 13475 bp, Zea mays
  Intron number 11 from transcript GRMZM2G071264_T01 (locus GRMZM2G071264) derived from phytozome v7.0 (chr-ID 10; pos 128719543 to 128733017)
ctggagcccttgagggtagtgtctgtgcattagtggtaagcttttacataaagtcattctggttgttaaagttcaactatattcatcttgataagccacattccacatatcaatacttcatttgaaaatgtctccatttatatctaaatttcacttggcatgatattcatggcaactgtaacactcaaaatcatttttgtgaggtataaaaatttctccaaaggatttgagataaaatgacttctatagatgattttcttcctttataaacatatctctttaatttaaataaataatattaagtagtaaatgttggattgtggaagaacctttaaattttcattcaaaatggtatttcttgataatgtgtgtacttcacatttgaaatacatttctaaataagtaggataagtaattaatatataaataaaatatatatgctgggattccttgaatgttgcacttatattcgaattattcaactccaatttgaagtcaacgtgaattcaaaaaaattgaaatggaaaatagaaatcagaaaatgagaaaaaaaaataaaaaaataaggaactgggaatggtcacctcgggctggaccaattctttcccacctcagcccaattccctcttcatcacccgcgcaaagcgcggcccactcagcccaccgcgtgcctcggcgccgacaggcgggcccgccccgtcagtcccacatatgcacgcttctatgcgtcggatgccgactgggagaccccaccctgtcagccagtcccggcatcgcgcgcacacgtttcgctgttcctgggaccccacatgtcacactctctgccatcgcgcggacgcgctacacatttggctggccggtgggtttccaccctctctaatgtttatcttcccccgttaacaaatcgccgccgcgacatatccgccatagttctcgcaaccatcctgccagctgagtcggactaccctgtgcggggtatatacatgtcaccccgcccctagaccttggtgcatagcaaactcatcgacccacatagccgtcgcgggtgaaaaagagcctgagatcgccgccgccgtcaatacccgtgtacgccattgcccaagctttgtctcgggtccggtggggttcgcgggcgctctaggatcgttcgcgcgcctgcaggtgagcactgggcgcattagagcctcccgaatcgctcaccggagttgccgcgccgccgctgtgaatcatctaggccctttagtgatgttttggtagttaatgacaactgtttgtggactaacagttcttggagaaataagaatgcagggttggaccacataaaacaggaaatcttggagattgataagcaatggttgtggatcaagtgaaggcaaaagtataacataaagtataacataggttttgttttttgccggtcttcagaagtttagagaagatacttgaccggattagtaagttagatagccgtactattaagaggggtcaataactttaatctgtgtaaaacttagtgcctcatagagcatctaggtcaggactgcggacggtccggccccaaggcccggacggtccacgcatcccaagactttgcacttttcaaacaagcttttgaaaggatttttaactcatgaaatttgaagcgctgttagtcccggacggtccgcgtatcccaacacgttgcacttttcaaacaagcttttgaaaggatttttaactcatgaaatttgaagcgttgttagtcctcatgcaaatgcaaccactagatgctctatgaggcactaagttttacacagattaaagtcattgacccctcttaatagtacggctatctaacctactaatccggtcaagtatcttctctaaactcctgaagaccggcaaaaacaaaacctatgttatatctttgccttcacttgatccacaaccaatgcttatgaatctccaagatttcctgttctatgtggtccaaccctgcattcttatttcttcaagaaccgttagtccacaagcagttgtcattaattaccaaaacatcactaaggggcctagataattcacaatctccccctttttggtaattgatgacaacactacataatatattcaagataaattttgtttttccaaatctccctcataccttaggtataagaaggattttggagatgagtttcgtaggacttatcttgatttgaagttttgtccgagagatagataaatcctaattaaaactcagaatgtaagaaaagctccccctatgtgtgtgcaggatatttcaagctgaagatacaacacccataatagatcggagttttgatggagaccttcctacagtcatggttatcgaggcgtacaagagataatatgtaaagtaagcgcaacaattataatcactccttgattaaccattcacagagtaatttgaactaaacatggttcaacccacagaatattacaaatagttgtccacatgcataagacatagagttcaaagttcaaatagtagccaataccaagtgcataagacataaaataatgcatgcgacataaaatggtaaacatgcacatgcacagtctcaatgtccacataaacaaactccccctcaatatgacaacttctcttctctttcttcacttctctccccctttggcatcaatttccataaaggagaggcttcactgatcactcggtggaggatgcatgttatagtagtgagtgctgaaggtgtcaaaaagagaggagaactgtccaaagtcttgttggagttgttgctgcctctgactgatctcttgcatgttgtcattggtagagaggttgtcaaattgactagacagagctctcatgttgtcctgaaaactctgctgcatgttgttgagtctgttcatgataggatcagtgacattagtttgaatgtgactgcgaaattcggaatactcagtgtttagtgcatcccagttactatcaaaactagattgcatgtcatccaggcgttggtccatatgtgtcatcattccctggaagcgggtatccatgtgagtctgaagcccttgttgcatgttttgaaaatataggtcaaaatagcctggactaggctaccagtattgctgaggttgaggaggaggtggaggaggaggcatctgctctgcctcaacttcaggagcatctcctccatcataaccaggatcttcctcatcatctgggaagagagtgagtggcctggtgaggaagccaatttcattcttgaatggtctaaagggtgtatgaactatctcacatggccctttaaatcttgtctttgctttgatgagaactataatgtaaggcgcataggctaaattctggtttttgtccatttttagatcatttaactgtctcatcatgaaaagcacaatattcattacctcaccattcatgacatgatggataatgttttagaatttgtctcgaattttgctcttgtccccactcttaggaagaattgtgactcttgcaatcttgttgatcacagcaggatgatgcctcagtcctgctgtctctccaaacctccgaggtatgcccagccttgctggctcaaaaaattgcacaaaatcttcaaaattatctttagtgtatagatcaattccagctaaaatggtatcataattcagactgttggcagctgcaaatccagcaaatgttgcagaatacctcttgaaccgagtcatccaagtgatggattcctcttctatatcaatctcacctgtggccaggaattgcttgactgccatctcactgaaatcagtcctctgacccataaaatggtacagaccacatgtctcaaactttggaatcagttcctccataactgattgtcccagcatgaaagtccaatcaatcacctgatgtttgtgaaagttggtatccatcaatgtgccccaaaaaacatcaaattggagctgagtgtggaagaattgaacatttgtgtctgatggtagagtatattgattgacagttctcctgtagcagtattctgccatagagaatctcctctttggaaatgtccatcatgtgatgtcaattgggtagtcaggatgtgtatgaggaatgtcttttgtgtccatagattcactgcccccagctgaagattgggcctctgaatcagtggttggagtgtagtcagcatcgtctgcacgaggacgctttgatttgaagcgaccggcaagcttcttgcgaagaccaccagaccactgcaataaatgtgagaaacatccatacatgaatagttggtaacgccaaaatcatagagaaaggaagtgcaattctctgtcagggtccggactgtccgcgccacaggtccggacggtccacgcccaccaggcggacggtccgcgaccgtccagtggcgactccctagaaccctagtcgcctcaatcattcaaacgtcgattccgcagaaaatatccatccaaactcattcaaatttttgcacaacattcacaatgagtagcactaatattcccaccaatcagatttgtaaaagtattgttcaattctagattagagagaaaatccgaataatcccaaatttgaagaaatttgatgaaatccatgagattatgaaataccgggatgaagataatcccatagagtacaaaatgagcacctttgggataccatagacattcacttcttagagtacaaaatctcgtttcatccaatgactttgtaaaaatatcggctaattgatcatccgtaccaatggaatatatagagatatcttcctttccaacatgatctcttaagaagtgatgtcatatatcaatatgcttagttcttgagtgttggaccgaatttgtagccaattttaccgcactctcattatcacacatgagaggcacattcttgaaaataatcccataatccaatagagtttgtttcatccataatagttgagcacaacaatttctggccgatatatattctgcctcggcggtagagatagcaacagaattttgctttttagaagatcatgaaacgagagatctaccaagaaattgacaacaaccggaggtgcttttttctatcaattttgcaccccgcatagctcgaatctgaatatctaattaattctaattgagcacctttgggataccatagactaatattgggagtatacttcaaatatcttagaattctttttgcggccttcaagtgaatctctctaggtgaagcttaaaatcgagcacacatgcaaacactaaacataacatcgggcctagatgcagtaatataaaataagctaccaattattgagcgataaagtaagctaccaattatgaattgggaaggttgacactaccctattcactaaaataattggcaaagacttatttgtttgtcaaatttatgttgataatattatttttggatatactaatgaattgttttgtgagaaatttggaaaaataatgtcaaaagaatttgaaatgtctatgataggagaattgaacttctttcttggtcttcaaatcaaacaattaaaagatgaaatttttataagcaaatcaaaatatttgaaggaaatgctcaagaagtttggtttagaaaatgcaaagtctatcaagactcttatgacaacaaatggtcatctagacttagatgagggaggtactatggttgatcaaaaactttatcgctcaataattggtagcttactttatattaccgcatctaggcccgatgttatgtttagtgtttgcatgcgtgctcgattttaaagcttcacctagagagattcacttgaaggtcacaaaaagaattttaagacatttgaagtatactcccaatattggtttatgatatcccaaaggtactcaattcgaattaattgtatattcggattcgggctatgcggggtgcaaagttgataaaaaaagcacctccggttgttgtcaattttttggtagatctcttgtttcatggtcttctaaaaagtaaaattccatttctctctctaccgccgaggcggaatatatatcggccggaaattgttgtgctcaactattatggatgaaacaaactctattggattatgagattattttcaagaatgtgcctctcatgtgtgataatgaaagtgcagtaaaattgactacaaatccggtccaacacttaagaactaagcatattgatatacgacatcacttcttaaggggtcatgttgaaagggagatatctttatatattccattggcacggatgatcaattagccgatatttttacaaagtcattggatgaaacgagattttgtactctaagaagtgaaatgaatgtgatcgatctctcaaatgtagcttgaggttgaacgcacatgtgtagtattgcatttcggttctaaatatgctctctacgctatttattgggtatttttgatgaatttttcattttagattgatctaagtagtttgatatgaaaatgtgcattcctcaaatacataatgtgtatatgcatgcatactaacccttggattggtcgaaatgtccatatatgagcatcaaatcagatttgaaattcaaaatcagaaagtgaacagaatttgaaaaattgagtatcaggccacggaccgtccgcccatgggccgcggaccgtccgcagtatcaggatctttacagtccggtcagaagtgcagacagtctgaagttatcagggcgcggaccgtccgccgcccctgcgcggactgtccgcgacaggcagtaaaaatgggcagaggcagtcaacttctcatttctgctcatttcctctcacgctctccactcgccaaaaggtcactttcgtcgattgtgcgcggacggtgaagagaagttgcgcacggacagtccgaaagcctgtggaaagttcaacaaacatgtcttcatcccggtatttcataatctcatgtattttatcaattttttttttcaaatttgggattattcggattttctctctgatctataattgagcaatagattcacaaatctgattggtgggattattagtgctactcattgtgaatgttgtgcaaaaaattgaacaagtttggttagatattttctgcggaatcgtcgtttgaatgattgaggcgactagggttctagagagtcgcccctgaacggtcgcggaccgtctggacctgtggcgcggacagtccggccctctagcgcagacagtccggaccctgacagagaattgcacttccttgctctatgattgtggtattatcaactattcacctatggatgtttctcacatttattgcagtggtctgggtggtcttcgaaagaagcttgccggtcgcttcaaatcaaagcgccctcgtgcagacgatgctgactacactccaaccactgactcagaggcccaatcctcagctggggcagtgaatctatggacacagaagacattccgcatacccatcctgactatccaattgacatcacatgatggacatttataaagaggaggttctctatggcagaattttgctccaggagaactctcaatcaatatactctgccatcagacacaaatgttcaattctttcacactcagctctaatttgatgttttttggggcacattgatggataccaactttcacaaacatcagatggttgattggactttcatgctgggacaatcagttatggaggacctgattccaaagtttgagacatgtggtctgtaccattttatgggtcagagtactgatttcagtgagatgacagtcaagcaattcctggccacaactgagattgatatagaagaggaatccatcacttggatgactgggttcaagaggtattctgcaacatttgctgaatttgcagctgccaacagtatgaattatgataccacttcagctggaattgatctatacaatgaagataactttgaagactttgtgcaattttatgagccagcaaggctgggcatacctcggaggtttggagagacagcagaactgaggcatcatcctgctgtgattaacaaaattgcaagagtcacaatccttcccaagagtggggacaaaagcaaaattcgagataaattcttgaacattatccaccatgtcatgaatagtgagataatgaatattgtgcttttcatgatgagacagttaaatgatctaaaaatggacaaaaaccagaatttagcctacgcttctttcattatggctctcatcaaagccaagacaagatttgaagggccctgtgagatagttcatacaccctttagacccttcaagaatgaaattggattcctcaccagaccactcactcccttctcagatgatgaggaagatcctggttatgatgcaggagatgctcctgaagctgaggcagagcagatgcctcctcctccacctcctcctcagcctcagcaatactggcagcctggtccaggctattttgacccatattttcaaaacatgcagcaagggcttcagacccacatggatagccgcttccagggaataatgacacatatgaaccagcgcctagatgtcatgcaatctagttttgataataactgggatgcgctaaacactgagttttctaaatttcgcagttacattgaaaatgatgtcactgatcctatcatgaacagactcaacaacatgcagcagagtttttaagacaacatggaagctctgtctagtcaatttgataatctctctaccaatgacagcatgcaagagatcagtcagaggcagcagcaactccaacaagactttggccagttctcctctctctttgacacattcaacactcactactataatatgcatcctccgccaagtgatcagtgaagcctctcctttgtggcaattgatgccaaagggtgagagaaaagaagaaaagttgaagttgtcatattcagggggagttttttatgtggacattgagaccgtgcatgtgcatgtttaccattttatgtcgcatgcattattttatgtcttatgcacttggtattggctattgtttgaactttgaactctatgtcttatgcttgtggacaactatttgtaatattctgtgggttgaaccatgtttagttcaaattactctgtgaatggttaatcgaggagtgattataattgctgcgtttactttacatattatctcttgtacgtctcgataaccatgactgtaggaaggtctccatcaaaactccgatctattatgtgtgttgtatcttcagcttgaaatatcctgcacacacatagggggagcttttcttacattctgagttttaattaggatttatctatctctcggacagaacttcaaatcaagataagtcctacgaaactcatctccaaaatccttcttatacctaaggtatgagggagatttggaaaaacaaaatttctcttgaatatattatgtagtgttgtcatcaattaccaaaaaggggaagattgtgaattatctaggccccttagtgatgttttggtaattaatgacaattgcttgtggactaacggttcttggagaaataagaatgcagggttggaccacatagaacaggaaatcttggagattcataagcattggttgtggatcaagtgaaggcaaaggtataacataggttttgtttttgccagtcttcaggagtttagagaagatacttgaccggattagtaggttagatagccgtactattaagaggggtcaatgactttgatctgtgtaaaacttagtgcctcatagagcatatagtggttgcacttgcatgaggactaacagcgcttcaaatttcatgagttaaaaatcttttcaaaagcttgtttgaaaagtgcaaagtcttgggatgcgcggaccgtccgggccttgagggcggaccgtccacgatcctccagtggggtccgaagtctgaccacttcggacaggtcctgttcatttgcactgtggaccgtccaggccttggggccggatcgtccgcagtcctgaccagtggaggctgctctcggcacagtccctaaattatagtgcggaccgtccgggcttgatgggcggaccgtccgcaggtgccaaatttggtttgggtagggactgtgtggtttttggaatttgtactacggactgtccggaggataagcccggacagtactgtctccaggtctcggacggtccggccttgtaggcggacggtccgcttgtgttaactgcacttggtcagagctctaggtgctccaagttgccaggtcgcggacggtccgaccaaggtgggcggactgtccggaccttacttttctgacagctctgacagatttcaaacgggaaaaatagtcgttatgtgtacggcggaccgtccggccctagggcgcggaccgtccgcgtgtgcgcagaacttgtgtcttttgctcataacggttggatttgggtgggggactataaatagaaggggagctcgtgtgtgagggttctcttggccattccttgcaaaaattgagctcaattgtgatcatccaactcactctctcacactctttgcttgagattgcattctagtgagagattgagtgttcctagtgcatttgcatccatcaggtgattcttgaggcactaggtggtacaccgagcaaacgtcatcggcttgttactcttggaggttgccgcctcctagacggctcgggtgattgtctccatcgtgctctccaagaagattgtggagaagccgcagtgttgattgtgaggggttcgcgcctacctcaccggagcggcaaaggtgacattagtggaatcgaggtattgagtgatttcttgtccacttggctcaaagatcaagtcgtgtcttgataaaggagcaagtgagagcttgaagtccacctcaacatggattaggggtgatcggcaaatcaccgataccacgggataaaattcggtgtctttactttcttgcattacttattgccgtgcaagtgattagtattttgcacattgttcttcaagtattcaatctccctagttgattctcgtagattgtttacttgttatcactagaaaatttatacctcttgttatattgaataaatttttccatagtgtttttgattttagtcaaaactgtctattcacccccctctagccggtgtcctagatcctacagccgcgcactgcgtaccacgcaaactccacctcggttcctggtaaggcgcttttcctatcaaattatccatttgttccgcactcctttgcgctgggttttagggttgggtggtgcagatgggcgcagcgccggtgaggtcgtcaccgttgctgtgggtgcaccgccctgattggacactggtggtagaagatgatctctggaccgtaggatcaaaatccagcgatcaggggcgtaccgagtcgtgggggtatctgagtcgtagatctaagtggctacggttcagatcaatgagggggaaacatttcactattttaaatctaggccatcgatttgagatccgatgacgcgaattagtgcgtggtgtgggtaatatgggggccatagatctatgatccatgggccacggtcgctcgttgtctcatttaagcgctgatgtaatccaaaccataggatctgatctgaacgaccctcatcagcggatacccctttgggtttgggtttttcacatatgagcccctggttcttgtcgaaataaaccctcagtcccttggagttcaatgaacatagcgcataggtccagattttcacagaaaagaccccgacttttttaataataggagccgcagaccacaatttatgttattttgctaaaataatttggaaaataatttccagtataaaatcaattcgataaaccttagaaaatcataacttattcattctaacttctttttgatccattccagttgtattaaattcatattaatattgtttatcccctggtaactttattttgttatgaaacataaattaaaattatgcacttaatttgttctatatctaacacctaaatcttcagaaaatcataactctaaccgtaactccgaatttagtgattcttgaacctacgaccttgttgtggtacgtagaatattcttacgctgtttgttctcatgtttgatgtactgttatttttaagtacttcttgtctatttgtatgtattgctacgagtagcggcgaggttacgagtcacttgaagatcaagttggtacctgggaatcacgagtctaaggcaagttgtgcccttgatcactcctttttacctaataatgttcgttgttaatcactgtgccctagcattgtttatcccccaccttgcaaacaaatgaattattgagtagatttgctattgttctacatggttttgggaaactaatgttttattatgatcatgttccaattatgttgtttaattattgtttatgataagaacatattgttaattggaacatgaagaaccacccggaaaaacagtgctaccacaagggtggaatggggacggccttggccaagtaattaggaaagcttgggagagattaccttacccggaaggggaaagcggggaggcgttgctgctagagtatagggaggtccttgggtcgaattgtctataaagcttttcggacgagggattcctatgcttccttcttcctgaatccgtagcgggttttctcgaactagtgaaactttggaaaggcctcgtagtgctaccctgcttcgcttccttggtagaggactagaggtgtatgggctccgtacaactcgtggcaaatgggtaacatgatttgtgggtaaagatgtgcaacctctatagagtgtaaaactggtatatcagccgtgctcagggtaatgagcggctcggacactcacatgattaaattatggaattaaattcaatctgtcatatgcattacatcgcgggtgttgttatcaattttgatctattacttatttaggttggtatctacttatacctagtaactgctaataaaattttgaccaactttaaaagcaatgctcagctttaatcatcctctttggtaagccttacacttcacatgggctcccaccttttgtgagttcatacacattattcgccacaatttgttgagcgatgaacgtatgtgagctcacccttgctgtactcacatcccccatgtcaagaactgataccaccggatgaggcgtatgatggatgttgtgatgagttcgtgagaggtctagcccgtcgtctcctagtcaactttggttgcgagatcgttgtcttcgtatgatgtaattatttaactattttgttattttgtatagaacttcgttatatataaatgatatgacattcgtttctgtactatgagtcatcatatgtgtgagacttgatcctaacacacttggtgaagttcgcgcctgggttttggactcctaaaatccgggtgtgacagcaacctttccaggaccattttaggtgattatattctggttgtgaacaggtagatagg

SEQ ID NO: 864 - DNA, 32799 bp, Zea mays
  Intron number 1 from transcript GRMZM2G545802_T01 (locus G RMZM2G545802) derived from phytozome v7.0 (chr-ID 2; pos 2 2197433 to 22230231 reverse strand)
gtcgaagagagacagcagtcgaagagagacagcaggtttgttagtattttcttccccccttttccattacgctgaattgttcttatatcttgttacaaggcccacggcccaatcatagggacacagcccactcagtttactcactcggcccctgagacgcgaggatttggctttctattccgccggcttgtggtctgaactgtagcttcttcctcctttgtgtccgtttcttcaaccacctgaagccgtctcctgacattgtcccctccttgaaactccgcttgaccccaagcggctgcttctggaaatttggaccgcaacgcctcttcatcctcccaactagaaagagtatcatcaccttgagaccatttgataagcacctgttgtaccgctttgcctcctcgcattactatgcgtctatccaatatctgcacaggaacctgcatctggctcatagcatcaggaagtgcagagctcacttgtctattgccgactgaaagtttgagctgagacacatgaacaactgggtggatgctagctgaaggtggcaactgcaacttatatgccactttgcccacacgttgaagaatcaaatatggcccaaaaaacttgaagctgagcttgtgatttgcccgagtagccactgacgattggacatatggctgaagtttgagatagaccatatcccctacattgaattctctttcagtgcgccctttatccgcttgagacttcatcctctgctgtgcacgagccaaatgctgctggatgagtttcaccatcaactctctttgattcagccatgtttgaaggtccattaaagatgaggcatcacccagagttaaccccaactgtcgtggggtacggccatacaatacctcgaaaggagaacgtcctagagatgagtggaagctggtgttataccagtattctgcgagagataaccaggaagaccactttgttggacaggcgtgaacaaagctgcgaagaaatgtttcaagacactgattcacgcgttctgtctggccatcggtttgtgggtgataagaagagctcattttcagcgtagtcccagccaacttgaaaagttcttgccaaaaccgactagtaaatatcatgtcacggtctgacacaatggagagtggaaagccatggagcttgtaaacggagtccatgaaaagttgggcgaccttcagtgctgaaaatgggtgcagcaatggaataaaatggctgtatttcgagaatgtgtcaaccactaccaaaatggtgtcagcattagatgatcgtggaaggccctctacgaagtccatgctgatgacatcccaagcctgatcaggtactggtaatggctgcaagaggcctggatacttgcttctatcgggtttggactgttgacaaatagcacatgattttacataatctttaacagaggtcttcatcgatggccaagaaaagagctgcttaacccttcggtaagtcaccggaaaccctgaatggccccccaccgggctgtcatgtaaacccaacataatctggttctggagagggaaattgttgccaatccatattctgtctttataccgcagaattccagccttgagtgtatatggtcccagtggcgcaggagtgacagacaaagcagctagcaatttctgggcctgatcatcatttttgtaaccatccatgacctgaagcaaccactgaggtgtggccgaagaaatgttgtacaactcagctgatggccttcttgaaagtgcatctgcagccccattatcagtaccctttcgatacatgattttgtactgaaggcctattaatttggagaacacacgctgttgccaaggagttgtcaagcgttgttctgttaaatgggacaagcttctgtgatctgaatagataataaattcagcatgctgaagatactgtcgccatttgtccacagccatcaaaatagcaaggtactccttctcatatgttgacaatccttggtttttaacacccaatgccttgctcacataagctaaaggatggttatcttgtaacagcactgccccaattcctctgctagaggcatcagtctcaattgcaaagggcctagaaaagttaggtaaggatagcacaggagctgtaactagagaatgcttcaatgtttcaaatgctgttatatgaacctgagtccaaacaaagatcactccctttttcagcagatcagtgagagggcgagctataactccaaaatttttgacaaacttcctgtagtatcctgctaggcccaaaaatccccggagttccttgcaattcacaggtgttggccaagacgacacagcttccaccttgtttgggtctgtagccactccatttacagaaataacatggcccaaataagcaatttgctgcttggcaaaagcacacttggagagcttaatataccattgttccttatgtaaaatatgcaagacctgtgtcaaatgttgcaaatgttcttcccatgtcttgctttatatcaatatgtcatcaaagaacaccagcacacatttcctgagtaatggggccaatgtagaattcatggcaccttggaatgttgcaggagctcctgaaaggccaaatggcataaccttgaattcgaagtggccatgatgagtttggaatgcagtcttgtgttgatcctgtgggctcattcggatctgatggaaaccagctctaagatccaatgtagaaaaccatactgccccatacaattcatccaagaattcatcaataataggtactggatattttgttttgactgtcaaggcattcaaatgcctatagtcgacacagaagcgataagtattgtccttcttctttaccaatattactgaagaagcaaactcactgtggctgtgttgtattgtgccagcttgtaacatgtctgttacttgttgctcaatttcatttttaagagcaggagcatatctgtatggtctcatctgtactggtcgggcacctgctacaagtggaatttgatggtcacattctcttattggaggcataccagtagggatgtcaaaaaccgtaggaaactgaaataccacagcttgtatatcttcaggtaaatcggctaagatagcatgttccttgtctgacaattcctggaggctacacacttggatgactgctgtctgtataactgatgacctgacgccatgcagggtgacagtggagtctttgagaggaatgctaagccatttttgagaccagtggatcaacatcgggctatgtttctcaagccaatccatcccaattataaggtcataagttgacagttgtagcaccttgagtgtagaagaaaatgttaccccactaatggaccatgaagcatccaagatctgatgagtgcagcacagatgtgatccattggcaacctgtacttgcagagacttatcgacaggaactagtcctggcaagttagctgccacctcactgctgataaacgtgtgagagcttcctgaatcaagcagccaatatgtccatgccttcaatatgtcccacaaacttcatcgtacgcggagcttcatgtcctcgtgccgcagcttgggataacaccataatattcagttcaggtccatcttcatccatgtccgaacatgttcctgattcatcttcggatgcctgaaccatttgccacaactcctcgaccacgtgcaattgaactgtatcagcacactgatgatctcgagagtattttaatccacatttatagcataggcatttcgctttacgataggcatatagtgaagcaattcgatcatcagtagaagggttcctgctgcctgaaggtttttcctccatcttgcctgtaccaatttgcttgacctccttaggataccactgatggccagcaacttgtcgaacagcagccctggcagggttggtagcttcctgccatctgtactccttcttcttcaataatgtgcctgcttcctcctgcaactgagcaagaattgcagcagtatccaaatcttgtggccgttgaagcataacaacagctttaacatcatctctaagaccatccacaaattttaaagtgtagtacaaaggttcagacatggactgatatgcattaagtttatctatcaattgggagaactcctccacatatgcagccactgtcccagtttgccgaacatggaacaattgccggagtaacaattggtgttgatccttaccaaagcgttcaagaactaggcgcccaaattccccccaagaaatgtgaataatcctggactctaccgactgaagccagcgagcagcagtgcctatgaactgcatggatgcaaccttaatccacatccttgggtctactgaatacatgagaaaataatcttcacacctagtcatccacaacttggggttctcaccatcgaaagatggaaagttaagcttcggcaaactccccaaatttttcccataatagggctcttgcatatttcctcccagcccctctggcatgtgctgattgatgtggcatccatcaaaattgggaactataaatggtgcttgtggcagataatttgagtgcgtaccattgttcgggagatgggttggaatgggaccattctcaactccatactcccgatgatgcaatgcgtcgtggtgcccgttgggcttgctggtgttgactgcggccacaggtgggcgctccgccactggcacatatggccccagaatgcttggtcggccatcctgactgcttgaagcccctccttccagcagttgtgtgaggcgagcaagttctgaccgcatcgtatcaactgaagttcgcacagcatcgatggaactctccaccttgggcctccacgattcgagcactgatgtggcattttccagaacagctacgcgtgtagtagcttgtgcggccaggtcgtcgatgcgattcatctgcgacccacgcagttccaccatctgggcattgattctatcacccaatactcgagtgagttcttcatgcgccgcagccatcctgccctcgcccaatttctcctgaatgacgctgacgttggctgcgttcttgttcacggttcgctccaattcgctccacctctggtcctgggattcgaggcgatcgcatagttgttggagaaccttcgactgtgctgctagggttcgcgactggacatcaatggacttggattgtgcttccaatgccgctgctacgccgggatcgggtgcgcccgccatcttcgcgcgacgggtataatacgaaggtgccgccataggaacgaacttgtatccgataccacttgtcagcggactgggcgtccggtgacttgtcggaggcgaggaagacgaagcagaggaagaatgagtcgaagagagacagcagacgagagagtcagaactgggagaatggtttgttagtattttcttcccccttttccattacgctgaattgttcttatatcttgttaagaggcccacggcccaatcatagggacacagcccactcagtttacccactcggcccctgagacgcgaggatttggctttctatttcgccggcttgtggtctgaactgtagcttcttcctcctttgtgtccgtttcttcaaccacctgaagccgtctcctgacatgggcccgcggcgctgacagcgtccgccacggcgcgggggctcagctcgtcggcggcggcggcggagacggcggcgggcatggcggagcagcactaatccgttcgcggcggccgggcgttgtttgagcagctagcggaaggaagaggtttcaggcggagaggccgagaggtgtggcactgtggcctgggtctagcaagcactggcggttggatgaggggggccaccgcgccgatcagcagcaggtcgagtgtcgtgtcctcttcagaggatcgcacaggacggtggcggagttttcgccctatccgtcactcttttcgtcgaatccacaaaacagcagagacgaaaaaatagcatctgttttcaaataattcgtataacagtatctatttcactaaattaattggaaaacgatactctatccatatttttgtattatttattgcttacaccacatacgaatagattaaattaccctattgatttcacatccctctttttttttatttcttctgtctataagaaaaatacaaatagataaaatatatgagatccatttttatagcgttaaacatataaatagaaacatatttttacaaaggaagatgtttagatttaactgttgaacttcaaactcagtatcttcagcatcaaactattaaaattagacatacttggtttaccgaaaagtctcaactatacctctttcgttcttttttatttgacgtggttttttaataacttcaatcatttgtcttattcaaaaaattgatatgttccataaaactactccctccatcccaaaatatagtgttgaagttaaatgattaaatctagacttccttctttatagaacatttgtgtttatttgtatgtttaacattatgcttaacaatataaaaatagagttcatatatttgtatgtatttatgttgtttttatagacagaattgataaaaataagggtgaaaaatgataggagcattggtctatttatttgtgaggtgagaaataaaagaatgaaaaatatagatggcgtaatgttttttgaatttatttgataaaaacggtgctgttatttaaattgtacgaaaataagtgttattttctgaacattgtttcaaactagtgttgtttcataaactccccttttcctcacccgcttttcaaattttccccacaccaccactcggagaagggaccgttggctttggttcccctttttcatgtcgtcttcgctgcacgttttgcgtcgttgcgtggtgttttttttcaaaactattgattggcaccgtttggtttgagagattaaagattagtcactttattttagtcttatatagtctctaaattgacaaacaatagaactaaaacagagattacctcaagaggtgactagaaaggactaaatcatattaattttaccttttgccctttatttatttcagttgcactaattgcgggagaatgctaagaactattttggtcttcttatggtttatttaatgtgcccttaatacttttagttcctacaactaaacagggtaagggctaaactttagttccataactaaactttagtctctgaactaaaggaaccaaacatgccctaaggttgttcaagggagaacatataaaataggagatttacactataaattatacttgtagaatgaaatttgagataggaaatgtgatataggatgagatagaatagatactagagatagcctaaggtctcgtttgttcccagacatatatgtcacatcgtatattttgatgctacttaaaagaataaaaatagtctagttttaaaactaatatatagataaagactaaattataagatgaacctattaaatcttagtccatgatttgctaatcgtggattaattagtgtcggcgtttcgaccccgggggtccctggactgacgagtaaattatcgccgcgtgtcccagcccagatgggtcggcgcgagacggagcacgaagggggaaaagggagacaggaaaaaggggaagcccgcgtccttcgtgttgtcccgcgcccaggtcgggtgcgcttgcagtagggggttacaagcgtctgcgtgggagagagcgagagccttatacgcgtcggcccgtcctcccgcgcggccaaccttctcgtacgagagccctggtccttccttttataggcgtgaggagaggacccaggtgtacaatgggggatgtagcagtgtgctaacatgtctagcagagaggagctagagccctaagtacatgccgtcgtggcagccggagaggttttggcaccctgttcatgtgatgtcgtggccgtcggaggagcgctggagctttgcggaaggacagctgtcggggctgtcgagtccttgctgacgtctccttgcttccgcaaggggttgagagctgtcgtcgtcatggagcacgtggggcgccatcattatttgtttaccggggcgagccagatgggacgccggtcttgttccccgtagcctgagctagctaggggtagggtaatgatgccccccctgtgacgtggtcggtccgagccctgggtcgggcgaggcggaggctcctccgaggtcgaggtcgagtctgtcttctgaggtcgaggacgagtccgagccccgggtcgggcgaggcggagaccgtcgtctgaggccaaggctgagcccaagccctagggtcgggcgaggcggagttcgtcgtcttctagagccgaggctgagtccgagccctggggtcgggcgaggcggagttcgtcgtcttccggagccgaggctgagtccgagccttggggtcgggcgaggcggagttcgtcgtcttccggagccgaggctgagtccgaaccctggggtcgggcgaggcggagtccatcgtccgaggccgagacgggggccgagccctggggtcgggcgaggcggagcttcctatggcgcccgaggccggacttgactgctgtcagcctcactctgtcgagtggcacagcagtcggagcgacgcaggcggcgctgtcttcttgtcaggtcggtcagtggagcggcgaagtgactgcggtcactttggctctgtcgactgaagagcgcgcgtcaggataaggtgtcaggccatccttgcattaaatgctcctgcgatacagtcggtcggcgtggcgatactgccaaggttgcttctcggcgaagactgggcctcgggcgagccgaaggtgtgtccgttgtttgagggggccctcgggcgagacgtgaatccttcagggtcggctgcccttgcccgaggctgggctcgggcgaggcgagatcgtgtcccttgagtggaccgagccttgaccttaatcgcacccatcaggcctttgcagctttgtgctgatgggggttaccagctgagattaggagtcttggcggtacccctaattatggtccccgacagtagccctcgagcctcgaagggagtgttgatactcgcttggaggcttttgtcgcacttttttgcaaggggaccggcctttctcggttgcgtttcgttccggtgggtgcgcgcgagtgcacccgccgggtgtagcccccgaggcctcggaggagtggtttgactccttcgaggtcttagtgcgtttcgagatgcttcggccggtctggttgttccctcatgcgaactggccgtagcccgggtgcacagtcgagtcccaagttctcgggctggtatgttgacgctgtcaacggtttggctggagccgggtttgcgagagcagcccccgagcctccgcacagagcgagaggacggtcaaggacagactcgacttttttcatacgcccctgcgtcgcctttccgcaaggaggaggtgagagcacctagaggggggggtgaataggtgatcctgtgaaacttgaaaacttaagccacaaaacttggttaatcgttagcacaataattgccaagtggctagataggaatcctcaacaaaacacaataaccaacaaggatcaatcacagagatgacacggtggttatcccgtggttcggccaagaccaacgcttgcctactccacgttatggcgtcccaatggacgagggttgcaatcaacccctctcaagcggtccaaagacccacttgaataccacgatgttttgcttgctttttctcaatcccgtttgcgaggaatctccacaacttggagcctctcgcccttacacttgaaattcccaaagaacacggagcaagggagggattagcaacacacacaagacacaagaatcagagtgtcaacacgcacacaagtcgcaacaagagctcgcaacacaactcaatgagttcacaactccactagagctctatatgctatcacaatgaaaagaatgcgcgaaatcgatgtcttggtgcttaggaatgttgtaagaatgcttggtgtactcctccatgcgcctaggggtcccttttatagccccaaggcagctaggagccgttgagagcaatctaggaaggctgatcttgccttctgtcgactggcgcaccggacagtccggtgcacaccggacactgtccggtgcccgatttccttccttaaacagcgaagccgaccgttgcagatttgggagccgttggcgcaccggacatgtccggtgcacaccggacagtccggtgcccccttctagccgttggctcggccacgtgtcccgcgcagattgcgcggtcgaccgttggcccggccgaccgttggctcaccggacagtccggtgcacaccggacagtccgatgaattatagtcgtacgtcgccgatgaattcccgagagcgacgagttcgcctgtgaacggcccaccggacagtccggtgcaccaccggacagtccggtgaattatagtcatacaccgccgacgaagtcccgagaacagccttttccctcgagccagcctggcgcaccggacactgtccggtgcaccaccggacagtccggtgctccagactgagcaaagtcttggctgctcgagccaaggcttttccaattggtcttttcctgtttccagcacttagacacaatacattagtctctaaaacaatgtactaagtctgagaaacatacctttatccttgatttgtactttgtccaccattttacacttaggcacttgtgttggacactaaaccaccaaaatacttagaaatgacccaagggcacatttccctttcaatctccccctttttggtgatttatgccaacacaccgtaaagcaagtagaacaagtacaaaatcacttcaaataagaactcaaattattttgattcaaatttgacatatatggatcactctatgccaccacttggtttgtttttgcaaatcaaactcaaattcctatctctaagtcaaaaccacttgtagagacataaagagaggttttccaaagaaatttgatcaaggattccaaaaacttccctttttcccataatcaacacttctccccacaagagctctaatctactattttcaaaatttctcaagtggtagctgatccatctattgttgtggcctttattttctccccctttggcatcaagcaccaaaacgggatcaatcttggccctagaaccccattgcctcaccaaaatcttcaataagaatacaaaggcaataagagtacatgagatgaacttggaattagttaccctctcatcggagtgcagtggaagtctttcatggtccaagtccaccttttccctttcaaacctcctttgagactaaaattagcaaactcaagcacatggttagtctcaaagggtcaagttgtaacacagctccccctaaaaatgtgcatcactttgcaacggacttgtgaggtccagggagtgtttgtacaacttgagcaccataactaagcaacaaaatgcataaggaacatgatcaaaggcataaacacgtgtatgctataaatcaatccaagttccgcgaatctaagacatttaactcactacgcaacctgcaaaaggtcttctcatctagaggcttggtaaagatatcggctagctggttctcggtgctaacatgaaacacttcgatatctccattttgctggtggtctcttaaaaagtgatgtcggatgtctatgtgctttgtgcggctgtgctcaacaggattttccgccatgcggatagcactctcattatcacataggagtgggactttgctcagattgtagccaaagtccctgagggtttgcctcatccaaagtagttgcgcgcaacactgtcctgcggcaacatactcggcctcagcggtggatagggcaacggaagtttgtttcttagagttccatgacaccagggaccttcctaagaattggcacgtccccgatgtactcttcctatcgaccttacatccagcatagtcggaatctgagtacccaatcaagtcaaagttagacccctttggataccagatcccgaagcaaggcgtatcgactaaatatctaagaatccgcttcacagccactaagtgacactccttaggatcggattgaaatctagcacacatgcatacgctaagcataatatccggtctactagcacataaataaagcaaagaacctatcatggaccggtatgctttttgatcaacggacttacctcctttgttggggtcggtgtgtccgtcggtccccatcggagtctttgcgggctttgcgtccttcatcccaaaccgctttagcaagtcttgcgtgtacttcgtttgagagatgaaggtgccatccttgagttgcttcacttggaacccaaggaagtagttcaactcgcccatcatcgacatctcgaatttctgcgtcatcaccctgctaaacttttcacaagacttttggttagtagaaccaaatattatgtcatcgacataaatttggcacacaaaaagatcaccatcgcaagtcttagtgaaaagagttggattggctttcccaaccttgaaagcattagcaattaagaaatctctaaggcattcataccatgctcttggggcttgcttaagtccatagagcgccttagagagcttacacacgtggtcggggtaccattcatcctcaaagccagggggttgctctacgtacacctcctccttgattggcccgttgaggaaagcgctcttcacatccatttggaacaacctgaaagaatggtgagcggcatatgctagaaaaatacgaatggactctagcctagccacaggagcaaaggtctcctcaaagtccaaacctgcgacttgggcataaccttttgccacaagtcgagccttgttccttgtcaccactccgtgctcgtcttgtttgttgcggaacacccacttggttcccacaacattttgcttgggacgaggcaccagtgtccaaacttcattgcgcttgaagttgttgagttcctcctgcatggccaacacccagtccggatctagcaaggcctcttctaccctgaaaggctcaatagaagagacaaaggagtaatgctcacaaaaattaactaatcttgaacgagtagttactcccttgctaatatcacccaatatttggtcgacgggatgatccctttgaatcgtcgctcgaacttgggttggaggtgcctgaggtgcttcttcctcttcaacttgaacatcttgtgctcccccttgatcatgcgcctccacttgaggtacctgttcgtcatcttgggttgggggaagcaccatagttgaggaagacagttgatcttgctccaattgttcctgaggccatacatctccaatcgccatggtgcgtatcgcggccgttggaacgtcttcttcatctacatcatcaagatcaacaacttgctctcttggagagccattagtctcatcaaatacaacgtcgctagagacttcaactaaacctgatgatttgttgaagaccctatacgcttttgtatttgaatcataacctaacaaaaacccttctacagctttgggagcaaacttagaatttctacccttcttcactagaatgtagcatttgctcccaaatacacgaaagtaagatacattgggattgttaccggttagaagctcatacgacgtcttcttgaggaggcggtgaaggtagaccctgttgatggcgtggcaagccgtgttcacagcttccgaccaaaaacgctcgggggtcttgaattctccaagcatagtccttgccatatctatgagcgtcctgttcttcctctctaccacaccattttgctgaggtgtgtagggagcggagaactcgtgcttgatcccctcctcctcaaggaactcctccacttgaaggttcttgaactcggacccattgtcgctccttatcttcttcaccttgagctcaaactcgttttgagctctccttaggaagcgcttgagggttccttgggtctcagacttatcctgtaaaaagaatacccaagtgaagcgggaaaaatcatccacaatgactaaaccatacttacttccccctatgcttagataagcgacgggtccgaagaggtccatatgcagcagctccagaggtcttgaggtggtcatcacattcttgctgtgatgtgctcctcccacttgtttacctgcttgacaagctgcacaaggtctatctttttcgaattgcacgttagtcaaacctatcacgtgttctccctttagaagcttgtgaaggttcttcatcctgtcatgtgctaagcggcgatgccacagccagcccatgctagtcttagcgattaagcatgcatctagaccggcctccctcttttgcaaaatcaactaaataaagtttgccgtctagtacacccttaaaaagctagtgaaccatcacatcttctaaagacagacacatctacattagtgaatagacaaattatatcccatattgcataattgactaacagataacaaattatatccaagcgactcaactaaaaacacattataaatagagtgctgagatgaaatagcaattttacctaacccttttaccttgccttggttcccatcaccgaatataattgaatcatggggatcctcatttttgacgtaggaggtgaacatcttcttctcccctgtcatatggtttgtgcatccgctgtcgataatccagcttgagcccccggatgcataaacctgcaaggcaaatttaggcttgggtcttaggtacccaactcttgttgggtcctacaaggttagtcataatttccttagggacccaaatgcaagttttatcacccttgcattttgcccctaacttcctagcaactatctttctatcctttctacaaatagcaaaggaagcatttaaagcatgataaattgtagacgattcattaactttcctaggaatattagcaacatttctcctaggcatattatgaacaacatttttcctagcgacatttctatcatgcacataggaagaactagaagcaaacatggcatgagaatcaaaagcatcatatgcattataactcctataagtatttctatattgcctcttgtcatgatacataaaagcatggttccttttagcactaatagccataggggccttccctttctccttggtggagatgggagccttatggcttgttaagtccttggcttccctcttgaagccaagtccatccttaattgaggggtgtctaccaatcgtgtaggcatcccttgcaaattttagcttatcgaaatcacttttgctagtcttaagttgggcattaagactagccatttcatcatttaattttgcaatagaagctatgtgttcactacaagcgtcaatatcaaactctttacatctattgcaaataacaacattttctacacaagttgttgatttactagctatttctaactttgcattcaaatcatcattcatgctccttaagctagaaattgtttcatggcaagaagataattcacaagaaagcatttcgtttcttttaacttctaatgcatgagatttttgtgcttctaaaaatttgtcatgttcttcatacaataagtcctcttgtttttctaatagcctattcttatcattcaaggcatcaatcaactcattaattttatctaccttggttctatctaggcccttaaacaaacatgaataatctatttcatcctcatcactagatttgtcctcacttgaagaagcataggtagagttttgagtacataccttcttctcccttgccataaggcatgtgtgacgctcgttggggaagagggatgacttgttgaaggcggtggcggcgagtccttcattgtcggagtcggacgaggagcaatctgaatcccactccttgccaagatgtgcctcgccctttgccttcttatagtttttcttcttctccctcctgttcccttgatcctgatcactatcattgtcgggacagttagcaataaaatgaccaagcttaccgcatttgaagcatgagcgcttccccttggctttggtcttgcttggctgtcccttgcgacccttaagcgccgtcttgaatcttttgatgatgagggccatctcttcatcattaagtccgaccgcctcaatttgtgccaccttgctaggtagcgcctccttgcttcttgttgccttgagagcaaggggttgcggctcgttgatcggaccattcaaggcgtcgtccacgtaccttgcctccttgatcatcatccgcccgctaacgaattttccaaggacttcttcgggcgacattttggtgtacctgggattctcacgaatattatttaccaaatgaggatcaagaacggtaaaggaccttagcatcagtcggacgacgtcgtggtccgtccatcgcgtgcttccgtagctccttattttgttgataagggtcttgagccggttgtatgtttgtgtcggctcctcgccccttatcatcgcgaaccgtccaagctcgccctccaccaactccatcttggtgagcaaggtgacgtcgttcccctcatgagaaatcttgagggtgtcccagatctgcttggcgttatccaagccgctcactttgtggtattcatccctgcacaatgaagctagaagaacagtagtagcttgtgcattcttatgaatttgttcattaatgaacatgggactatccgaactatcaaagtgcattccactctctacaatctcccatatactaggatggagagagaataggtgactactcattttgtggctccaaaatccgtagtcctccccatcaaagtgtggaggcttgccgagaggaatggagagcaaatgtgaatttgaactttgcggaatacgagagtagtcaaaagaaaagttcgaattaaccggtttccttctctcgtagtcgttgtggtcgtcgtccttttgggaagaagtagactcatcgctgtcgtcatagtagacgatctccttgatgtgcctcgtcttcttcttcttcccttccttccgtctatggcccgagccggagtcggtaggcttgtcgtccttcggctcgttgacgaaggattccttctctttgtcgttgatcacgattcccttccccttaggatccatctctttgggcggttagtccctttgtgaagagaacggctctgataccaattgagagcacctagagggggggtgaataggtgatcctgtgaaacttgaaaacttaagccacaaaacttggttaatcgttagcacaataattgccaagtggctagataggaatcctcaacaaaacacaataaccaacaaggatcaatcacagagatgacacggtggttatcccgtggttcggccaagaccaacgcttgtctactccacgttgtggcgtcccaatggacgagggttgcaatcaacccctctcaagcggtccaaagacccacttgaataccacgatgttttgcttgctttttctcaatcccgtttgcgaggaatctccacaacttggagcctctcgcccttacacttgaaattcccaaagaacacggagcaagggagggattagcaacgcacacaagacacaagaatcagagtgtcaacacgcacacaagtcgcaacaagagctcgcaacacaactcaatgagttcacaactccactagagctctatatgctatcacaatgaaaagaatgcgcgaaatcgatgtcttggtgcttaggaatgttgtaagaatgcttggtgtactcctccatgcgcctaggggtcccttttatagccccaaggcagctaggagccgttgagagcaatctaggaaggctgatcttgccttctgtcgactggcgcaccggacagtccggtgcacaccggacactgtccggtgcccgatttccttccttaaacagcgaagccgaccgttgcagatttgggagccgttggcgcaccggacatgtctggtgcacaccggacagtccggtgcccccttctagccgttggctcggccacgtgtcccgcgcagattgcgcggtcgaccgttggcccggccgaccgttggctcaccggacagtctggtgcacaccggacagtccggtgaattatagtcgtacgtcgccgatgaattcccgagagcgacgagttcgtctgtgaacggcccaccggacagtccggtgcaccaccggacagtccggtgaattatagtcgtacaccgccgtcgaagtcccgagaacagccttttccctcgagccagcctggcgcaccggacactgtccggtgcaccaccggacagttcggtgctccagactgagcaaagtcttggctgctcgagccaaggcttttccaattggtcttttcctgtttccagcacttagacacaatacattagtctctaaaacaatgtactaagtctgagaaacatacctttatccttgatttgtactttgtccaccattttacacttaggcacttgtgttggacactaaaccaccaaaatacttagaaatggcccaagggcacatttccctttcaggaggggggaaagcgccatgttgccctcggagggcgccgaacatggtgtctccagtgagttgctaacgggtaatccgagtagacgcccgtgccccattcgttaggggtcggctagtggcccggaggcgcgctccaaaagtacatgcgggtgatttgccggactcggtccccttttgacagggtccgagggctcgatgcctccctctggtggtattccgttacaaaatcgttcccgtcggtctcggaaatatcctagggtacctcgagagcgtagcccgagccttggttatgtatcgaacgtacccagggtcatccctcgctctgcgtctgaggcggctgtcgaacccttcgggggccagcctacgaacccctgatcagtagtgggcgcggagcccgagtggcctgagacggctgttgaacccttctgaggggccaaccttcgaacctttgaccagtagtgggcgcggagcccgagtgctctaaggcggctgttgaacccttccgaggggccagccttcgaacctctgatcagtaggggggctcggggcccgcttccttcgcggagaaggatccctttcggagtatcccctttcccggtccctgtagcaagagagggaaggaggaagtggaaaaggataagaaatcgaacgacatggcgcaccttttttgacgcggtcatcatggcggaggtgaagcatcgcctgcttcgcctgccaaaggtaccgcctgccctgccgcagagttaatgcgacgggacgggtggttcgcggggcagccgttgtgcgtgcgcgagccgttcgaggaacgggcgtctcgctttgagttttgaatctcgcggcgggttcgggcgaagtgttgaacgggtctcgcctgggcctttatatattcgggagagggaccggtgacggttctttactctgctgctcgcctcccacttaggttttcgcaacctgagggaatagctagagaaaggaaaccatgcacccagtcctttccgccgccacctcttctgcttggtgatggccgaccaggtgaccattgtttcgcctcgcgacccgtggcctttctccaccgtcacggcggatgacctggaggcccttgttgctgagggtttgcttcgccctctctccggtgactcacagccggagtggatggcccctccgagcggagccgccccgttcccgccgccggggtattggtgagcttcgtctcctttcacgagcaggggttcagagtgccggcaagccaatttatgcgggcgattctgcacgtctacggggtggagctgcacaacctcagtcccaactccatctcgcaagccgccatcttcgcggcagtttgtgaaggatatttggggattgaccctcactgggacctgtggacccatctcttctccgtggagctttttgcctcgccgacgggggaaagaagggttcgcatggcggtgcgggccggtggctgcatcctccagctgaggcaggcgcgggcgctgcagtacatccctgccatcctcgcgtcttcgaacaaagggtggcagcgccggtggttttatctccgaaatgatgacgggaggctcccgtcgttttctcagcgagtggtgactgctgctgccaataattggcgctacgggaccccgcgcgacagacagaagaatattcagccccttctgaaggccctggaggagctgcgagaaggagggctcaccgccgcgggggtggttgccgccattcatcgccggagggtgctccccttgacggagcagcggctgccgctttgggagatgacgccgggggtcgacttggagggtttgcggatgtcctcggatccccttcccgtcgacgacctccacaggcgggtagccggcacggtagggaagcccgacgtcggcgccctttcccagctcttgatgcgtcccgatcgtgggtgtgtgtccctggtgagtgtccgctccctctttcttcttgtgtcggattgcccttgattctcacagccaagacttttcgttcgtttccaggaggtaggggctcacaagccttccctgccaccggtcccggaggacgcggtggaccgagctgcgcggagggtcgccgcggagaagaggaaggagaagaaggacgcgaagaaggctcgggcccgcgagcggacgcgggctcgggacgccttggaaaggctccgtcgtcgggaggagagggatgggctcccgagggagccgtcgccggagacgcccgacgacgacgatgaagatgatgatgaagacgacgacatggctgcccgcctcggcctcagcccggatctgaggctgggccaggggtcgcccccgagcgagttggtgccgtcggtatccgagggcgggatgtcggggtcccggtccgaagagcgggggcagaccgagggggtacttgacccctcgaccgaggtagttgaggtgaccccgaggagtcaggccgagctgcctattccccgagaaccgttgcccgtgccgactgcgcaggagggcgatcctcgggtcgtcgtggctgcgcctggacagtccgtccctcgggtgcctcgggcgcccaaggcgaggacggtaccaaagccagcagcggggcagacctcggtggtaccctcggggatcgaggttcgagagacctccccacatgcacgattgatcatggcccggagtgggtaagtatcttaggatatcttcgtcctggctcctccttcatatgtcctgatcctgattttccctttctccttaccaagcggaggcatggtttgaccggtctggctccccggaaggtcctcaagacggcgtcggcttctacagctagtgccgcgccgggcctcgccggccagctgaccccctcgcaagacgccccacagcggggggcttaggcggcaccagttgccgtggggcgagctcccaaggctgactcctctgtcgaggcggccgtcgcgctgggggaggctgctggcgcagctgtggcctcgggcccaccagacatgtcgctggcgctggcaccgactgctgccgaggccgttgccgttctggtcatggagtcacccgttgccgccgatgctgcgatggctgaggcgtcgctacttggtgcctcagaggagggggcgcggaaccgcgacccgtcccggggagcggcaatcttgtcgccgcgcggcgcggtcccgacgggcggcgtcagttgctccggttccggacccgtggggcctcggatcccctcttcgttcttgacgatgagcgagaggagcagtcttgggacgggcttcacgagtgtgccgaggcaacggtggggtcgcttcgatcggccttggaggtcctttgcagggacgctcccaagatcctccaggtaatgatttcaaacatacctttcacgtgattaaggcgttctttgtgacgccccgcttccttccctcaggatctgacggatctgagcgccgccaaatcgtcgttcatccgccgcgaggccgatgtctggggttcgctgcggtccctgaggaccacgcttgccagggctatcgagcgcctctcccaacggagcgccgaggtggcggaccttcggctcctctgtgtcgatctgggagcagaggcagcagcggcacgcgcagaggcgcagcggcagcagttggagcttggccaggtcatcggcgagcgggaccaatctcggggccaggccgccgaagctgaaagccgggctgaggctcttggagtccagttagccgaggcgtctgctcgggtcggggcctttgcggcagacctagccgtggcctaagccgcgtcctcagagcaacgcgcccgagctgaaggtatgtcttggctgttttaagattttgattcggcttcgttcttcaagtcgtgtttgaagtcttccgcttcggctgttcgcagagctcgagtctgcccttgataagtccgccaaggcgcttgctcaggcggccgagcagagggaggccgaccacacgaccatgtctgaggccatctcggccttctgccgggtctttggcttcgacgacgtcccctcaggaagctcccctcaaagtcgcctgcaggccttgggtgaccatgcgcacggtagactccgcgaggcgctgcatcacggcgtcaggcgggccttcgccgtgctcgtttcccactatgacgtggatctggagcgggtcagcgaggggtattgccttcctgacgaagatgaagctgccctggccgaagtccagaggcttgacacggccgccgcgggcccaagcgcgatgctggcgaccaccttcgacgcagagatcctcccgcttgcgccgtcgttcgaggccggggcggatctcatcgagggtggagacgaagccgagggcacgactccttctccgggagacgcctgattctgccggagcagtttattttgaatgcatgtgtgtcttttgcggccgccaaggcccaaacactttatcatcgtaatataaggttgtgtctcttttcctcctgttttgcgtatccggactcgttcgtcagtagcaggattgcttacccaagtaagagttatttttcgtggtaggcgacgagtgaggtatccgtatcccagaggcgtaggaatccctcggctcggtcagccttgccacttacatgcacccttattcgtttcttggggtcctgttactgatatagccgggagacgcgaaagtatttttgatgaaagacttttttcgaggaaaattttgacgcagagggggtgcccccttctagcccccgagggagggtcgggctttgccgaggcaaggctgacccttccttgatggttagactttgtatgtgaacgaggtgtacgaacaacttgaaagcatcttaagggtagaagcgacgtagctatcggatgttccaatcgttgctgtagacctcgccttgactgttggccagcttgtatgtcccgggcttcagaaccttggcgatgacgaacggcccttcccagggaggtgtgagcttctgccgccctcgggcgtcttgtcgtagccgaagcaccaagtcgcccatctggaggtctcgggaccgaaccccttgggcgtggtagtgtcgcagggactgctgataccgcgccgagtgtagtaaggtcgtgtcccgagcctcttccagctggtccagtgagtcttctcggttggtctgattgctttggtcgtcgtatgccctcaccctcggggaaccatattctaagtctgtgggcaagatggcctcggccccatagactagaaagaacggtgtgaagcccgtggctcaggtcggcgttgtcctcagactccagatcaccgaggggagttcctttatccatcgcctgtcgaacttgttgaggtcgttgtagatcctcggcttgagtccttgcagaatcatgtcgttggcacgttctacctgcccattcgtcatggggtgagccacggcggcccagtccacccggatgtggtgatcctcgcagaagtccaggaactttctgccggtgaactgggtgtcgttgtcggtgatgatggagtttgggaccccaaagagatggatgatgttggtgaagaatgccaccgcatgttcggacctgatgctgtttaggggtcggacctcggtccacttggagaatttgtcgatggcgaccagcaggtgcgtgtagcccccgggtgccttctgcaagggaccgacgaggtccagaccccacacagcaaacggccaggtgatgggtattgtctgcagagcctgagcgggcaggtgggtctgccttgcgtagaattgacacccttggcaggtgcggacaattctagtggcgtcggccaccacggtcggccagtagaaaccttgtcgaaaagcgtttccaacaagggctcgaggcgctgcgtggtgaccgcaagcccccgagtgtatctcttgcaagagctcctggccttcggcgatggatatgcatcgctggaggatgcctaaggggctgtggtggtagagctccttcccgtcacccagcaagacgaacaacttggcgcgtcgcgccagtcgccgagcttcggctcggtcgaggggcagctctcctcggtggagatattgcaggtacggggtctgccagtttcgattaggcgagaccccattccgctcttcctcgacgtgcagtgcctcaccctcgggggcctcaggctgaaccgagggcgcctcgggcagggccgaggccttcttgggctcgggcgtgtcgtcggtcttgactgagggttgatgtaggtctcgggagaagacgtccgggggaactgttgtccgccccgaggctatcttagccagctcgtccgcagtctcgttgtatcgtcgggcgatgtggttgagctcgagcccgtagaacttgtcttccaggcgccgaacctcgttgcagtaggcttccatcttcgcgtcgcggcagtgggagttcttcatgacttggtcgatgacaagctgcgagtcaccgcgagcgtcgaggcgtcggaccactagctcgatggcgatgcgcaacccgttgactagagcctcgtactcagccacgttgttggacgccggaaaatggaggcgcaacacgtagcggaggtgcttcccgaggggcgagatgaagagcaggctcgcgcccgcccctgttttcatcagcgccccgtcgaaaaacatggtccagagttccggttggatcggagctgtcagaagctgggtgtcgacccattcagccacaaagtctaccaagacttgggacttgatggccttccgaggggcgaacgagattgtctcgcccatgatttccaccgcccaatttgcaatcctacccgaggcctctcggcaatggatgatctctcccagggggaaggatgacaccacagtcaccggatgagactcgaagtaatgtcgcaactttcgccgtgtcagaatcaccgcgtacaacaacttctgaatttgtgggtagcggatcttggtctcggacagtacctcactgatgaagtagaccggcctctggacgggcaatgcatgcccttcttctcgtctctcaaccacgatcgcggcgctgaccacctgagtggtagcggcgacgtagatcaagagggcttctccggcagcggggagcaccaagatgggcgcgtccgtaaggagcgccttcaggtttccgagggcttcctcggcctcaggggtccaactgaagcactcggcctttcttaagagacggtacagaggcaggcctctttcgccaaggcgcgagatgaaacggctcagagccgcaagacatcccatgaccctctatacgcctttcaagtccttgatgggccccatgttggtgatggccacgattttctctgggttggcctcgatgccccgctcggagacgatgaaccccaaaagcatgcctcgggggactccgaagacacacttttctcgggattgagttttacgcctttcgccttgagacaccggaatgtcgtttcaaggtcggagaggaggtcggaggctttcctcgtcttgactacgatgtcatcgacgtaagcctcgaccgttcgaccaatgtgttcgccgaacatgtggttcatgcacctttggtatgtcgcacccgcattcctcaaaccaaatggcatagtaacgtagcagtacatgccaaaaggtgtgatgaaagaggtcacgagctggtcagactctttcatcctgatttggtgataccctgagtaggcatcgaggaaagacagggtttcgcacccagcagtggaatccacgatttgatcgatgcgaggcagagggtagggaaccttcggacatgctttgtttagaccagtgtagtctacacacatccgccatttccctcctttctttctcacaagcacagggttggcaagccattcgggatggaatacctctttgatgaaccctgcagccatcagcttgtggatctcctcgcctatggctctgcgcttttcttcgtcgaatcggcgcagaggctgcttcacgggtcgggctccagctcagatatccagcgagtgctcggcgacatccctcggtatgccaggcatgtccgagggactccacgcaaagacttcagcgttcgcgtggagaaagtcgacgagcactgcttcctatttggggtcgagctcggagtcgatccgtatctacttggaggcgtcgttgctggggtcgagagggacggacttaaccgtctctgctggctcgaagttgccggcatggcgcttcacgtctggcgcctccttggagaggctctccaggtcggcgatgagggcctcggattcgacgagggcctcggcgtactccacgcactccacgtcgcattcgtacgcgtgtcgatacgtggggctgatggtgatgaccccgttggggcccgacatcttgagcttgaggtaggtgtagttggggacggccatgaacttggcgtagcacgacctccccagcaccgcgtggtaggttcctcggaacccgaccacctcgaacgtgagggtttcccttcggaagttggagggagtcccgaagcagacgggcagatcgagttgtatgaggggctggacgcgtttcccggggatgatcccgtgaaaaggcgccacgcctgcccggaccgaggacagatcgatctgcaggagcctgagggtctcagcgtagatgatgttgaggctgctgcctccgtccatgaggaccttggtgagcctgacgttgccgatgatggggtcgacaacgagcggatacttccccgggctcggcacgcggtcggggtggtcaccctggtcgaaggtgatgggcttgtcggaccagtctaggtagactggcgccgccacctttaccgagcagacctcccgatgctcttgcttgcggtgccgagccgaggcgttcgccacttgcccaccgtagatcatgaagcagtcatggacctcggggaactcctctgccttgtgatcctccttcttgtcgttgttgtgggccctgccaccctccgcaggtggcccggccttgtggaagtggcgccgaagcatgacgcactcctcgagggtgtgcttgacgggcccctaatgataggggcatgactccttgagcatcttgtcgaaaagattggcgcctccgggaggtttccgagggttcttgtactcggcggcggcgacaaggtccgcgtcggcggcgtcgcatttcgcttgcgacttcttcttgcccttcttcttggtgccgcgctgagtggacgcctcggggacatcttccggctagcggccctggggctacttgtccttctggaagatggcctcaaccgcctcctggcctgaggcgaacttggtggcgatgtccatcagctcgcttgccctggtggggtcttgcgacccagcttgctcaccaggtcacggcaggtggtgccggcgaggaacgcaccgatgacattcgagttggtgacgttgggcagctcggtgcgctgcttcgagaatcgccggatgtagtcccggagagactcttccggctgctggcggcagctgcggagatcccaggagttcccagggcgcacatacgtgccctggaagttgccggcgaaggcttggaccaggtcgtcccagttggagatctgccccgaaggcagatgctccagccaggctcgagcggtgtcggagaggaacagggggaggttgcggatgatgaggttgtcatcgtccgttccacccatttggcaggccagccggtagtccgtgagccacagttccggcctcgtctcccccgagtactttgtgatggtagtcggggttcggaaccgggtcgggaacggcgcccgtcgtatggcccggctgaaagcctgcggaccgggtggttcgggcgagggactccgatcctccccgctgtcgtagcgtcccccacgcctggggtggtagcctcgacgcaccctctcgtcgaggtgggttcgacggttgcggtggtggtgctcgttgccgaggcgacccggggccgcaggcgctgtgttgcgcgtgcgcccggtgtggaccgaggcttcccgcataaattgggaagtcgcggcgcgatgctccgaggggtacccctgccttcgggaggcagagctttcggcccgtcggaccgcggcatcctccaggagattcttgagctctccctggatacgccacccttcagtggtcgacggttccggcatcgcgcagagaagtagagctgctgcagccaggttttggccgaccccactggaagccgatggcggccttgccctgacgtcgtcggcaatgcggtgctggatgccctggggcagatgacgcgcttctccggccggagcttggtctgcccatcctgccggatgttccggcggaactgctcaagtgttcctgctccctcgtcgatcctggcctacatctcgcggatttgctcgagctgtgcgtcctgaccccccgcagggactgggaccacaactagctctcgaaggatgtcaacgcgaggcgcaggcctaggaagatcgccgttttctggtataccaaggtggttgccttcgccgggaccccctagatcgacgtggaaacattcacgacttgggccgcaatcctcgtcgccgaagctgcggctaccgttggaacaatcagaaaggtagtagtcgcatgcggtcatgaagtcccgcatggcactggggttaccgagcccggagaaatcccaacaaaggtcgggcttgtcatcttcctcggaacccgagggtccgtaggtcgagatggccgttagtctgtcccagggcgaccgcatacggtaccctggagggtttggacatgtctctatgaaggcctccaccgaagcgaagtcgcttggtgggtcgaggctgaatccaaaaggcacgagatgggaatcggtcggtacctcctggtcgacgggcggtgacgaagtcgcgctaggggcggactgcgccgtcgtctcaggcacgagggcgacgtccagcaagtccttcgcgagcgtgctggcgtcgttcgtctgctcggagttggcgtgtcgcggggaaacggcgctcgtcttcgtctcagacgcgaggtcgtcgcccgacgtgtcccccgttggggcaccggcgccgtcgactcgctcgacagccgacgaggtgccgcctcctgcttggccatggttgccccgccacctcctccgtcggcgggggaggcgacgggacaaacccgaatgttgttcttccgccacatggggaagacgtcgttgattccaccgccggcgggcgggctgtcggccgccattgtcgctgtcgcgcggtggaggaaggagtatcatgtcgtagccgccatcgagggacatgaactcaagactcccgaaatggagaatcgtcccgagttggaaaggttgccggagactacccatctggagcttgacgggaagctgttcgtcaacacgtagcaggcccctacctggcgcgccaactgtcggcgtttcgaccccggggggtccctggaccgacgagtaaattgtcgccgcgtgtcccaacccagatgggtcggcacgagacggagcacgaaggggggaaaagggagacaggaaaaaggggaagcccgcggccttcgtgttgtcccgcgcccaggtcgggtgcgcttgcagtagggggttacaagcgtctgcgtgggagagagcaagagccttatacgcgccggcccgtcctcccgcgcggccaaccttctcgtacgagagccctggtccttccttttataggcgtaaggagaggacccagatgtacaatgggggatgtagcagtgtgctaacgtgtctagcagagaggatctagagccctaagtacatgccgtcgtggcagccggagaggttttggcaccctcttcatgtgatgtcgtggccatcggaggagcgctggagctttgcggaaggacaactgtcggggctgtcgagtccttgctgacgtttccttgcttccgcaaggggctgagagccgccgtcgtcatggagcacgcggggcgccatcattatttgtttaccggggcgagccagatgggacgccggtcttgttaccggtagcctgagctagctaggggtagggtaatgatggtcccccctgcgacgtggtcggtccgagccctaggtcgggcgaggcggaggctcctccgaggtcgaggtcgagtctgtcttccgaggtcgaggacgagtccgagccccgggtcgggcgaggcggagaccgtcgtctgaggccaaggctgagcccgagccctggggtcgggcgaggcagagttcgtcgtcttccggagccgagactgagtccgagccctggggtcgggcgaggcggagttcgtcgtcttccggagccgaggctgagtccaagccctggggtcgggcgaggcagagttcatcgtcttccggagccgaggctgagtccgagccctggggtcgggcgaggcggagttcgtcgtctttcggagccgaggctgagtccgagccctggggtcgggcgaggcggagttcgtcgtcttccggagccgaggctgagtccgagccctggggtcgggcgaggcggagtccatcgtccgaggccgagacgagggtcgagccctggggtcgggcgaggcggagcttcctatggcgcccgaggccggacttggctgttgtcagcctcactctgtcgagtggcacagcagtcggagcgacgcaggcggcgctgtcttcttgtcaggtcggtgagtggagcggcgaagtgactgcgatcacttcggctctgtcgactgaagagcgcgcgtcaggataaggcatcaggccatccttgcattaaatgctcctgcgatacggtcggtcggcgtggcgatccggccaaggttgcttctcggcgaagactgggcctcgggcgagccgaaggtgtgtccgttgtttgagggggccctcgggcgagacgtgaatccttcgaggtcggctgcccttgcccgaggctgggctccggcgaggcgagatcgtgtcccttgagtggaccgagccttgaccttaatcgcacccatcaggcttttgcaactttgtgctgatgggggttaccagctgaaattaggagtcttgggggtacccctaattatggtccccgacaattagatttaataaatttgtcttcacgtttagtcttcaactgtttaattgttttataattgaactatatttaatactcgtaataggcactcaagcatctccttattctttatgagcgtattccagttgtgcacaagaaataagtagaggtttgaaacttgtttgttggctctactttcacatccacctaattaatagaacacatatatttttgtgttttattaaaacaaaatctacctacgtgatatataaaaattgtagcgccagtcctagggtggggccagagggccatcccctaggccctgtttggtaggagcccaccaggtacaggtacatgaagcaaatatgggaatgcaggatcgctgcaagccaatcatgcaacccaagctagctatcaaatcaacaaacttagggtgctactgaactaagagaacgtttcaccaaatttgcaagcactttctcttttgatggtcatcacacgttgatctaaatgatataattttagagcttagtgttcttaagttgactttatcagataaacttggatttttttagtatgtgagagaagtggattcctaacctaatgcttctatttcttatcgacttttagtcactctttctgtgactgttgcgtcagctaaaagaagtttttcaaagttgaagttgctaaataattatttaaggtaaaaaaatatctcaaggaaggctaaatggtttgtctagaagtttttcaaagttgaagttgctaaataattatttgaggtaaaaaatatctcaagaaaggctaaatggtttgtctactttatgtatcgagaagatattattggataaaattgatattgatgccatcatcaatgactttgcatcaagatatgttagatttttttaaggtaatcacatattatatatttttttacttgagatggatatttttgtgcatggttgcaacatatattataagaataagggtccctattttaagtctcactctggacccctaatttctcatgactgtcactgtccatgcatggttgctggacatagccttttgtgatgagctacgccttgagcttgatcacctcacttgtggcgttcttcttcactttatacacctatttcaatctaattggttggtgactagagagaagggatagagtctatctcttcaatcacgttgtgtcgccatgactgttgcttcttggcctcaacaaagatgactaactcctcgaattgtag

SEQ ID NO: 865 - DNA, 2104 bp, Zea mays
  Intron number 5 from transcript GRMZM2G150167_T01 (locus G RMZM2G150167) derived from phytozome v7.0 (chr-ID 3; pos 4 0267770 to 40269873)
cttgccgacaaggtacacaaacaagagatttttcggttttactcacaagttatagctgtttattgctactggtggaattagtcatgcctatcatgtgctttcagagggatggttcatgtgaactggagtacaggattagagcacccaaattaggatgactttaagtcattttctgttaactattaagggggcagtgtagactgcccccgcctacgaatcccacccgccgccctgcctcacccgccgtgaaaccagccacaacagccacctcccccgcgacgaatcccgcccgcgcctcccccgccgtcatccccgccgcgacagccacccgcgaatcacccgccgcggctccatctccgcgaaccgcccgcccgcctcccccgccgccatccccgccgcgacagccacggcccagcgtaccccctcgtcgtgcacatgggcgacaccgtgctacttcccgcgcccccgtcatccccttcttcccccgcataggttctctcccaccgccacctccttttcggcttcgtcaggctgtggtcgccactcttcctcctccccgtcgtcgctctctcttcgcgaacccagccacagcagccacctcccccgcggcgaatcccgcccgcgcctcccccgccacgaatcccgcgccatccccgccgcgacagccacgacccgcgaatcgcccgccgcgacagccacccgcgaatcacccgccgcggctccatctccccggctcaatctgcatattagaaacttatggattacctcaaagtgaatcttaatgattcccatctagaagtggttaatgtgagcatctttttttatttttgcattgttggtatatgtattgtgttcctaatatttttaaaagctacggttctaatagttactgcatttttatctaggcgggtctttcacgcagatcctttgttcttattcaagtttgttattttttaccactattaatttacattgttattgtttacccgtcttaattagttataagaaattatttcatatacgtgagctgtcttagctatatgcttatcttttgaatgatatgcagattgaacatacaccatttaatagtgatgtgcaatgtgctgattatgttatttcttttatgttttatctgcttttttgttgggtcctccaggaatcggagagacacaaactattcttggactccttagtgtcgttctccattctactcctgtaagaatgcatatcaagtaacaaagttacttggttattctttatattttggtgtatggagtattagttttcttttcgaggatagaaaacatgggggctagaactgaacattgatggtaagtaccaagtatgtgaagaatgtagacctcctaattagtttctaatatatttatttgactttgggctgggtatggaaaatgggaagaatataaagctgattagtaacatctagctacttcaaatgatgagtttccctttgaaattctccattcttaacttgtttctcttatagattgcatgattatgtgttggttattagtagataaataaaaaacatagttttgacattttttgttcctttgatatctcaaatcggccaaacaaactagaagtgctggcaggaaaagattggtatgtttatgctaccatattaagacgtttttattttctaggttttctttgaacttgcacggtaccatctatttttcagattttgcaatataattatcagtgaagatttgtgtagttctcttataatgctatataattaccacaatacagtgcactcagtttattatttcttgatgaaaagtgagtgatatagccactttatttggaggtttttacccaagatatcatgtacctgaaatactaagatagtatgaatcaatacatggatattgaaggctatactctgaaatgcagtctcactacataattgactcatgaaaaatctgttttcttattacatgattctgtttagtagaatctatggttttaaggtcgtagtagttttacgatcgtatacttgaagttctggtctgattcaggatcactattttaacaaccttgtgtggttaatttgcaggatcgtgataactattggaag

SEQ ID NO: 866 - DNA, 14274 bp, Zea mays
  Intron number 10 from transcript GRMZM2G158252_T01 (locus GRMZM2G158252) derived from phytozome v7.0 (chr-ID 5; pos 38791093 to 38805366)
aaggttagattcaaatatgtggtagcttcattatttcagcttgctggcaagttgtaactgtgtctagtcaatcccaccatttagcttatacaacaatatactttgtaggaaacgtgacaacttactaaaatattaatgtcatgagcttttgaatttgagatgtgtagaagacaattggtagaattggtcaattgtgtcgctgagctcgtgggcagattatacatgagtacattcacttggatggcaagaaacctccctaaagataagaagtcaggattacatgaccctaatctagcatatttaaagatattccaatataatataccaccccccatatttttctcgaacgtgcaggaaagctgcacatctttatattaagaagataaaaggtccaaaatggaccaaaacaggtatagatacaaggcacctcacgtggccaaaaacaaaagtacaaaaaaaacagtccataactttttttttttagataatggaaaaatcatccgaccttggcctcaaatgaggttacggccatttattacaagggacggaagcatattgccaaaacacctcctatgaccacttcagagaaccccaactagccaaattaaagaacttcagctatcgaaccacagctactacatatttaaacgcaacgcagacccccatccaaaattgctaaagaactgtagtagcaccctctccacattacgacatgaagactttattaactcttggtcctcccttctaggctgaagctgagaccagaagcggcaccaatatgttgccctgaaggttacctgcacacatgatttaggagatgaattattgaacaccacatcatttctacttaaccaaatagcccaacaaattgccgatgcaacggttaatagtaagtttcgaactctgggaagcctcccgctcgcccaaaccccaaacaaatcattaacatcccgaggaggtctcaaccccgtgcttatctgaatcaaccgccaaatgaatgacgcatacaaacaactgaaaaataggtgctttattgtctccggtctactacaaaagcaacatatcttattaccattccaatgcctcctagccaagttatcctttgttaatgttacccctcttttgaggtaccacataaaaatcttaattttcagaggaagcctaagtttccaaaggtccttattatgcacccccaacccattgttaagagatgccagatacagagacttaaccgtaaacatcccgttggcggtcaagttccatctgaacaagtccctgtttgaattcaaattggtatgcgcaacaagtgagaccaattgaacccattggtccctcaattgttgagccaaacccctccgaaaggatatatttaagggcaccgtggagaacacacaggcaacagtagagttcttcctcctcgctaggttataaagagacggaaaacgaagttttaacgttcccgacccgagccaatcatcctcccagaaacgcacctgggacccatcatgaatcacaaaggttcctttactaatgaatgtgtccttaactttcataagaccactccagaagtgtgaatcagtggccctacgctgcgcctgggataaggttcgattggccagatatttacgtctcaataatgattgccacatcccttcttcattgagaagtttatacaaccatttgcttaagaggcatttattttgaacctctaaattcaaaatgcctagcccgccaacctccttaggttgacaaattacatcccatttggccagcctatattttttcttatgaccctccccttgccagaaaaaacgcgatctgaaataatctatcttctccagcacaccttttggtacctcaaagaaagacatcataaacatcgctagactggtcaacacagaattaattaatacgagccgccctcctactgacataagttttcctttccagctgctgagctttttctcgaatttggcctccactgttttccactcaccaattgtcaatcgacggtggtgcataggaatcccaagatatctgaagggcagcccaccagaactgcaaccaaacagccgtgtgtacctcccttcatcctcttttgccttcccataacagaatatctcactcttgtgaaagtttattttaagaccagataactgctcaaaggcacataatatgagcttcatattcgttgccttttccagatcgtgatccataaacaaaattgtatcatcagcgtattgcagaatggatagccccccatctaccaaatgcggcaccaagcccttgatctggccattttcctttgctctattaatcagggtagcaagcatgtccactaccaagttaaagagaataggagacagcggatcgccctgcctcacccctctatgggtctggaaaaaaggacccatgtgatcattaactctaaccgcaacatggccccccttcatgaaagactcgatccacctacaccaggtacttgaaaaacctttcatacgaagggattgttgaacaaagctccacttcaccttatcataagctttctcgaagtcgattttgaaaatgaccccatcccttttcttcgtatgtagctcatgaatagtctcatgtaagaccaccaccccttccatgatatttcttcctggcaggaacgcagtctgcaggggactgattacattctgcgcaacctccgtgatcctcttagtcgccacctttgtgaagattttgaaactgacatttagtagacaaattggtcggtattgttgaaccgagattgcctcccgagtcttaggaagcaaaatgatagtcccaaagttaagactatacaaagggagatttcctgagtggaactcacgaaacaaagccataagatcatctttaataacatcccaacagatttgataaaattccgccgggaatccatcaggacctggagccttgttatgttccatactaaaaaccaccgcttttacttcatcttcagaaaatggctgggtgagcttctcgttctcaacttgagtaacttgtattatatcatctctaagatcctcatccagactaaaagacgtgttttctggggggccaaagagatttttataataaccagttatatgactctttaattctttctcgtcgtataacatacgagctccatccgtcatctggaagatgcgattcttcctgaattttccattggctatcatctgaaaatatttagtattactatccccctccaggagctccttgaccttcgctctttgataccactttatttcctcctcccggagtagctgagcaagcctgttctgtaagtagttatgcagatccaactccgaagtactcaacagaactacttcagctctcttatctaaatcatcaagcttagctatgatctcctttttttcctttttcaacaaccccgaagtgtgcattgcccaaccccttaagtgttggcgcaccttcctaatcctggcttgccatttctccaaaggagtagaaccacttgtctcatttacccaaatatcttttaccatatccacaaaaccatccctcagaaaccagcctagttctaacttgaacggaggaattgtatgggcggttacaacacctgtgctaagaagcagaggagtatgatcggatatatttctcgacaaggcatgtaccgaagctctagggtattttccctcccattctgtagctaccaaaatccgatccaacttctcataagtcggaatatccctagtattagcccaggtgtaccttcgccccgacatctgcaattctcttagatcaagaccatcaattaccgcattgaaaaggaacggccaacgatgatcaaatctatcattatttttctcagatggagatcgtaaaatattaaaatctcccccaatgagaataggtaaagtttctgtattgctcacacggactagctcagaaaggaattcttgtttgaagcagtcctgggcagggccatacaccgagacaagagcccatttaaaaccatctgctttatcaagcaaattaaacttaataaagaaatccccttccgtgatggcaccaacatcaaagacatcagcgtcaattcctaacaacatccccccagatctaccatgaggttctttgcaatgccagataaaatttttcccagcacacaaattccttagtagatgatctgggaaggatttgcggcctgtttcagagagggcaataaaattgagaccatgttctttggtcagatccgaaatgtatctaagttttttcaaatccttgaacccattgctgttccaaaagattcctttcattggtaaacaattaattaataatcaagcccgaccttttttcttagaacacaacgaaccctgactagatggttttgtacagactgacttaatcagcccatcagtgccatccgtctcttcatgcataatatccccacacaaatgatttaaaatgaaatgatcaaactcttcgtcctctactactccctttcccataaaatcagataaatcagcctcgttcttacccactagctgatcctgaactctattaatctctaattttttcaactgaccaatagaggaagcaactgaactaggattagaacccgctaaaatgccaatatttttaaaagaatccagaatataattatcgggtaaactaataaaggaaacattgttacctttagtcggctgatcgtccaggttgtatcccgctttcagccgaatcgctcgaactagcgagtcttcactcaccgaatcagagcggcgcgagctacgacgcagtgcatgcacttttcctgtcaacgcctccgggatactgcccaacttttcaatactaacagcattgaccgagagacaggtaccctgagattgatccagatccagctgtgtagggccagcgcacaccgatttcccactggacgtgttgctgttcagcatagaatccgacaccttattaactgcccctgctgaatcctttgatgttcccttcaagctcgcccccttattccctctttcacctatattgtgatccttgttttgatcctgaaattcatcatcatcattatccccgatatgatccatatccatcggcaaaggctggtcaccttcagctgctgactccaccctgaatttcagttcatataagtagtctccaattaccacatcaactacttgcggaatcaaattcgggtcaagcacggccaccttcagccttgccctgtcaaacttccgagtaaacaacatatccacctcttttgagatgcctagcatagaaccaaccgcccagattaccgagtactctctaagttccttaggtaaaccagtgaactgcacccaagccttaggcatctcatattttatttcctctccaaacccctcttccttgacaagcatctgtgcaccaaattttgtatgaacagttccccactcgatcatacggtgaagttcacccctggaagggaaacacgtcgagaacacattgttccccacacacttcacacaccagtcccaatcagcagccaccaaccttttaagctcattcaaaatctgctcttcattcatggaaccctccacaatagacactgtaccattgcagccaccttgcctctgctttactggaatgggttggggtataaagtaaaaccccaatccctccaccgcatacccgcaaggtattgcaaaagttttgcaggcacgaaccaccggacatttcgaagttaagtgagttttgacatcacaaatttcacaaaatagctcaatattacagtcactcaactgatgacctttatttttgcacctgaaacaaaacggcactttctcttttgaacttgaaatcacagaagaacccaccttgtcatccaagtgggttggagtagacaattctttgatggtctccaactttgaactgtgttgggacccaatattcggacctgctggattccccctcgagttctgaatgtgctggctcttccccacagactgctgcagcaaggaaacaatctgttccatggtactatctggaacaggcctgacagcgctaccgttgccaattgatgttgtaattgcctgttggagcaagtccacagcgtttgatacttgaggagtcaccgaagaagcccctgaacctcccagaccctgtccagcgaccatcacagaggaagcccctccatttgaaaacctgctgtgaacacctccgcccccagactgggttggcaaagtacgaccaccatagaaccggcctccggcagaagcacctcttccaccacgccacgctccagcacggccctgtccacctccccgacgtccaaaaggacggcgtccgccaccataaccaggatggaacactggttgggatccaccgcgtccaaagtcagtgttcagtcccaaaccagcgacatatcctcccgtgcccccaagcagttgctgaccggtggaaaaacctgcagcgccctcggactgatgctggccgcgactgcctccacgccctccagtatcaccaaccggcgccattgcgttccttacagcctcgacgaaggtgccaggagccacaccccgggaggaaatgtgaaccgccctggcagcagaagaactggtgcctgagcgggagaacaaggaagccagcccagcagttggcctataaggaatcctaggactgagaatcatatgttgggccctcccattccaacggggacaagcactaattaagccaacattccttgattccagcacaggatccgcatgagaatcccagaatatcgcctgacttgcatccataccaaaatcattcaaattcaaaccatcagctaaccgctccgctgataccgctcccattgaagacgtcttcttcaacctttggccgtggcaccttccaggggagcagcgccattgcgctttttctagtgcatgtccaactgtgaactccggcgaacgtcgtggcgacggcaatttgccctgccatggcttcaccttattcctagaagaagtgctcggactaggagaatgcaagcatgtactcaacgtcggtcctggtcccgacctgcatacaccgccgactacctctcctacctgttcgagagcttcattccaaatagattttggtggcgcggaactgcagtcaattagcttgccgtcaacacaggacagagacccgttcacgaaaacagagagccgaccaccctcaggtgtccgtccgctatttgccgaaccggccagatcaccaacctcctgatccagctgaacctgacaatcagcaacctccgccagtgggcggacgaccaccgcatcggtgggcgccagcgtctttcgacgacgacccttccgagcgtacgtggccaagcaacgtcgctgcatagcgcagagaacgaacgaacaaccactggcgggagaccggcctagatggccgcctcccacctctggtgtcccactccgccgagacagagggaagagcacttaccgggttacgccgcgcgcctagccgggacgcccacgcggcctagaccgccttgccgtggtcaccgcagagaagaaactcgagcgccagggtccaccgcggcctgcgatgctctctgatgagcagcgggaagttgcggcgtgcgaagcgaccggcccagcagttgagcacggcgtcgacggcgtccgcgtcggcacgaggcagcgcgagcaagcgcgcgacgacctcggacaccttccagtcccgctgccaccggttgccctccacgcggaggcggtgtcacgcaatcaaaaacagtccataactagagagctaacaacagaacagctacaaccctgccaggggagtgtattgggcatcaacacggactgaggcagggtgatcctctatcgcctatgctgtttattcttgtaatggatgtcttgaatctgcttgtgcagcgagcctctgaggaagggtttcttcagcctctttcttctaggaatatgcagcatcgtatctcgctgtacgcggatgatgcaatgttatttctatgtcctactgccccggatatcagtatggttatggatattcttcatttatttggttcaacttcaggtctaaggactaatgtccagaagagcagtgtgttcccaatctgatgtggggaagaagaggtgaattgtttacaggacttgctgctatgcaatatttcagtttttccctgtaagtacctcggtttgcctttgtctcccaagaaactcacaagggaccaggttcaagccattgttgaaagagtggccagccttttgccaggatggaaagctgaacttatgaccagggctggtagagctattcatgtgcagtttgtcatgacggctaagatgatatatgcagctctggcacttgaccttcctgtatgggccatcaaagcaatcgataagctgaggaagggcttcctctggaggggtaggaaagagttccgtggtggtcactgcctcttggcttggcctaaggttacccgtcccaaggagttgggtggtcttgggattagtgagttaaagaacctctgttgggctttgagagctcgctggccatggctgcagaaaacagaccccagtaggccttgggcggacttccccattcatgtttgtaaggtggttaaaaatctgattgctgcagccattattactaagctcggtgatggagccaatacccttttctggaaggacagatggttggaggggagatgtattaaggacatagctcctgcgttgtttgatttggtgcccttgcgtcttgccaacaaacggttggtcaaagatactctccctaatttccattggctctcagatgtgcaaggggcaatctcagtcagagtcattgctgaattcctggaactttgtgaagtgcttgatgcagttgtgctccagcctggaataagggatcgatatttatggaaattcagcgcttcaggtgattatacatctagttctgcttataatgctctcttccttggttcagttcagttcgaaccagcagagcggctatggaaatcttgggctcctgggaagtgcaagttctttatatggcttgtggaacataataggtgctggactgctgacaggctcagaaaaagagggctagaccgaccagagcagtgccccttgtgcgaccaagaggttgaaaccataaatcatttgctggtcaagtgtgtttttgctaagcagttctggtttgatttccttaattcagtggggttgcgggatctgtatccagctcatgaggaatcctttgagtcgtggtggaagtctagcagctccggcatcggatcttgtgagaaaaggtttcaattctttagtgatcctaggtgcttggaccatttggaagcataggaataggtgtgttttttatggttgtaatcccagcttgctcacgacccttaggatggctagggaagaggcggtgctctggtccatgactggtgccaaggccttgtccttcctccaagtcgatgagttgctggcttaaaacagcggtgtgggtcgtgtttcctccatgttttagtcagtgatccgtagttagtctctagtggtgtatgtgctgtattggggttctctccccctttcttttcttctattaatacaaagatgcgcagctctcctgcgtattccagaaaaaaaagaaaaaaaaaacaaccctgggataggggctgctaggagatccaaattcttggccccagccagcacccacaaatccctctcctccttagcttttctaatagccggtgagagcggcacagatggtgagaccagagaagctgaaggttgtaagacgacgagttgacatcccccaaagtcatagtggtcaatgtgtcgcatatgctgtagctagagtgctcaagcaaggcagaagctctttgtgccgatgttgaggtagtcgagcacgagggtgagtagccatggttgaggatgccatctttacgccatggtgatggtcgaggcgcgtcgagacagtccattgtataagggggtgatgttgaggtcaatgtagtcaaggccatcgaggatgtcgacgaaaatagcgacacagtcaaggcaggtcatcatggaggaagcatacaccggatttgctaggcctgagaacgtgtcctggagaacggcacgctacactgccaatataagacatgctagttagagagccccaacaatgtgtcaacatccgagcgaccttggaagagagtgcctcaacgatggttgattgtggtgcccaaaacaactgagcacaaggtgtcgatgtatcccacaattgtcaaattagatgatatatgtgggaaagagacaatgatgctggcgatgtggttatgctgaatgaagaaggaacagtgcgggagtgaacgctcctacccgaaggggagtagtttgggccgacgtccttggccaaggcaatggtccagacataaggtacagtgtgcccaaaggcagtggtccagaagcaaggtatggcgtcaaaaacagtgttcgctgttggtgatgaagagcacaaaaagtttgatgaagaccaagtgcatcctggtggtgcgcaagaggtgcaacacaattatcgatgtacatggagcgacaatgtagatgcattgttgtatgccaaccatggatagaggcatgcctatgagggtgtctcaattagagaatctctaacattgccttaaatcaattctctatcttataatatagtgcttaacttataaaaaactgctccaacagtgctctattttacatttttatcaaaaaatatagggcagaccataaagtgaccaaaatatactacactctggattagggcttaactgttgcaacacaatttgtttttagtgccttaaacactttaaatgatgtagtattgtaatttttggaacattattttgaggggcagcgagtgtagcgtagagacagtttatgaggggcagtagcggaagtgttgggatagcaagcacaaccaaatacacggagttgggttgtgtcgtacaaggcgaagtaggtggtggggtggctcaccaccttcgatgggaggcgattgaggaggtgggtggcggtgtgcaaggcctctgcccagtagttggcagggagagacgcctgaaagagaaggcaacaaatcatgttggtggtggtgcgaatcattcgctcggcccgaccgttttgggcagaggtgtaggggcacgagagatgcaattgaacgccactggcgaggaagaacgaccgagaggcatggttgtcgaactcgcggccattgtcacactgcagtgcatggaccgggcgacagaactgggtggagacccaggcgaagaagtgagtgagggtggtaaacgtgtcggatttcattcgaaaaggaaaagtccataggaaatgggaaaaatcgtccaaaatcaccaaatagtatttgtatcctgacagactgagtaccggggaggtccatagatcacaatgaaccaggtcaaaagcctgttcagccctagaagaagatgtagtgaaaggaagacgggtatgtcggtcaagctgacatgcatgacagaggccctcaaaatgtcccctattacaagaagaatctaaagtgctggaaagcttggtcatgacctagatcctgggtggccgagacgacgatgccaagtggtggaggtggtggtggagaccaggacgggaggtggagacacgccggtggacgacgaccggagtgtgtagaggggcccgacgctgtcacatcgggcgagtggggtcctggtggccagatcctttacagaaaaaccagtagggtcaaactcaatggaacacgaattgtcggtggtgaaccaacggacagaaagaagattgtgagtgatgtgaggggctacgagaacgtcgttgaggtagaacagtccagggagaaccgaggcacctactgaggtgactagaagagtggaaccgtttcgaacgacgatcgaggtagggtgtgtggggggaggtgggtgtgagcgagagcatgcctagggtgggggtggtgtgataggatgcaccggagtcgatgacccagtcagaaggcggtggggccaacgccatggtgctgtatgcggcagcgagggcaacagggtcccaacctgcaacgaacgaggaccatggtgtcgtggtagacggtctcgtaggcgggagttgaggcgggccccgggtcggtcggggcacgccgtatggaggcatgttgtaggcgggcggcgtagtcaggagagccggaggacgggaggcgctgggggcctgacccagccacatggagataatgccggtccaggggttgtagaacgacggccaactctggtcgccacccctatcggtggaacctccacgagaggagctgccgcccccatgtccgcccttgtaggggcgacggccgccgtcgatggtggaatgctgacgagggtccgtaggagccgcggtgaagggccgagcgggggtcctggttgacggagcgcggggggcgagtcctccggaagacgcctgggcaccaggggtggcgctgtagagtgccggagtgggagcctcgatcgtcatggtgagctcctcgagaagaagttcattgcgcacggcgtggaaggtgggaaaaggtacggtcctcttgatgagagccttcaggtggccgtagagggggctgaggccacacaggaggtttagcaccaaggtacggtccgccagcgactcgccaaggtcgcggagggagtctgctaggcccttcatctggcggcagtactcccgcacagagaggtccccctggagaattggtggaactgatcatcgatttgaagggcccgagcgtcccggttcccgaggaattgttcctcgagggcgagccacgcctggcgggccgtgtccgccttgtcgcagatgatgtcctggagctcgacggtgatagtgtcgtggagccaaaagagcacgactgtgtccatcagggaccaggccatgggcggtggggtgacgatgtcgtcgaggacgtggtcggcgagagcgtagcgccgcagggtgaggacctgcccccgacagcgagggtagtgggaggacgccgggtctagcacgattgacacgagggaccatatgttgtggagaccggcagcctgcgcatgaagggcggcgatgtggtcggcgtcgagtccaggggcgatgggtgcctggggttgggtggaggtgcctccggggtgaccggaggatgcccgaggaggagtcgctgagcggtagccatttgggcggtcagagcagcgctcatggcacgctcttgctacagggcgagggtcgcagcgcgctcgcggtcgagggaagcctccacggctgcctggatagtggcgatggccgtgaccagcgccgacgaggccgtcgggggggcggggggggggcagtgacgtcagcccatgtggcggtggtgtgggcccggaggagaatcgcggcgtcgttgagcagcgagggtggcatcgggtaggggcccgagatcggcgatgtgggcccctccccaacagcgaggtcgctaggggtgccgagtccggcagtggcgagggcggcggtagccgcggcgctgcgtgctggtggggccacagtggcagtggccgcagggagggccgcgcgtggctgctgggcagcagcagtcgtagcggcagccggggtgtagggggaatgaggtggtgtcgacatggcggcaccaggtggttgggcggccgacgctgcggggttgacggcggcggtggaggaaggaccggtgcgagcggccgaggtggctggatggccggcgcggtgcccagtgagggggtccggcgggggcagcccttgctgctgggcggcggcgcaggaggaggcgccgcggcggccagcctggggaggagcggcgaccggtgggaggaaggggagcggcgatcgggcctggggggagggagaaggggggagcggtggctgccacggactggcggcggcagggagggtgggagggaattagtgtggctctgataccatgtagaactatggaaaaccctaaccctagaatagggttgggcagtgtattaatagaccaaataactgggctaggcccattacaagggacgggtatctaaaaaaatagactgcggctttttttttagataatggatactagtccagcttctcctcgtttggaggattagccaacacaccaaaagtttttacatggagtagtcacacgactagctgctttatttgtccttttcatttatgcaacctaggaattatttgacttgtctccatcttaatgtgtctgcttttaaatacagtttactgaacagggccacatctttgttcaagtcca

SEQ ID NO: 867 - DNA, 10502 bp, Zea mays
  Intron number 1 from transcript GRMZM2G145355_T01 (locus G RMZM2G145355) derived from phytozome v7.0 (chr-ID 2; pos 1 10367469 to 110377970)
gaatagccccctcgccgtgccgtcgttctctgcaggtgatctcccgccgcctccgttctcctgcctcgtggggtttgggtttcgctgctactgcctacttgcgtcggctggggtcgggggttctgtccccgccgccccaggggagatgtctccgtggagccacggaccagcaaccgcctgcttagatccctgctcgcttttgggcagctcatcttcaattcgatgatctgattggggttctggtgtaacggttggtcctgttttccgagcacagcacagtcctccggccgcgagtcgttattagtagtcgaaggcgagcaggattcaacaacaacgctctatgacatggggcgaggttttgctgtgtgcgtgtatcaggatggagtgaaattggtgctcaggagctgaggtttgcctaattttggtgctgtctatggcgctgaatgctgattcgatgaagttgtgtgctaggcaggcattcctatttctaaggggtgtcaattggatgtccagccttctattggatgctaatattgggccctttggaacgctggattttttttcctgtttcctgtgcctgtgaaaatgaactgattcttgtgaaatttctatatgattcctctgaaattccttcgttcaaaagagcccttcggtgtttgcacatggtgcatgcaaaaaccccactgctcaccggaacacccactgaagaacaacgcgagaatacacagagacacaactcaattggacgatggtggacacagctcccggtaccttcctctcacgaagaacgattaccagtttaccaccaagtttagagtagtagtacatgaacaaagataatctggaactacttcggacgagttggccttcaactttctgcccaagcctacgccaactgcccaccctccttcactccttatcctgcttacaactacagaaaacaaaaagcaagctgacagctaccagctattgggtccattctagcccaagataaagttgattgggcctactctctcgcctcgggctgttcactatgtttgaattttgcagcttcgtgacattcccccacccttgaaactcggcttgtccccaagctgttgcggcaggaaatttgctcttgatcagtttctcatcctcccatgttgccaactccggaggccatttgatcagcaaccattttttcaagtcggacgacttgctggttgttttggctgacctacttgggcgattaatcgtgattggtccaaaccgacctggacgattaatcgcgactaatcgcaatttaccggacgacttgaaaacagtgtcagcaactcagagctctctctagatggacgagaaaccgtacgacgttgcggcacctgctcaggatactaggagtcagggataacaggtaattgcaaactgacttgttcttgtggtccaatatcttttttcagaagagacacatggaacaccggatgtatggaggaaccagcaggcaaacttgatttatacaccacttcagccactctagccacaataggaaatagaccaaaatacttgaaggccaatttatggttagctcgttttgccaaggaggactgaatgtagggttgtagtttgagataaaccagatctccaggttgaaagaccctgtccgaacgtttcttatctgtttgatatttctgtatctgttgtgctcgcacaagttgttgttggaccaattgtaccatcaattcattcaaccattcatctagagagggaatatcacaagagtccttaagatgtagacccaactgattaggaggttacccatataatacttcaaatggagtgagagtcaatgaagaatggtaactagtattataccaaaattcagcgagagacaaccaatgttttcacttggtagggcatgcttggacgaaacaacgaaggtaagtttctaaacactgattaactcgctccgtttgaccatccgattagtgatggtaggctgttgtcatccttagttcaaccctagctgatttgaacagttctttccatagagtactagtgaatattctatctcgatccgagatgatagccttggggaagccgtggagtttgaaaacatgttccataaaggcctgagccaccttcagagctgtaaaagcatggtggaagggaataaaacgactgtatttggaaaacttatcaacaatcaccatgatacaatttgagtggtcagattgtggtaaatcatcgataaaatccatggaaaccacttgccaggctccatctgggactgatagaggttggaggaggcctgggtatttgactcattccgacttcgcttgttgacagacagaacactgccgacaccagttgtgaatcatcttcatgcccgaccaaataaacattttcttgattttcttttaagtgacaagaaatcttgaatgcccacccaccaaagtagtatggagagcatctaatactttctagggagaaactgatgtgtctggcaagagaattcactctttatatttgatgagtcccttctgcaggaactagagggagaagcaacaactagggcctgaatcaaaggcagagtatccagatattgggtgtaggatgctgaaatgttggggcgaaggcgtaacaccccctcgctcgagaggccagcgccagaggattcaagactggagacctcgaaggcctgaagattgagctacattacgaggtgcacggggagaacgcgaagactcaggtgctaccttctcccggacaggcgagggcgaagaccatcaaggactctggagactgaacaattaggactgcgaagaccatgcgttgtaacctgccactaattgtaatagggggccatgtatagtcggcccatgctacaggatcccgaccgtaggccgccacgcaggcagggctggcagtgggtcagcccatgtttgtaattgattacgctgtaatgacccgccataacccccaagggggaattttccgggggtaacataggtaactaagggtataattgtctttgacgaggcagggccgaccctcggttacctataaatacccccgtactgtaccattgcgggacatggagaaaaacactgttgccctaatacactgagtttatcggcatcaaactgtttcccattctcccactgcttgagcttgactgactgtgagttagcaagttccaacatgaaacttccattaaccacgagggctggagcaccgacaagccaatagttattcagaaggcaatctggagagtgcataagccaccctattggcttgcccttgcttgtagcaaatttatactgtaagcccaagagtttagtgcatcagccaaaagaataagaaagggtatgaataacaaattcaccagtaatgaggtaagatcttgggcttacagtatacatttgaggactatgaataacaactaaaagaatagccaaacactgatatagatgagatctcctttgctgtgtggtggggcaaggtgcatagagaagtgcataaaagaataagaaagggtattcatagtatcatcattctgggggcctgatgcttatggctccatcgcaacaggcctgtttttgatgaacaagaccttccttgagcacaattcaatgtctgtttatggacgaagtggagtgttgtagtagggctggtgcaaagcatcttgagagtcttggtcttcctgctgtctttaatatggttagggctaattcaagaccattgactctctgcgccgcgtgggctgctgtcatcttgactcccactgtagcccatgcggtaccgcggcgaagggtgacaggcggagaagacaggatgccgccgcctgagcacccctacatgcgtagtatatcagcctacgccgcaacctactcctgcactctgctccaactagacggggcaagggcacgacaagccaggagatctacatggcgaccaggtgaagataacctttctccacgaaccaacgctccacttgctccatatctagcaatagatacggggcccacttatcggggctcagtcgccatgtatgtgtctctcttgggctataaaagggaaggcacacacagagtagaggacagttcctgttgaggtttctcacaggaacagacaacacatgaagactcccaagcaatacaactcagcgaatgcagggtccaacccctacagacgaacaactctaacactatgggtgtctcttgttcatcccgctagtgccaattcctgcaccgtcggtcttcatcttagtctgacatttggcacgccaggtaggggcggtgcgcttagcctagctccttgctgatgacatcccactcactcgccgacgagcttggccgaggtcggtgtgccaacatttggcgaaaggcggaaaagcgacgcctcaagatgctcgccgtcgatcctcaacagttgtgccaacgccattaggcagaaggcggtggaaacctcgagcatgatgcttgaggttaccaccgttggccctcccctaggccctgtcatgctcggggtcgcaggcggtgacccccggcagggcaccatggtattcgaggttgacattgccgtccgacagccaagcacgggcgaggccgccaccggcgatcgaccgctatgctccatagtagatggagtcatctcctccacccgcgggggatgataacttctacctgccaatgggttccaggaagccacgataacatttgttaacatggcctccttggaatccattggtaggcccccatgggctaggagcaaggctagtgcggtctgctgcgctggcctatgtcctggtccgacgacacgtgtggtgaccgtcgttggccaccgcacaaactcatggcgtgctcagtatccaccatcgcacacgctcggagggggggtctagtactaactccctcggcgtgctggcggagaccaccaagcaagtcaacaatgggtgcgccttcgacaacctcatcatgcatgaggtggttagccggccgtggagggcccatgggagctccccacgtgcaccggtggctccaagacccaactcgtctgccacgagctccatggcatccggggtagccgccagccacctccgccaggcgctgcttacccttcaagtcagacgcgcaacggagctcaggcggtttaggtcggccctagaccttacacccgaaaggtagcatgagaatgtactctttctttgtaataggattacatttatctatagtctagtccggtaaggtccaccctcgtaagcccggtttctggtgccatctatggcccagcccggtgagagtcgcaggcatcacatgtatccgattgcgaagaaatgattagttctcatccatcggtttcttttcctgtttacgcatgttgtttccctctacccctttcgtggatctaaacatctattgtaatcatgaaacttgaataatggtgcctattcttgcacctggtttagaacatcacttgataatgaatgaggatccggtcgctaagggcttggtctagggaatggtccacgttctcgagggtggtccttagctgggtagccgcttagcctggttctgtaccctaagcctacaaccttccaccaccccagaacagctgacctagtacctcggactgacttcttagtggactgaacctcgttcaaactcaagggacgatcccaaactaggatcagcaagaacaagcactactatttgaaggattgaatacaacagggtaaggatcccaaggtgcgctctgctaagcatcgatccttggccacaacagggatcgaaccctggtctcatcgtaacctcaagcttccaaggttaccaacatcccagggggccagctggggttgaaacttgtctttacaacaggaagagaggtccgggcgtcactcacctaaaaccctgtgtggatccaatttctgattaccttcatgaaacctggagtatgtttctatcttgccactcggtttcagaaccttcccttgtaatggataaggattgggtcacaaggggctaggtctaggggaaagaaccacgttctcgggggtggtccggagccgtgtagtcgcttagcctggtcctataccctaagcctgcatgctccaccaccctagaacaactgtcctagtacctaaggcttggcgcctagaggcctaaaccttaccctgaccaagggacgagttcctgaaatcctactcggcaaggtcaagaagcataatctagaagattgaaggcaagcaggatgaggaccccgtaggcacgccattaagcaccttaacggggccatatgcaggggcacctttttcaattcaggttaccaggcgaggggccacaggcatgacgccttcaagaagcaaagtgtagttatggccccacctacgggtttgccatctaacccgaggtgggctcgggggccactgtcggtaccttaacattggggtacccactactgctgggtcaaggcgaccccgactctacccttagccaccatgctaatggtggcccgtcctagcctagtggctgggcctgcctagtaagcccactgggctcggaagaaggccaacacctttaatcggcgctttggaaccccagcagagggggtccgggttcgccacgtgccttgaagacgagggctctcggaacctgtgcccgggggctggaccctcgagaacgacctgaccctcatggtgagctacccgtacctctggcctaagggggtccggtgctgccacgtgctggtcaacgctgaaggaaacaggacctccccgtgcaccatccggatccccagctaagggcagtccggagctgtcacgaggaagggcggtcccagtcactactccccacacaaggtgaggcctggtgctgccacgtgtcctgcaacgcgtggcgtaagctactgaggaaagcctggcgtcagtctctgagtgtagtgcgtctctgcattaactgcggacaagacataaacctgcccgccccagtggcaggtagtgcgtccgcagtacgcaggctgcatagtaactcacgcgttaccgaggcaagaccattgactctctacgccgcttgggctgctgacatcatgactcccactatggcccgtgtggtaccgaggcgaagggtgacaggcagagaagacaggacaccaccacctgagcacccctacatgcatagagtatcagcctacgccgcaacctactcccgcgctctgctccgactagacggggcaagggcacgacaaaccaggagacctacatggtgaccaagtgaagatatccgttttccatggactgacgctccacttgctccatatctagcagtagattatcgggcccacttgtcggggctcgatcaccatgtatgtgtctcccttgggctgtaaaagggaaggcacacacacggtagaggacagttccggttgaggcttctcacaggagcggacaacacacggagactcccaagcaatacgacttacaatggatgtagggtattacgctccagcggcctgaaccactctaaccctggtgttttcgtgttcttccagctaatcaggcaatccctaggtccccttctcatcttaggatcagggcgggtgcactccgccacccggtcggaggattttccctctgacaaagtgggaggctgaagatgccatttttttcacaaacttacggtagtaccctgcaggacccaaaaaacttcgaacattcttcactgatttaggggccggccaagacctgatgacgattactttagttgggtcagtagggacacctctttgctaatcacatgccccaagaagtgcagacttgattgagcaaaagagcattttgattgcttgactttgaactgatgagagtctagaagagagaaaactgctctgatgtgttgtaagtgatcttcccaagtggtgctatacacgagtatgtcatcgatgaaaactactgcacttacaatgcagtggagcgaggactgagttcattatgagctgaaatgtggtcggttcaccgattactccatagggcatcactttatgctcacagtggccattatgagtttaaaagccgttttcgggatgttctttggttccatttggatttggtgataaccggaacgtagatccaaactagtaaaccatgttgctccttggagttcatataatatttcatcaataattggcaacggatacttgttcttgactgtgagagcatttaaccttcggtaatccatacacaatcaccaattacctagttttcttacgagcaagaataatcggggaggcaaatggactgctgctgggttgaatcataccactttgtaagagtccagtgacttgacgctcaatttcatctttttgagcagggttataacgatatggtcgcaatcggaatggagtagcacctagaagtaaagggatagaatggcaataagacctaggtggaggtaaactggtgggtttatgaaaaagagaagcaaattccattatcagttgatatcctccggaactaccctgttagagtttgaaggtgcacattatttaagttctaagatgcaccacaattcatccaaggaagccagatgatataaatgaggaattgaaatgtagtccaaaattgagaggccaaagtgtgagactggtgtccttgtaacacaatcttcctattgttatcattgaaagctaaccacttatcttgccaatggatctccatagtgctgtgagaagccaaccaatcaatgcccataataacatcatagcattggaggggtaaattttccagattaagagtgaaactgtggccttggagagtgactttgcagtgaggcaattcatgtgtgcaggtaatgacctgaccattagcaacccttactgaaacagactatgccaagggaatcgaatgagaacgaggactgacagctaccatttgttcactgataaatgaggatgagctacccgaatcaaccaacataatcacttgttcgttaagcacatacgcaagcaatttcatggtttgggaggcttccgtaccttgaatgacatgaagccatgaacagacaaagtcatgagatcatccccagaatcctctgttggtctgtcctcgtgtttgaacaaccggttgagtccaaaacttgccataattcttccaccacatgaagagggacaatagagctacacttatgagtcggtggtggtggtataccttctcccaacatcttaaacctttggatataattggttagtgcgttcactctaacatggtatcaaagtcagaggtctcgagttctaatcttggcagaggcttcatttgtgcctccgtacctttatttccatgtttgcgcctttctctctggctgcacgtgagtgggtttatttccacatttgcacctttctctctggccccatgtgagtgggggtgtttgttggggcgaagacggaaccaaccctcgatcactcttcatacttaccgatatatgatgtctccgatgcaggacagacaaccagggtgagcgaaggcagcgtggggggctcaacttctaaggagcgaagtctgcccccacgcttacacggtagagatgttggcgcctgaggtcggaggcttagacccaacaagggggttgcccggtccctacgggtcgtgccggtcgacgaagaccctcggtgaagacacctgcaggcgggacagggccagcgagcgaaggccccacttcgattcctgacaaggggtcatgcgtcttcgatatttctgccgcaggaacgcggttgcaaagacaaagtcctcgacccaaccgagaggagggcccactctcaactaggcagtggcggccccacctgtcggcccctactgagggtacaaagctgggtgtgattagaataacgggtcaccgttctgtaattaccccgttgtacaacatattccagaaatgtagcaggtatctaggggcacgaacatatttatgacgtcggcccctggacgccctataaataccctgtcctgtagctggatatgacacacttgacaagacatttgagcttccagccatccgttttgtcgtgccatctgtcacctttgttcacgagtgcttgggcccgctattctcagtcacaacagtgttgaagtgtataaatggattgcctactttctcccaacaagttaagcttttggttgaattggttaatgcatccactccaacagataccatgttggaaaccctaacccgcattagggttgaacaacagcgaacacctacaaatagtctaataacattgaacatcagccttgcactcagcctttgtgaatctagtgtaaatatagtttaattaatgtcaacaataaaggatcgcttgctgcagaaaactttaaatgacaggcaaacttattttaaggttggcatctaactaactggtgctattgtactgattgtagtttttgttggtacagttcagtctagatttccttttttttgttagtgataaaagttgctatccattttttgacatgacaccatcttttcgtttctaagtag

SEQ ID NO: 868 - DNA, 8653 bp, Zea mays
  Intron number 1 from transcript GRMZM2G467902_T01 (locus G RMZM2G467902) derived from phytozome v7.0 (chr-ID 5; pos 1 08954676 to 108963328)
gccgggcacagggagctttgccggcaggtataaatagcagagaagagcggcagagagataatcaccaaagatcgcgtacgtgaagaggataggaacggcgtgcgctgtaggaacaatcaggatggcacgattttttcgagagaaacaaacgtaaaggatatggctaggcaaaaaaaatctaagcgatggggcttgctgcagatagaggcaaaccaaggatatttatcaaagaggaactcatgtcatggagttgagaggtgcagggaagatggatgctgagaagagttgaacggcctgaaagaaatatccaccagaggagcggtggtttggatcaggttgaaaagatttttcaaagattttccccaatttctattcttttttttataaacggaatcaaagatattttggatcaagatttttagatcagagcgagatgtaatcagaacaatattccggactgtattccagttaatttgaaatcaataatttcatccgtgtctgaacacctggctccacagccacggataagttaccagtgaattggagctcaattaaaatttctcggacgagctgtctcggttgacgagtgacaaccgaattgtttaataattgtttatatctgaagatttggatccggcgagaaacaacagaccgaaataaactgatttcgatactcacaatttgctccatgatttaactgaaattagctggaaccatagttgcgaatgctcacgcgatttcgtcgccaaaacagcgtgctgaaggtataaactgggtcataatctcgcgcacgatttttctcaaacatcgtgcgatacagattattttccctcgacattttagttgtcgagtttcaattaatgtgcccaggataaaatgcgtaaaagcacatcgagtttccgaattcgtattcgcacgagctatatattttaaataatcacaggatgcactgaccttcggaacaactacgttccgaacatcacggaaattttggaagagtccggacagataaaaataaaaacgacgtcgcactcgcgatcgacgaaaccgacgcgatattaaaatcgcgataggcgaagatgattaaaatttagcgtctgttcacccactgatattacgtgcttaaatccatactcgttatcgagcggaatataaacaccaggggtgttacagccctccccccttaaaagaatctcgtcccgagattcggagcgaaagacttctaagggtagagaagcatgtaaaccatatccatatcagcgataaccctaagacagtccaagtaaaggcgagtgcctcaggatgtagtttctctagtggacatatcatgtatcgccttaagctaatttagagatgtcccacagtagagacgctatctgccacaagaacacataagattccatgtgtgcagtttgctttttctgatgacactattctatcttagtctgttggacgagcggtaaatgcgcgactttacccaaacagaatcagatgcaccatcttgggtaaaacacccagaaagaggtttaccaacaagtggtcacggtaagttcatagcacacgagacgggtgtgaatgtcgactaacaccacagttgacccatggctaaatagaaaatataagtccaaagatgataagagggactcgaagaaacatcaatgagggttatcaacaaatgttggcttcacaatcaatccactttatcgagcactaagcatgacttgacctgatcacacattctagaaaagcgcacgtgagacgatcgaggcatgactagagtgataactaggtgactatcagtcgactttaacttgatctttgtaagaactttcttatgatgggttggaccaaagtgagtttagacaactcgacaaaacaatctttaaactcaacctttgttcattgggcagttacaagttagtaaaaccaacttgttgaactacttttgacattgagtaggtcctctcagtaccattggtaagccaagggttgagagttcacatttgctagcaaaaggtcatgcatttgggtaaaaatccatttggtcatgttgttcatccgtttcttcatgcgagatgaattgacttggtccaggaatacatggattaaataagagagcgaatgaacaaacttttgcatctcagtagcaaggggaaacatatctccattttgagagctaatcagttgtttctcaacactaaaaagctccaaggcttcacctttacacaaaggatgtaaaggaagcttgtatgagtagtcattaccaaaatcaaaagaaataagaccatacatgaaagtggtatgcccttttaatccaacagagatgatagatgttgcttgatcacttcgacaagcaacatagaaattattttaagggaggagtccacggaagatcatacgtaagtgtagttccacaatggatcatgaccagcgacctcgataccagcagtcgccaagcagcataaccttacgtgtacattcacaaggggctctcagtttcgctgcggcaccataagtccttaatcatgacaccatcaccgaactggcaccaataatgaatctcacgtagcaaaaacagattgtgctaagataatacattgatgtagtctcataatggattatgactactaactgtgataccagcgcgtgccaagtagcgcaaccatgtgtgtacattcacaggaggccctcggtttcgtcacggcaccatcggttttagtcataacgccattaccaaacataaccaataggaaatctcacacgacacaaatgaatttggcaagggtgacaatatacaaggagatactccacctgtaagaatggttacaagtagagagccaaatagattatgacccgatgaaatgaacaaaacacgaccataacctaaattggttgatgaagggagtatgatgggagactgttaattcagccccacgcatatttctatgcccatcataaagattacaaggtcaaggattagtatctgattagatacgtagggaaaacaatcatcaaattaagttggtatgcctttgatagatatggggaaaccaaaggcatcaaattcaagaaaatactcggacaggtcttttctgggttaggttgataaagcaacatggcgatcctttaaaaataggcaaactggaataaagacatcagcttgcacaaatcgaacaaggacatggtttagggtggagacatgactcgagattcttgtttaagcctgggtacactttatttccaacaagaaattatctaagcatttattttcatgtgtttggttatggagggataacggaaaattcaaatttgggtcatggttcactaaataagaacatggcctagttttgggtttaagcaactaaactactaaccttctatcagtacgtcaagcacaagagcaaacacatataatacctaaatagattacctaagaatggaggacatctatttcattggggctcataataccgcattacaccacattattcacaatcaatggttactggaataaggatgagagaagcattttgggtgtataggcgacaaacatgatgcaacaatcaggatgcatgctcgtcctatatgtcctcactgattttgccaaccaaatgtggcaatagcgttctatctcggtggcatacttacgactctcacggtattttgctagtcatcaactacacgtacgttttcgaggttaatgtacctgcagaaaattccattgcagcccaattcccatgatgcagttcacacatgacagtttatcacagtttatactccatatatcgctatatggaggccagctcatcattaagcgccgagccacgcataggcgctgttgccacactttaaccatagggcaactcattatggtaacttaccttcttacctgagcgtaggtgcatcattacaagtacatcacacttctcagtattcccatgtctgtatacccatacacatccatggtgtactgaattcccagaaaagtaattactccacatcacagctttcatatatacatatgtagaatacgtatatagtcaagcgccacaattaagcacttccctagagtcctagaccgatggttgttcggtcatgctctcacatctcaccttacctgaacgtcgatccattcagaactgaatggcctcaaaaataacaatacacatgtatgcaatacccacccgattatgggttatggttttcaactaagccacctgatattccttaatttagggcttaacagaggatgtcgctagcattatagtttttcaaaattgttttttcaaaaccaaacaatgggtttagttgaaaataggtttttctaaaactaaaactttgtttttaaaatatgtatgtgaccgtatatacttaatcctgctccgataccagctgtggcagaacctcccaagttattgggcccacatgcacatgtccttgtctcgaagacctcagactgctatgcatgtgcaccagataacttaacaggatccgtccgattgccctaaggacatcggataaaccacttacaaccagaatcgcgggattaagtaacacaaatcacacacaccaatattgttgcagcggaaatcttactaccaaattttacaggttacaaaaattttactttagtttatcggagtgattacaaaagtataagtttgaaatatatgctagctcaagggatcatcctcaataagaagtatagaagggttacttagacttataagaaggccgagcccaccggcacttaacaccatcaacaacagcacaaagttagaacctaaaaaacaacagggaataaaaccctgagtatggaattactcagcaagtcttacccgactaaggaaaagactctcaagggtatgctggataaataggaatcaaggagaggctttagcaaaaatcaacttagatacttttgcagaaatagcttactaaagtgagtccttactttcaatattttaacgccatattgaatattaatagacactgtttgcatctagtctaatttcatcatctcatcaatacaacatcctttttgttcataatgttcacatcctgacttaggttgtagacaagtgaccaagtcttcataaccgcgaaggtacggcgatccgaatcgattatactcagctgaggatctccaatcacacgacatatgtagcacttaacccttgcatatgtcaacccgccaccggggttcttaagaccagatcaggttcacgcaaaccgagagcacaaatacaccaccgtccagcctcttgccacggagggtacacgctactctcgccaccgctccacgcccatttcgtgttatcttattctggccttagtctgcccgaggcaaggcttacccatgacgaggcatgtgaccagttaaagggtcctcggtcagcacacctacatacgcatccaatccttaatcaacctgggtagaacatcacctgttcctagcccaagttccgatttaagtacttccatccttaggattgtttgtgttccttaggatgaaaagagcatcacagggaactttccagtaagatcccaccattgctcccaataaaaatattcttgcaggcagaagccatccttcctcaggataacccctgagctaggcatcaacgcaaaggacaagctctatccacaagatttacctctaagcaaggctaagcaattttgtaaatcatattttgatacttcatcagaagtatctataaaggtatggatatcaaggaaggcaatgcatcaaagggttccaagcaactcctataaacctaatgcacatttcactagacttaaagtgtgcgaaaattatttgaaaacacaagcaagggttgcatgcaccggggcttgcctggataacactaggttagtgtttgttagacgacgacttggcgagtatcctttggcttggcactcgttcagattaaccatcttccggtttgtccatcagcatcacctagcgagcggctcacgcgtagcgacatcttgtggccgactcagttctggttctccgcatcgcgtggttaattcacgtacctgaatgaaatgcattatgcacatgaatgcatatagaccggaatatttcaaacctaaatagtactacgcgatagcgaattaaacacctagcggcgaggcgttgtaccattttagacgaaaatactagttattgacgtatgactaagcgcaataattacgtttctggaacctaacacaaacatcacgaaccacaaactatacacatgaaatacaattagcctaatcacaatttatcaattaattaattaagttctaaacttatccctttctttataaattatactacatctttataagtgattaaaatatttcatcaacacacatgcctactaaaattctactcggtacactagttcagctaagtgaccgaaatagcgaaataactcgctataactgaacctggctcgataatcgcaagaactgcgaagtcgacgagagtttcgtgacttactcaatttatcgagcaccctaatgagcctcgcactaacacattaatttattcaacgatcgaactatactgaataatttatcagcttaccgtttccacggctgactcgaatccgtgagatcggtagcgattttccgatccaggcaatttgtcgagcgcttggggaatatcgcgctgcaagcttcgtcttcacccgatttttgggatttcttgctgacgtgcggaacgacgacagtcgaatcggcaacaaagcgttggcgaattcgatgaaccactacaccaaaatcatacacttcctacggttttttaacttcctacagcttttataacaaaccgtaggaaataaataacttccgagaggcaactggtacctctaggaaataaacataacttcctacggttttttataaaagctgtcggaagttcaaagaccgtaggaagttaactaacttcctacggcctcctctaggaagttaggtttcatctgttcacaagtcaaacgaatatctaacttcctacggctagctctaggaagttagctgggcagctaacttcctacggcctcctctaggaagttaggtttcagctgttgaccagtcaaacgaaaatctaacttcctacggtcggctgtaggaagttacttaacttcctagaggcaaagtacaaactctaggaagttacttaacttcctacggctttactctaggaagttatgtttttttaatttttaacctccctcaaccttatctcttctctcttctctcaatatctctctgtctcacgcccgaccggccgcctctcccgcgcgcccttctctcccacgcccgaccggctccgcccctggccccgccgcgcccgcctctcccgctcccggcgcgccccgcctcggccaccgctcgccccggccgccgctgcggccgcctctcccgtcctcgaccgcacccgcccccgaggagcccgccccggccgtcgccgcggccgcctctcccgttctcgaccgcgcccgcccccgaggagcccgccccggccgccgccgcggccgcctctcccgcccccgacgcgccccgccgccttgctccccaagcgaacctgcctctacttcgctgtgcgtggcctccacgccgcccaaatgtcgtacccccgtcctccccctgggccctcgatgtgccgctgcatgccctccgtcgctgccgctgcgacaagtttggcctcctctggaagctcccttttgcccgtgcgccgtcccgtgtagccctgatggatgcggcctcgcctttgcagccccattcgccacgcgctccgttgccgcagcccccgcccgcgccgtccaggaggtactgcatgcacttctcggcgtccggcttaatctaggcgtagcttaccacttagcttttggcttgcttttttattgtctaattctaggtagctgctggagggtcacgttcggtggtttggctcgagaatatcacgtctggacatggggactggatttacccaaccaagatgatagcctataagcattgaaggactatctaatttctcacttgtgagtcagattgatttcttttatttggacatatcgtctcgccttggccatatttctgtaaaatacaactatctgagctagagttacatctgtgtggacatattgttttcttacaactatctgaagtttagtagctgtctgaagtttagtagttgtctatcttgtttttcagggatctggaattacaggagcctgatggaagcatgaagattttttaggctcctttgctcctggagctggacaagatgggccaagtcatttatattggggctaacgacaaaggtgattcctgaccttgccatctcttaactactttgctgctactgagcacatatacgaactgcatagccaggttcatttatgttaggaataactacatgagttatttctgcccaggttcatctcttacgagactaaatatgcactaaaccttgtgtgccttgtagtatctgtagtatctctcttttaaagatcaataggattccaagatcgactatagtagcaccaggcctccactggcctaatcagtctctgacttagcttgtattctacctcacatttcattgcatgtctctacaccctaaggtcctaaccactatttttttccacttgcaggt

SEQ ID NO: 869 - DNA, 10056 bp, Zea mays
  Intron number 8 from transcript GRMZM2G019673_T01 (locus G RMZM2G019673) derived from phytozome v7.0 (chr-ID 1; pos 1 32845455 to 132855510)
ctgcagagctgttgccaatagtctttataaaagaggtaccttttttttcttaaagtaaatgtgcataaggacatgttttagttttttgttttgctcggttctgcgtttgatgataattttatcttgattcgtgctgtgggagcaagtggaggtattatagtcgcttggaaagataaattggcaggggggggggggggtgctttcctctcgggttgatacatacaacaccttggtgcaattctcttttttttctcgaatatgcaggagagctgcatataattatatttaagaagaagaaaaacgttgatgaattgaatttgacccagtttgagttattagccctggacagccctatctccgaaatggaagtttggagcactataaagcagctacctagcaacaaggcccccgggcctgatggtttcaccaggatgttttataaaatgtgttggtcaatcattaaaggagacattttggcagctattgcaacagtatggagaagagatttcagaaatttccgctcactcaattcagccttcatcacgctgctgcccaaaaaagcgattgctgaggcaccatctgattttaggcctataagccttatccacaactttgctaaactaatcacaaagattatggctaataggttatgtggtcacttaaaccagctagtgtcaaagaatcagagtgcctttcatcaaggggaggttcattcaggataattttatgatggtgcaacaaactgctcgcttcttacatgcccaaaaacaatccggtattcttctcaaattggatatcacgaaggcctttgacacaatttcttggccctttctttttgaggtgatggagaagctgggatttggtagtatttggagagatgtggttagtggcctcatttctacttcatctacccaaatattgctcaattgaagtctaggggaattcattaaccatcgcaggggtcttcgtcaggggggatcccctttccccaatgcttttcatcattgttatggatgtcctgaatttgctaatctctagggcagccgatgtgggtctcttgcagccgcccgcttccaggcctattcatcaccgcctattcatcaccgcctttccttgtatgcagatgatgtggtccttttcatcaaacctatcgccagggagattgattcggtgcttgatttactatggctatttggtgaggcctcaggtctcaaagctaatatccaaaaatccaacttggtgcccatccaatgcacacctggggagctggagacaattcaggaactcctgccgtgtaaaaaaatggagagatttcccatcaaatatcttggactcccattggcgattaaacaactcactaggaccagttgcagcctttaattgataaggttgcagaccttcttacgggttggaaatctgagctgatgaagtgcggttcatgtgcaatttgttatcacatccacagtcatttatcataccatggcccttgatttgcctaattggtttattaaggcaattgataagattataagaagctatatgtggagagggagaaaagagaccagagcagggcattggatgatatcttggcccaagattaccaggccaaaagaacttggtggtctaggtatttctgatctgcaggggctgaactgggctctaaggacgtgatggttatggctacagaaaactgaacctacaagaccttgggcctcgttccagctgcagtcttgtaaggtggtgagaggcattgttaacatggcagtgacgactaagattggagatgggagtagcaccctgttctggaaaaacagatggctgttcggacagcgcattaaagaacttgctcccgtcattttcagcatggttccgaagagaactacaaaccggagaacagttgtggaagctttgacaaacaagagatggatccaggatattcatggagtggtttcctggcaagtgctgcaagaattctatgtttgttgggaggccttggaaggggtgcagctgttgccaggaacaccagacaagcatctctgattctctggtgactctccacctctgggcaatactctgttaaatcagcttatgaggcaatcatgcaaggttcaataatctttgagccttgggagagaatatggaacacctgggctccaccaaaatgtgttttcttcatatggcttgtggctcacaacagatgttggacagctgataagctccaaaggagaagcttgccccaccatgaggtttgtgtcccgtgtgaccaggttcctgaaactctagaccatctccttgtctctttcgtcttttcaatgcaattctggttcttttccttagccggattggcctggctgtcctcgccccacagcttgatgaaatctcttttctagattggtggaggaaggcttcttcctctattcctttactcatgcaaaaaggtctcaactctattgttatctgtcacacccggttttgaaggtaaaccgaatacgaaccatgtacgtgccaggatcagaaattcacgtacacaacgattacataaatgactcatcgtagcacaatgcttcgaataacaataaagaataagtaataatattagactagagtcatttacataatataaattaaagtacacagaatcgaaatgtagccaacgtaaataaactcaccacaagcagctgactgggggaggtcgctagcctaatccttgaattcgtcgaagtcctggaactcctgtagatccgcctcgacactttcttcttctttacctgagcatagatatcgcgcgcagacagagcgtgatacgcaaaaagcggcgcgctaaacaagtgaatgacgcgtgacgatgcacgacactgctgaacagcgtgcggagggcacacgaaacaacgcatgcgacagcgcgcgaacgacgtgcgcgaacagcacgacaacgagcacatcacgcgcgaacagcgcaacgacatgtaaacaacgcgcgaatgacacgcgaaataacgcccgaacagcgtgcgcgatagcactcgcgatacgcgagaatcactaacaaatatcgcgtttattataaacgagtattaatttagaacatgcgagttggcattaatcacattactatatatttataaaaaatgcaaataaaactataaaattagttttatttaaattgtgattctaataaatatcggatgaacaaataattaactaattaattaaaatttgcgtcgagacaaaataatgttactaatatattgacgacgttattattaagctaacgatatgaaatgaatcgaaactgaatcgtaacatagaatatattgaataactaatagctcacaaattaattacgaagtggtgcaacatgattggtcggagataagtcacatgaagggccacggagtttgcaggcataggagatcatcatgaggcagttttgtattggctcgacacatgcagggaatcatgcgtgcaggagggtacatgcacatgcatgtgtgggggcccaagtggtcttcctcaaacgcacgccaagggagtgagggaaaaacgccatgcatgagggtcccaccggtggcagtttctcctctgccttcaagctctgacgcacgcaaacaacaggggagaaggaaagggagatcatgcgcgtgggggctaggaagctgcctgtgtgacagtgcaggctcgcagactcggctggccacggcaagggagcagggcacgcacgtcggcgaggaagcgagcagcgcgtgccatgggagaggtcggccgccgctgcaggacgacaagggtacaggggtggggcgacatcggcgggaggagggccagcaggctggccacgccaggcctctgaccgcgcctgctggccgcgcggggggcacgaaggggctagggacgagaagtggcagggggccatggtgatgctgcaaggcgccggatgtggcgcacaactgaaggcgggcggtgtcgtaagcggcgcgactcgttgggcacgcggcgctcggtggtgaggcaggcgtgcaggggcgcggcagagggcctgctgaccgctggcaaggggagggagtggctggccgcgcttgccagcgcaggggcgagcggctcgggcttggtcgcgacagcgcgcacgtcggccgtgcctggccatgcgcaaggggttgtggcaacgatggggaagaaggctggggaagagagagaaggggatttctcagctgaactgacagagctccggtgacggcgcagtgcaggggaggaagggcgccaggtgtgagggagatggagtgctactgcgttatgggaacaagggggaaaagggagagagtcgtgtgtgctacgcgaaactgcatagaacttgaccctttttgtgggcgaatgggcaaccgcggtgttggggtgaggagaaaagtggggccgaggtggtttccgtttttgacgtgggttcgaacccagccggtcgagcggagggaagtttggaaatcaaaccaagacagagaaaaccatcgcgacatatgagtctgcacgataaaaaaatatgaagataatgatagatggaaccaaggcgacgatctgagaagatgaaactgacatgctggcgtgggatgacagcaagaaaaacgagtgatggggaacaggcggttgcacgcacagcgtgaggaacattgtacgacgaggagagaaaagaggatagacggggtagacaaaggggtagacgagggatagcagatgcgagcgacatgtcgttcgcgagaagcggttcgacgatctcacgaaaagggcatgagatcaagaacgggtcgacgaaaggaagatatatatacacacacatatacatattattgaattttcagaatattttagttttcacagatattaaatgttagggattaaaaataatatctgaaatatcttaaattcatatttaatactaaaaaaacgttttaaaggttcctgaaaatttccggaaacctaaacaagataattcgatatagtttgaaaacctttgtactgataaacactatgcaacgacatgaatgcaacaatcaaagcttctctaagattttattttactacgctaaaaacatatatattatatatataataaaattattgtccattatttagaaaaagagaagaaaagcaagtaaagaagagggtaacatctgaatttggtggatatcagaaaagaaattttaaccctcaaattcagggtgttacattatcctgggagcctggacatggtggagacatagaaatgtttgcttattcgaaggcaccccctcggcttgctgctgacttatctatgtttgagagtgatctttggtactgggatagggcaggagctaaggatattcagctcctggaggctacttctgacctagtccgagccttcatgtttttaggaggtcgtctattaggtcgtttgttcgtgattacgtagctagatctggttgtaaggtgtgagtgtggtcctttcttgtactcttgttttgctatcttcttctattaatgaaatgatacacagccctcgtgtattcgagaaaaaagttcaagtaaaactacttaaaacatattcctctaagaacgctgcctctcattatgagagggggtggcatgcccgaagtgatcatagtatggatgtcaaagttgttttctttgacacatcgaaatcattttcttcgttatgctcggtcagaaacttgcaaaggcttatccatttatttgctgacggattggatgtttaccttttgtgggtccatataaagccaatttgtaaatattaaaatttttaaaagtttcatgacactactagcaatgttcactttgtttagtgacatccattgctcaggtgacgaaggcccaggctggtctacttcatggaaaatggtcctatgggctcgccttcacaacagtgaccatgcatacaaaatgatactgcagctaatcactttggtggatccagaacatgaggtttcaagagaaggaggcctatacagcaatctgttcactgcacatccacctttccaaattgatgcaaattttgggtaaacatcattaaacttgaatctggtttatacagcatagcgtaatagtcctgtttggcattgcggtagtttatagatcgaattaaagtggtttgatatttatttacactaaactattaccataatgaattaagtctaaatgctctgtgaaataaattttaaagatctagataagctcttttgattaagctacacaaatctgcatgtttatttaaaataagagagtttggacattacaaaatactaggcaaaggggagagtgaagttgtggcttaggcatttcgctcatgggttcatacgctttttcctcaaatacgcacgagagcccatacaacaccacatatacagaacactcacaaaaagtggcttgccaataactacaaacaacaaacaaacctcttttttccctcgaacacgcagcagagccgtgcatcattattttttctcgaaaacaaaggagtgttgcgcgtcattaaattgagaagaaagagtttgaagtcctagaggacagatacatcataagacctcgctacggcggccaccaacaagcatacatgaacacatccatgactaaatgcgggaactacaactacatcggccttttagaagccaccaaaccgtgatcaaacttgacctaattattagctgacagaaggtaataaaccccacgggtaggaggggcccgatctttcaatgagagatgatggaggtggaaattttgttggagccgactaccacaaacaagatggtgtggcgtcttgagcgacaagtacagtgtctcctgataactacgatttggagtgtaggtcgacgttgtgctatccgactacaacaaccacaagggtgctgcgccttagcgatatttacatcggctcctgttgttgctgctctaccgtgcctagaacagccttgaacctgcaagcaatcgagaacaaacaagaacaagataacaagaagacacagatctgatgaagttggggtcctgtttcaagtaaccgggtggtttagctgtcacacacgtttacaaggaagtagcaaaggctaaacttatagcaaacaaaacccaagttctttggtgactgctagttgcttaaatagaggtatagaaataaggagttctggtggagtaacgagtctctcttcgcattttctggacgcctcagttggtatctctcattgattcttgatctaccagaaagaagacgaagagatcttttgaacaagtacttatttgcattaaacaagcttgggagttgaaagatatgctccatttaatctggtgcatgttgcagttacgaaattgacttgagtataggaggagttcactcggtagttcctaaacacttagtgtgtgatctctcgttgatttttaatccactagaaagtagatgaagagacctttccaacaagtgcttatttgttttaaacaaccatgggagttgaaagatatgccctcttaaacatgcacttgccgcagttacaaaatcatctcgggtgcaactgcttttattgccttgttgccttctccactccaagatggttcacctcccaaacacctgaccataataaattcgtagcaaggctttaatacctcatttaaagaagaattagcttcagaattagcttcaacagcaaataaagagttcacctgataattaagtttacgtgcacggacttgtgtcattggtccttgattagctacgaatggtgaagtgatcactagtgtggttatatcaattataatgatatcctcatcatcttccctttcttgcaacaaagtcatcctcgactcaaacatgtctttctctcccaagtatggtgttaaatctgcaatattaaaagaggatctgaccgcaaaatctgtaggcaactcaactttatatgcattatcattaattttgtgaagcactttgaatggtccagcagctcttggttgtaatttatatttatgcatatcagagaatctatctttccttaaatgcacccatactaaatcaccaggttcaaaggtaatatgttttctacctgttggtcacttgttctcaaatgctgtgaattaaaaataaggcaacacaattgttaaagattaaggaccttcgtcctccgaagcattatctactttcggatataatgatcttcacacgaaggtcatgaaggtcacacattcatcacttatgatgttcatggagataatagatgttatttattcattcatcccttcatatatttatttcataatacatatacataaacattaacagattttgtattacattgataccttcggtttgattgaagatgttgacgcgaaaacaattacaatctagcgtgaatagtacgggggtactgttcacctatttataggcacgggacgtagcccgagtaaaaatacatttatgattttaacatatagctataatcagatacagagcgttgtcttcttgctctcttaggagttaactgaaaaagattagaggccagctctctcattgtgctaccatgcacctaccggccagtccagaatttagtatcatcaccatttcaaactctgtttccacagccatatgaaagaaaccttgggcactacggggtacctgaatgggcccttcccaaagcatcagttttttttgtagccaaagccattagatgcgtaaggctcatcccattatttcgaggttgagaaccccctgccaccaaactgcaacggcctttgaactttcttccaagagacgaggcgattacctccattagcgttatgacgacctgcccaaaggaatccacgtcgaattttatcaattgctttgatcacaccaccctcacaaaaatgagatacataataacttgttatctttaactaactacataatgccttctcagatttcactgcagaatccaacatgaggtattgaacatctaatgaaacagactcctatcagatattttctctatctccacactttttgaactgatctaatcttcctggagacgatccagtccttatcgattgtcatcagatgagtaattgtagaagtattagaataagcattgttaacagtaacagtgaatacactactaatgccctaccccaacatacactattcaatcttctctccaacaactttagagaagctacatatgaactaatattgaatatggaaggtaggaaacagatactacctccgtcccaaaataaatgactttgtaggattcaaaatttgtcccaaaatacttgacctcataccatatcaatgcacctttctttcactacacgtttctcttttcccaatacatatctatctctttcggtttctgtgcacaaaatctttttcattcctaaaaaattcccatgcctagacctctaagaatatctccagcaacttacccatctccacctccatattcaaactccactctgcaaacagtacaaaacagtgttttgtatgaacatatgggtgaactgctagacacggtctaaaatcatctattttaggatggtgggagtatttcaaatcaccctataccaatgctactggacacgcggaatgaagcagacttcgaattccaggggaaaaaactagtaatagtctaaggtcccgtttgtttcctttcattttgaggaattgaaatcttactaatggaataggctatttttttagattgtgacatttcaccactttccaaagttatcatataagactatctcaaattcatggagtgagagatgataattgattctatagatttacatactatttttctgatgtacaacttatagcacactcttctatttgcttcgctataatataaatatagtatataactatccctctcatataatttaggataatatataaatatattacatatataaatatatcaacttaattagttttgtctaaattataattattaaaatggaattcaattctaacgaaacaaacggggtctaactgttatttagagggccacgttctgcttgtcctaatggttctcttacaggttcccagctgcgttgtcggaa

SEQ ID NO: 870 - DNA, 9099 bp, Zea mays
  Intron number 2 from transcript GRMZM2G031625_T01 (locus G RMZM2G031625) derived from phytozome v7.0 (chr-ID 2; pos 5 116877 to 5125975 reverse strand)
agttgcgatcggtggcgcggtcggcggagccgtcggtaactttcctgtttcctccctaaacccctaaaccctagacttgcagcatccatccatctgtgcgagctgcttcgcccatgggtgtgaatttttgatgtggattagtgtgcgatttcagggatcttctggagctagctactactgatccctggtatgtctggttagctggcggctatagatgtaataaccatatggcctttgttaagagttcgtgcttaggtagcatcttctgccttctggttctggaggtggaacatatcaatgctctagttggagtttattttcccaattgcttgtgctcttagagctgttgccgatttggtgtactgtgatttggttagtttccagctagtggtgaggacttgggatgaaacatgcatgattttctatttgcttttgatttgactgaatgcttgactcttctagtgtcaaaaagcttgttcaatgccactttggaatgtaccaatcagtagattcaaattttggtttcaattcctgatttggactccattgtaacagaaagatgacaacatatggaattgtctgtatgttgaattactggtatttgctgtcagaaagttatccttccgtttagtggttttgtatctagcttgtggagagaatactgaccacaaggacttgaatagttggatattatagtagcaaagacaccaaggtaccctagaaaatattgctaggggatcaagagcttaatacacaacgattttttatagagttttaggccgcagtgtgcgtaataccctatgtatttttgctgaacttggattattgtatatagatgctgtacaatgttacaagctccaacccaataagccacgacaccttgttaaggagggagatgagacaaactagattaactcaaactgttgcagccttggccgggttgaattgaactcctttggtttgggtttggtggaactaggtgtgacatctttggtgtgatcaaactttctgggcctaaattgaatgctgctctactactcctttcatagtccaaaggagcggtagttttacatgtatataccacatgtggtccctatatatcacaaggccaactctccatgtcctgtcttgtggctgtgatcatatgtcctgcaacaggcatgcaccggtgtaatcattcctgtgagacgagtagctgcgggtctgcctactgtgtattaatagttcctagtatggttcctcgtacgctttatcacaatttagaacccctgtattgctagtgacgactataacggttctcccaatcctgcagcaggcaagatcacctgtgcagatacattcgtaaatactaaagtatgtttgagcagcagcctcgggtacacttgccccctgtgtgcatgtcagggcgaaggtgtgcccgtaatgttgtgctggcatttaacgcgagctctgttgtagttatctcttctcaaggtgactgtcacaccggctgctggggtaggtatgataattgataacttacgcctatggataccaagacctgggctaagctgtcccggggcaattggttgtcggtaaagtctcttgtagtttattatattgcagctattgctcggtacaccatgcgtgcccttgtgtggttacaggaccgatgcgtgcaccatgtagcgacctcaagtgcactacagtctatgttgcttgtctgcatgctgagtcagtcccattatgtcacatatcgtgcatttgatatgttgtactcgagacttatccattaagctattgccatggatagttttctgggcatttaggtgcggggcccatgactcgtgccgttctaccaccggttggcccgccacatccattagccccgagatagggctagtatgtctgagatgaccacaccttggccgtaggtggtagggatgcgaggttgggggtcatggcctgtagatgtagacgcggcaacgctgaactggagacaccgtgctagcgcacggcgactggctaggatgtgggaacgtgagaggtaaggagataatccttagagtaattctcctctgaactttgttcaatcatctcctatgcattatatagcacagacaccctaatacatcatctaatttgactccaacaacctaacaaccttttgacttaatctatctagctcatctcctattttgactctctgctaacaaaccctcaccctatctggccagcggctaggactcagtgtccaactcgccctggccttcttacatagctggttgggccttgggccttctagtatagcggtcataacatctctctgctcctcgacgaacagctcgtcctcgagttggtgatctaggtaggatttctggaattgcagaagaggttcccaggttgcttcagcttctgatgacccttcccagtgaacaagaacatgccatattcccctccgaagccgagcacgtaagatctgtactggacgaggatgcgatctgccattctccatttgaggcaagggtgctggcgctattggtggggtcccaaagaatggtcttaagaggcccacatgaaagacattatggattcgagcttctgctggtagttggagcctgtatgccacagtgccgatcctctccttgacttgcaagggtcccgggcagcgagtatcaagcttcccttttggtcgttccaccaatgatagagcctggcgattgaggagtctgagccacacctagtcgccaactttgaactcgaggtcgcggtgctttgcattgtagaaccttcggccgtgctcttgtgcctgatgaagcctgccacgtacctctgataagaactgatcacgttcctgcagcatgctatcaaccttagttgtagtggatgacccattctggtatggtagcagcggtggagggtccctgccatacactactcggaatggagtggtacacagggatgagtggaaggctgtgttgtagcagtattcgtcccaagggagccaatcaacccaagctcgcagacgatccccagtgatgtacctcaaatacattgctatgactttgttcatgacttctgactagccgtctgtctgggggtggaatgttgtgctcattcagagttttacccctgccattttaaaaggatcacgccacacgtttcctgtgaagactgggtcacgatcactgatgatggaactgggaaacccatgtaggcagacaatgccttcgaagaatgaacgagcaactgatgtagctgtataatgatggccaagggtgatgaaatgcacatatttggagaatctatccaccactgttaagatcattgatttgtcatggacttttggaagacctccaatgaagtccatcgatatatccgtccatacctgtgatgggacgtccaatggctgtagaagcccggacgagtgaagtgccactgtcttgttttgctggcaggctgtgcaagctcgcacccagtcacgcactaaggccttgtccttgggtacaaagaaatctgctcggagtctgtgtaatgtcttctgaatgcctccatgaccggctgtgagtgctaactggagaattaggggaatcaaggatgaggtagtaggcacaaagacccgatgcccgtggtggatcaggccatcagtaatgttccatgggctgcccagtttaccagacctaatctgctcctgcatactttgccattcactgtcctgaggacacttcttgcgcaggtcattgtacagctggaatgacgggcttgagattgctgttgatcccagaacttcggcctcttgtcaggacaaagcatcggctactgtgttgaaccagcctgcacggtattcaactgtaaaatcatagccaaaaagtttgttgatccattggtgttggggaattgttgcgaggcactggtccagcatgaacttaagactgaagtggtctgtcctgatgatgaactgtcttccccataggtatggtctctactttctagtgccgaacagcttggatgaggccaattagcttgcgctcatatgctgcgagctcgacatggcgtgctgcaaatgtccagctaaaaattgccagaggtccggcttcctggtgctggacagctccaaacccggtccctgaggcatcgcagccgacgacgaacgactgttcaaagtttgggagctgcagaacaggagctgtggagagggctgttttaagtgcctgtaatgcttgctcagagtcctcaatccactgaaaggagtccttttgagcagtttggtgagaggagctgcaatcaatccaaaatccttgatgaatttgcggtaataatcggctagacccagaaatccccggaggcctcaggcagctcgaggagctgaacaggaggtgattgcctcgaccttactgttatccgtggttactccttgtgctgatatgacatggcctaaataagcaatggaatctgtcccaaactaacacttggactgtttggcaaagaggtgattagtttgtagggattgtaggactgctttgacatgttgtaggtgctcagaccatggtgcactataaatgaggatgtcatcaaagaaaaccaggacacactttctcaagaatggatgaaggacctcattcatcaaactctggaaggttgctggtgcgtttgtaagtacaaacggcatgaccaagaactcaaagtgaccatgatgagtgtgaaatgatgtttctgaatgtcatcaggatgtacccggacttggtgatatccggatcacaaatccagtttggtgaagacatgggcaccgtgtagctcgtcaaggagttcttccacaatggtattgggtacttatctttcactgtttgttcattcaagggccgataatgaatacaaaagtgccatgatttgtcctgcttccttaccaatagtaccggtgctaaaaaagccaaagtgctgggtctaatgattccttgcgctaacatggatacacactgcacttcgagctcatccttttgcaactgcgggtagtgatatgggcgtactcctaccggtgcgactcctggcttcatgtgtattctgtggtcacagtggcgagctgggggaagatcgcgtggttcctcgaatattcctgcaaactgctgcagcaggcggtccattaacggagtcgggtctgcgagagcagcccgagctgctgccctcatcagaatgtcgctgcgggtggatccccatcccttccatagaatgcatttgctgtggcgctagaatgccatgcatagatcatccaagtcccatagaattggacccaaagtgcggaggaagtcgacacacaaaatcacatcaaggctgtcgaggggaatggcaaaagttttcaaactgaattcctgtgatgcaaaccgaaagttgaggcaattggcaatccccttgcaagcaactttatctccattggccactgctacggtgagacccgaacatgggcggaactccagtccaaggcactctgctatcttttgattgatgaaggtgtgtgtagatcctgtatccaataatgccacgagttcactgccctggatgatgacttggagctgcatagtgtcctcggtgcggatcccagtgatgacatgcaaggatataaccggttctggctctgttgtggctgtttcctctggtactctcctgtcgctgtcctcatccatgacttcaggtagaaaagtctagagcagcagtgtccccggacgtactgctcatcacaattgtagcataatccttgacgacgtcgttccttgacgacgtcgttctgccatctctgaaggtgtgagacgtttgaatgagcgcgtcgactgtgtggtgcatcccgtctggactgctgtaactggtggtgcggatgatgatgggtttggtgtggctgttcgggctggtggtctagtgctgcgtacttttgctggctgtggaagggtatccaaagtttgtgatcgtcgctcataagccctcaccaacttaagggcttgatgaagatctagggcccctatgagctcgacgtcgaatgcgatctggtaaccttgctgtgaatagctgtacttgctgccgacaataatggctccacgtgacccaacaatgcgcagaaccgttcttgatactccactgtggtgcggaactgcagacgtgccagttcgcccagcggattctgtcggaggggtgggccgaaacgctcgttgcagagttcccggaagcgctcccatgacatgttggcgttatcacgttccaccatgtcataccaggttcaggcaacaccaatcaggtgataggatgctagccacactttgtctccttccagagttcgctggtcgcggaagaacctgacgcagtgattcagccatcccagtgggtcacctttgccgtcataggttgggaattccaacttgtagtagtgaggaatgccactggcggtggcggaaccctctgggtggccagatgggtttgccaacgaggagggtaatgatggctggaaggaatgcagcgatggtggaattgctggtatgggtgatggggaaggagggaatggtatttgatgtatgggaaagcgcggtgtggtggaggtggatggcaatgggagcatgttctgcatggtggccgccgggaggccgccttatccgggcaggccatgtgggaagtctggcggattggtggggaaggggtggagatggtggggcgtgattcaatgtcggtaacatgtgtggacagatcagagaatttggtggctaggtcggtgacgatcttgaggacgtggtcgagtttctgatcggatcccgtgatgttggtagcgacggaggttgctgtcgcgtcgccgtccatggatcatggcatatccgataccagattgagatggctacgccttggccggaggtggtagggatgcgaagttgggggtcgcggcctgtagacgcggcggcggcggcggactggagacgacatgctggcgcacgacggctggctgggacgtgggaacgtgagaggcgaggagatgatcctttcttagatcagttctcctctgaactttattcaatcatctcctgtgcattatatagcatagacaccctaatacatcatctaatttgactccaactacctaacaacgttttgacttaatctatctagctcatctcctattttgactctttgctaacaaaccctcatcctatccggccgtcggctaggactcagtgtccagctcgccctagccttattctatagccggttgggccttgggccttatagtatagactttgccggtcataacaatgtcatccagtccttgattcctctggagggtccttgagccctaggggtatataccatcaggtgaaccatgatgtgaggtgccctaggggcttattttgttagttgctcctgggctcgagggacctgagagcttacaccatcttgtgccacagggcgcgaggggcccgggccttacactttcacgcgaggggcccgggccttacactttcaggtgtcccaggacacgagggatccttggggcttatactgtcaggtgcccgggaggccgggacgcaaggggcctcaagggcttataccataaggtggcccaggacgtgaagggccttgggagcttgtatcgttaggcgccccagggcgcgatactgtcacgtgttccagggcacgagggcctccgggggcttatgcctgtatgccatggtatatggtcctgaaaacttagtttagaatgcatccttgtataaacttactttgagagttgtggcccttcattgaccggggcggccataggccccaggagcagtgtcccctcgtctggggacttggaagtcagtcacctgcctaaggatctttgagtgtgtcttggcagcagcctgtggtaatgccttttctcgggcgctgacagatatggtcgtgtgttaggctaccagtctggctttcttaccttggtagtcactacttttgtgtttttgtaagttagaaaagatgcgcctgtgggaagttacttttagggctagtttgggaactccatttttccaagagattcctattttcctaaggaaaaatgaactaatttcgcttgaaaaaatggaaatcccttgggaaaatggggagtttgggaaccctaatttttctaaggtcatgtttgtttcctttcattttgaggaattggaataggctatttttttagaatgtggcattccaccactttctaaagttatcatataagcctatatcaaattcatgggatgagagatgtaaattgattctatagatttacatgttatttttccgatgtacaacttatagcatactcttctacttgcttcactataccataaatatagtatataactatctctctcaaatgatttaggataatatacaaatatattacatatataaatatatgaacttaattagttttgtctaaattataattattaaaatggaattcaattccaacgaaacaaacgggcctaagggttttttattttcccaagggaaatcagttcattttcccttgggaaattgaaaatcttatgggaaaatagggtcgccaaactagcccttcttaatggtatttttacgggaccggggcttaaaggatgtacctagcatgcttggctggcttcttttgtgcattactcttatataatcgttctttcaagatgtagctcaaacatagttgcttatattcccttcgcccactagaagatgtttaaggcagcctaattagcattcatgcactgtattctgtcctaaatttcatccttgtatgagtagagtgagttggtagttctcaaagggctcttttgcccacgtgcttcctaggatatgaatatcacagtaataaaatggtatattttccttctttctgctgccatagcatgagttccaagttactaagggtgtatttggttgcgggacagccaggacaacgacgtccctggcgttctctctcgtccctccaattttgagggataactggggacaacactgagagagtcctgtctcaatcattgaccctgaaccaaacaaccttatttgagtgatcgtcccgtcttgtcattgcaaccaaacacatcctaatttgcatgttttttccctctgcaggtgcttgtt

SEQ ID NO: 871 - DNA, 59564 bp, Zea mays
  Intron number 9 from transcript GRMZM2G035767_T01 (locus G RMZM2G035767) derived from phytozome v7.0 (chr-ID 7; pos 2 7038640 to 27098203)
aggacggtcttctcgtggtggctggacactggacagtcagtgtctcttactttgttgccctagccgtacaatcgtctgcaacatgcacaatctctactacttcttaagaatagagtgcaggcgtccacggtggttttctatgtttctcatttcactcgctgcattttcagttacaactacactgcatatgctggcagatttgtttatatattactcctgctgacattttcactatcgcagcagcatctctactactatttgtttttttgcatataaatgtatttatcatattgattccgtagcaacgcacgggtatattcctagtaaagcacataggaagcaattaaagacttatcctctaaaaatattttttcactaaaacaaagttctccttatttggaaaagcaatattcccttagggctagtttgggaaccctattttggaaacaagacataattgaatagactaactcccccaacccctaaaattatgcatatgtaaatgatagaggatattctaatgatatcaaatgaagcattcaacaacatatgcatatatggcaacatgaggagcccaagataaaaaatgacatgggtcattcaaatgttggagaagacatgtaaatgataccaatcgaaagatttggaattcttgtagtggaagcatgttgctgtgacggaacctcccaagtcattatgccgtgtccttgtccaacggacctcagacaaccctgcaggtgcccctgaatcacttgacaagtttggtatctgctttctttacctttcccaagagtgtttcacccgtcacgcagacatcacaagcatctgaggtacgaaaatgcggaagcaattacaataacttaccgtatattaaaagtaaggagttataatattacagaccagaaacaaatataggagtgctgaatattattattacatcactttgggaggcaaaaacccttcccgaataaacagtaaaagttttcttaacggaggacctttcctcccgcagcttcagtcttgattctcttcttttggtaccacctttgaacagaagcaacaaaagttggctgcttcttcacctaaaaacaacatgggacaaagccctgagtacgaagtgtactttcgcaagatttacccgacaaagtaaaagattctcaaggatatgctggctttaagggagtcaaggtaaggtttatcaataatcaatgacgttgtttgcataaatgtttactaatagtggatccttaaaattccagttttatttgtcaggttaagtaaaattacctgcatctagagttctttctaccctagttcaatcacttaacctgcactagccaatttcttaatcacccttcatcttcactggagttctacgtatagggcagtgatcaagtcttcataaccgcgaagttatggcgatccgaatcgattatactcagctgaggatctccaatcacacgacatatgtagcacttaacccttgcatatgtcaacttgccatcggggttcttaagaccagatcaggttcacgccaaccgagagcacagatacaccaccgtccagcctcttgccacggagggtacactctactctcgccatctctccactcccattgtgtgttatcttattctggtattagtctgcccgaggcaaagcttacccatgacgaggcatgtgaccagttaaagggtcctcgatcatcaagcctacatcgacacggtccttaatcgacacagacggagacactacaccgagactctcttctcgtgcaagtcacccgcccggtctcagctttatcatttcaaacccaaagtttggtacctggcagaggtacatctttttcgatgttgaacccatcatgcccatgatggattcatcatcaagttttgtttttgaaaacattccacccattttgccacatcatcttttgagaaaacaaaatgttttgtttttctaaagcaaagctaagcataagaaaaacctcttgtaaaacagggatttagggagaagtaatcaatccaaggaaggaaatgcaggaattggtttagcacacaactcctatcacctagtgcatcaagcaagtgagaaagattttaaagaggaaaaggaggtggcaaatgcaccggggcttgccttgtgttactggtgaatcaggctctgtcccacagatatcaaaatagaaacagttgcctgcctgatgttcctcaggtggtggtggtgatgaagtccttgtctcttcgacttctacttcctcctcgttttctaaatatagccaagtataacaatgaatgcccatgtagtgctcatgaagatgcaaagacaataaaagtttattatctaaggtcttgaatacaactttccttcacggatctccgagaacttagggttttcggagtcaatagtgaagttcaaagggtagggggtaggggtttgggttctaagtatcaaataaggtccaaatcatatccaactttgcccaaagcctctaaatattatatagagtttatcctaaaagtttagtgaattttggatttattatttattctctaaaaatccagaaacaaggtttttgactattttaaatactctataattttctatttggactaaaaatcatgaaactatttttaataaatactataagaaattagaacctagcacaattggtttggtatttttatcatttttctacaatttcttatagatttccaaagtctggcagaaaaaggaaaagaaaacaatgaatagtcccgggccgaaaccagcccgagccggcccaattagggcagaacgcgcccacgcgcgcccgtgcgcgcccgcgtgcaactttgcaccgaagaccctgtcttattgaataacctaaagtggggtcacagcactattcaactaagtcactgacacttgcgaaaaggttcctgcacttctttctcttcacagtccagagtccccgacggtgagcggtgctacgcagtgctccgacgagctcgtgtaccgaccgattcactcaatgactggcgctctactttggcagagaccgaatccaagccctaaccactgtttccccccaactaatttcacgaacggcgatctaacctactctgtccacggtgacagcgggtgttgcggacaactgaacgcgttcctgacgatctatggagtcttagtttaattgaccgggtcgagaagcaccacaagcacatagggatgctaaaacaagaacaaggaggacgtgatcggacctgtgacgggctgaccgcggcgagctcacacacgcggtgttcttgaccaatttgggggaaatcttaaattgaggcgctctggtggacgatctgaggcacgggttgcttcactgggtgcgcaattacctagcggagcggacgggggcggcaatttatagcctttgggggcggtggtgctcaatttcacgaagatgtgctggcgaccggaggggaagaaagttactggcgcaagagctcagtggcatctaccgtggcgacctcaccggcggcgaacttatgcttcagggcggttcctaatgacgcaccgcgacgtggtatagcttcgaggcacgtagcttggccggataacggtgaacgccggtgatgccagcgcggcttaccatggcgagacacgacgctggtaaaaacagtggtcggagtttatctccaacgcaatgctttataccgaggagtgcttatccgagctcggtcgaacgtgaatcgtgacgctggcgcgaatctgggcgcaaaggtcaccggcggcgaggttcactgaacctgacccgatcaggtgactgtaccatgggaatcatcttcagagtgcctgacagaacatattcaaggcagattttctccaagttttgcatgacaacttcatcatccttctgcaccaaagttgtagacctataaaccatcttcacctttgctatagcatcactagtcagattcctactggatcatgcttagaattgagctctaagttcttgcaatcccactgttagtctgacttcagactttaagtagtctgacagcacgactttgggcacatttttctccacatttttcataacaacaatgtttaatcccttatacaaagttgttctcctaacatagctctatagatttgatgtggtgaccctaggcaaattctctatatttttggacctacagagccctaaagtcagccctctcttgttgttttcagacttaacttcttgagcacaagagtggcctttttgaaaataagcccaaaacttagggtttaacttgttttgcacttagccccctagggtttaaggctagggctttctggggttctttttaggatttttgacacttctagggtttgaataccatgtatgtctattcatggtgacattatatggttatttcaattgagttttgaagttttctcctgtttaagccttgtttgctttattaagcccaatctagggttgggaccctactctagggttttatccacaaaatgtcatatcaatacaacttatttgaaatttttgcctagtgaatgcactctaggtgtgacaaacacatgatatgccaatgtttatgatgttatgctcaagttttagtgaccgtaacaccaggggtgttacatccttctctccataaaagaatctcgtcccgagattaaaagtcctagggcatgtaatggaaaatgaaatgcttcacacttttatttccttattctttgtacaaggcaggggtggtttggggttcactcctttattacaacaattgtatactttacaaattacatgaggctaaaaagcctgggaaattcttttctaaaaagtcccgagtttcccatgtagcctcgtcttctgaatgctggttccactgtatcttgtaaaacttgagagttttccttcgggtaattctatccttttgatccaagacttgaataaggtgttcttaatatgtcaagtttggttctaaggaaacatccgttacttcaatggttcgatcgggaacccgaagacacttcttcaattgagacacgtggaacacattatgtacaacagacaatgttttgggtaactggagtcggtacgccactggtccacattgctcaagaatagggaaaggaccaatgtaccggggtgcaagcttcccctttaccccgaaatatgatacacccttcatcggggagattttcaaatagacataatccccaactagaaagtacaagggtgtccgtcgttggtctgcgtaactcttctaacgagcttgagctttcttcaaatgatgaattattcgccaaactttctcttcagtctcctttaccatatctggcctgaagaaactcctttcacctggttcagaccagttcaacggagtacgatactatcggccatacaaagcttcgaagggtgccatcttaatgctttcttaatagctattattgtatgagaactccgctaatggtaaataatcatcccatttctgtgggaattccagaacacatgctcgcaacatgtcttcaagtatctgatttaccctctcagtttgcccactggtttgaggatgataggccgaactatggagcaatttagtacccaaggatttatgaagttcttcccagaatttggatacaaattggggtccacgatccgacactatggtctttggaacaccgtgcaaactgagaatacgagcaatgtacagttctgcatatgcaattactggatattttactttgactggaaggaagtgggcgatctttgtaagtcgatcaatgataacccaaatggagtcaaagccttttgctgttctgggcaatcccacaacaaagtctatgctaatatcttcccatttccatgttggtataggtagagattgtaatggaccaatagctttcaagtgtatggccttgacacgtctacaagtgtcacattttgccacatagcgtgcgatttcaattttcatctttgtccaccagtaatgttgttttagatcatgatacatcttagtgcttccgggatgaatagaatagcgactaagatgtgcttcatccaaaatttgctgacggatttcttcattcttaggcacaactatgcggttgttaaaccatacaataccttgatcatcttttctgaagcaattggcttttccggcctctattttctcatggatgtgcttcataccctcatcatccttttgagcatcaattattctttgtagaaggactgactcaagctttagttgatttaaggttccatgttggatcattcccaggtttaacttctccatctcctagcatagtgtaatgttagagatattcatggtaagacaaagacaggaagccttgcggctgagtgcgtctgccactacattggccttgcctgggtgataatgaatttccaattcatagtccttaataatctcgagccatcgcctctgtctcatgtttaattctgactgggtgaatatgtacttcaaacttttatgatctatatagatgtgacagatattccccagtagataatgacgccagatttttagggcatgaaccaccgcagctaactccagatcatgagttggataatgttcctcatgccggtgcaactgccttgaagcataagctatcactcgaccttcttgcattagaacacagccgagaccactgcctgatggtcacaatacacatcaaaggatttttgaatatccggttgagctaataccagagcagtggttaataataccttcaactgttcaaaggcttcattacattttgaagaccaaataaatttaatatcattcttcaataaacttgtgattggtttcacaagcttggaaaaatctagaatgaatcggcggtaataataagccagtccaaggaaacatcgaacttgatgtacagtggttgggggtttccactccaaaatatccttgactttgctgggatccatcgcaatccccttggcagataatacatgtcccagaaattggatttcttccagccagaacgcgcacttactgaacttagcatataattggtgctctcttaagcgcgtcaacacgattcgtaaatactgagcatgctcctcttcattcttggaatatatcaagatatcatcaatgaataccaccacaaacttatccagctcgggcatgaataccgagttcataagataggtgaagtgggcaggagcatttgttagtccgaaagacataaccagatattcaaataaaccataccgcatagtaaatgcggtctttggtatatcttcgggtcggatacggatctgatgatagcccgatctgaggtcaatcttggagaagaccctcgctccagttagttgatcaaatagaatgtcaatccgtggaagagggtacttatttttgatggtaacctcattaaggggtctataatctacgcacatccgaagtgtttgatccttcttcttgacaaagatggctagacatccccatggcgatgagcttggccagatgaatcccttctccagtagatcttgtaattggatcttgagctctgccagttcatttggaggcatttggtacgaccttctagaaataggagccgtaccgggcttcaactcaatcacaaattctacatctctctctggaggcaattcaggcaaatcttctggaaagacgtctgggaactcacatactaccgaaatatcttggatctacggtacgatagcttcatatactctgccaattggtttagctggaatggctacggggatggtcaagagaaccttttcttggccataactcaatctgatagttctcaaattagtgttgagaatagctttatgttgggccaaccaattcatgcccagaattacatctatatcttggcctttcagaacaatcatattagtaggaaagtcccgttcaaccaatgttacgggcacttggaaagccacttctttagtaaatatttgtcccccaggcgaatgaatagtaaacccttcccttgatccagtatatggaatgcaatgtttcttcacaaacttttgcttataaaagtatgcgaagcaccagaatcaaagagaataattgcagggtgattggccactagaaacatacccatcataaccggttcgccttctgatgttgtggccacttgagtataataaatctgccccgttttcctcatattcttgcccgcggtattgtttgccgcatttcccttgacttgagcggaattcccagaactctgctgattacttgatcgattctgcttcgagtatggacagtccttgataaagtgtccggactttccatagttgaagcagccagttgaagagtttgggagggcagggaaacgagtaccaggggcactcggctgatttgttgaagtgagggcagtagcggggcgaatgaagaccggttctttgaaagggtaggagggtggacgtggggaagagcgattcggattaaaaggtcggattaccaacctttgtcttttttcagacccttgactgggcctgtcacctccgtaacactttgattttcccaagcctgcatatttagcttcgactgccagtacagtactgatagcccttccgtaggaaagatcaatgtaggtggccatctttcattgcattcggtcattaaggcctctcatgaagcaatttctcttctttaaatccgtgttgacttgatcgatagcatattaggacaagtggttgaatttgttgagatactgggtgacagtatccccaccctgtttcagcttcataaactcctcctatttcatatggagcactccctcaagaatatagtgctcccggaaagccaacttgaactcatcccaggtaatttgatgaccagccggttgaacggctacaaaatttccccaccaggtactggcagggccacacaatattgttgtgctgcaaataagggcttttgaatctccatgcatcggagaagcccgaacttctgttcgataacgcggatccactcatccacttctagaggatcttctaccttgacaaacaatggggaacgtgtctctgagaaatccagatatgacgtttcatggggtccttcctgataggctcgcccgccttgttgttgtaattgttgacccgccatttcccgcagaaagcagatgttgtcggccgtagtgttaaccaaggcagcgatggcctcagctaacgttggaggtactggtggtgggttcggagttgcttccctcccacgggaggtccctgctccatcctgtgcacgagtcttggaaggtatctgaggcaacaagcatttggaagaatataatatgccaaagaaaaccatccattttacattactaaaaagggtaatgttacagactcgaatttacaacaggattacattactactacttctatactatactactcttacttcttgtcacttctggtagcatcgctgtcgggcgtaggagaccattcatcaaccaacttcatagagggagggggcctaaaaaggtccagttcaccaccgagtgcttctcccactactccagagggtccggctcccattccgataggatccgcaggtacgttagggtgcagttgggaatacaatacatgaacttcttcatgtagtgtattacaatacacttgcaagtggtctatggcggtgctaagctcctccacgcgggctcgagctttagcttccttagcccaagcaagcgaacgagagttaatcgcccagtcgagcgctagatctcgttccgtgagctgatcttgcaggtggcggatgtcggttcttaattcgtttattctttcaccatccgcgacccatatgtcgttcctgcgatggagttctgatcgaagctgatcaacttgggcttccagatccccaattggatcgttgctaccactgctactgtcttcatgccatggggcaagttgatggtgaggtacgccgattggcctggtagacttgcgtgcagtatttctggttcgcggcgacatatctccatgaggggaaaatcttattaacatagtttttagcatgatgcatgtataattatagaatcaaccttagttgattcacaccttctatacattgcactctattatctggtctttcaaataagtactcaaaaggtggttagataaggaagaaagaaattttctagataagtcttggaaaaattctttttgaaaatgcctcataacctctacagagatgggcttcgctccgataccagctgtgacggaacctcccaagtcattaggcccacctacagttgtccttgtccaacggacctcagacaaccctgcaggtgcccctgaatcacttgacaagttcggtatctgctttctttaccttccccaagagcgtttcacccgtcacgtagacatcacaagcttcgaaggtacaaaaatgcggaagcaattacaataacttaccttatattaaaagtaagaaggagttataatattacagaccagaaacaaatatatgagtgctgagtattattattacatcactttgggaggcaaaaacccttcccgaataaacagtaaaagttttcttaacggaggacctttcctcctgcagctttagtcttgattctcttattttggtaccacctttggacagaagcaacaaaagttggctgcttcttcacctaaaacaacatgggacaaagccctgagtacgaagtgtactttcgcaagacttacccgacaaagtaaaagactctcaaggatatgctggctttaagggagtcaaggtaaggtttatcaataatcaatgacgctgtttgcagaaatgcttactaatagtggatccttaaaaatccagttttatttgtcaggttaagtaaaattacctgcatctagagttctttctaccctagttcaatcacttaacctgcactagccaatttcttaatcacccttcatcttcactggagttctacgtatagggcagtgatcaagtcttcataaccgcgaagttatggcgatccgaatcgattatactcagctgaggatctccaatcacacgacatatgtagcacttaacccttgcatatgtcaacttgccatcggggttcttaagaccagatcaggttcacgccaaccgagagcacagatacaccaccgtccagcctcttgccacggagggtacacgctactctctccatctctccactcccattgtgtgttatcttattctggtattagtctgcccgaggcaaagcttacccatgacgaggcatgtgaccagttaaagggtcctcgatcatcaagcctacatcgacacggtccttaatcgacatagacggagacactacaccgagactctcttctcatgcaagtcacccgcccggtctcagctttatcatttcaaacccaaagtttggtacctggcagaggtacattttttccgatgttgaacccatcatggccatgatggattcatcatcaagttttgtttttgaaaacattccacccattttgccacatcatcttttgagaaaacaaaatgttttgtttttctaaagcaaagctaagcataagaaaaaccttttgtaaaacagggatttagggagaaataatcaatccaaggaaggaaatgcagaaattggtttagcacacaactcctatcacctagtgcatcaagcaagtgagaaagattttaaagagaacaaggaggtggcaaatgcaccggggcttgccttgtgttactggtgaatcaggctctgtctaatagatatcaaaatagaaacagttgcctgcctgatgttcctcaggtggtggtggtgatgaagtccttgtctcttcgacttctacttcctcctcgttttctaaatatagccaagtataacaatgaatgcccatgtagtgctcatgaagatgcaaagacaataaaagtttattatctaaggtcttgaatacaactttccttcacggatctccgagaacttatggttttcggagtcaatagtgaagttcaaagggagggggtagggttttgggttctaagtatcaaacaaggtccaaatcatatcctactttgcccaaagcctctaaatattatatagagtttatcctaaaagtttagtgaattttggatttattgtttattctctaaaaatccagaaacaaggtttttgactattttaaatactctataatttcctatttggactaaaaatcatgaaactatttttagtaaatactataggaaattagaaacctagaataattggtttggtatttttatcgtttttctacaatttcttagagatttccaaagtctggcagaaaaagaaaacaatgaatagtcccgcgccgaaactagcccgagccggcccaattagggcagaacgcgcccacgcgcgcccgtgcgcgcccgtgagcaactttgcactgaagaccctgtcttattgaataacctaaagtggggtcgcagcactattcaactaagtcactgacacttgcgaaaaggtccctgcacttctttctcttcacagtccggagtcctcgacggtgagcggcgctgcgcagtgctccgacgagctcatgtactgaccgattcactcaatgactggcgctctactttggaagagaccgaatccaagccctaaccaccatttccccccaactaatttcacgaacgacgatctaacctactctgtccacggtgacagcgggtgtcgcggacaactgaacgcgttcccggtgatctatggagtcttagtttaattgactgggtcgagaagcaccacaagcacacagggatgctaaaacaagaacaaggaggacgtgatcggacctgtgacgggctgaccgcggcgagctcacacacgcggtgttcttgaccagtttgggggaaatcttaaattggggcgctctggtggacgatctgaggcatgggttgcttcactgggtgcacaattacctagcgaagcggacgggggtggcaatttatagcctctaggggtgacggtgctcaatttcacgaagatgtgctggcgaccggaggggaagaaagttactggcgcgagagctcagtggcatctaccgtggcgacctcaccggcgacgaacttatgcttcagggcggttcctaatgactcaccgcatcatggtatagcttcgaggcatgtagcttggccggataacggcgaacgccggtgatgccagtgcggcttaccattgcgagacacgatgccggtaaaaacagtggtcggagtttatctccaacgcgatgctttataccgaggagtgcttatccgagctcggtcgaacgtgaatcgtgacgccgacgcgaatccgggtgcaaaggtcgccggtggcgaggttcactgaacctgacccgatcaggtgactgtaccatgggaatcatcttcagagtgcctgatagaacatattcaaggcagattttctccaagttttgcatgacaacttcatcatccttctgcaccaaagttgtagacctataaaccatcttcacctttgctatagcatcagtagtcagattcctactggatcatgcttagaattgagctctaagttctagggctttctagggtttaaggctagggctttctggggttctttttaggatttttgacacttctagggtttgaataccatgtatgtctattcatggtgacattatatggttatttcaattgagttttgaagttttctcctatttaagccttgtttgctttattaagcccaatctagggttgggtgccctactctagggttttatccacaaaatgtcatatcaatacaacttatttgaaattttttgcctagtgaatgcactctaggtgtgacagacacatgatatgccaatgcttatgatgttatgctcaagttttagtgaccgtaacaccaggggtgttacagttgtctttctccggggataccaatcgaaagacatattagacttgaaaagcggtgttcatttcaaagacttagattatagagtaacctcccttaaaagtgtgcatacaagttttgaatacttgtaggagacatgcacttttactttgagatcaaggaggcgcaaatcgtctataatccagactttggcacatataattcaaaataacaccaattgaaagatataactctagaaacaagccacgtgtcgtgttttgctacacattttgaaaccatgtaggtttgctcaacaagtatgaatttaatccaagtaatcctaccatatgatatacctagcatttatgcaatacaattgaaggacatgaataatactaattaaaaaatatactaaattgtcacacccggttttaaggacaaaaccgaatgcataatatatgtgtgacaagatctatttccacacatatgttgacgtcacaagtgtaatatatcaaatgaacaatgcataaaagcgtaaataaatattataataacatattacacttcgaatcgacataatgtcttaacctttattactcatcaaagtacagtagaacatggcatccttccataggaagatgagcgggagaatcactagactagcatccataaagtttactatcataatcttcagctgcaaacttttgatcaaaattaagtaaggggtgagctcacttatggtgggggctcagcaagtggggtgaaaatgcaaggttaacaaggtaaggctagggttcagtgctattagcattttagttggtcaacattttattatcaatacctaattactaagtataagtatataccaaacacatattaagcataactaatattcaccaacatatatttatatataagcataaagctcagaaccccttgaacccaaatatcatcaacatgaagctcaaccacttgagtgcaatagaacacgatttattttcatcttcaagttcaattatcatgtgagggttcaggctgctcttaaccgtgagcatgactgatatatcagttttacactctacagaggtggcacaactttacccatgagtcgtgattcccttctagctcgagtttgcaagtctcgtattcacttctgaggtgagtggctagggtctcactacgaggcttttccctagagtcctcactacgtgaatgttggaaatgtccactgcataaagtcatctgatgtaacctaacattatacccagtttgcagggaaaagcatgtgaactatgcccatatcaaatctacttgagctggaatataagagcatgactgtcggcgtttcgaccccggggggtccctggaccgacgagtaaattgtcgctgcgtgtcccagcacagatgggtcggcgcgagatggagcacaagggggaaaacagtaaggggaaaccgcagcctcgtgttgtcctgcgcccagggcggatgcgcttgcagtagagggttacaagcgctcgcgtgggagagagagagcgtgagcctgtgcgtcagcccgtcctcccgcgcggccaccttctcgtgcgagagccctggaccttccttttatagatgtaaggagagggcccaggtgtacaatggggggtgtagcaatgtgctaacgtgtctagcagagggaagccagagtcctatgtacatgccgatgtggctgtcggagaggtttttggcgccctgttcatgtgatgtcgtggccatcggaggagcgcttgagccctgtaggagcacagctgtcggagctgtcggatcctttgctgacgtctccttgcttccgtaaggggctgaaaaccgccgtcgtcatggagcacgtggggtgccctcattacttgtttaccggagcgagccagatgggacgccggtcttgtcccccatagcctgagctagctaggggtaggtgtcggtgttttgggtccgaccgcacacccggggtttgccccctcaaggtgcttttaggagtaggacggtgtcgacgactgtagcaaaatggttcgtgccgatcgcacgagggacaatggacaagatttgcaggttcgggccgcttagaagtgcgtaacaccctacgtcctggtgagtatatgagcgtggttataagaggatcctctggatagagggcgcagagagtttttgtgggtggctaagtagaatagggtcgatcgatctgaaggggtgccccctaggccttatatactcgaccgtggggcagtacatatgatatgatagcaacgagtagctaaaagatagtgaacctcttgagtttatccctacgtaaccttcgccgacttatcctcgcatggctctgttgcatgagggcttcagcgcgggaaagtcgggtctctgttgtaacccattcgttcgacgttgtgggccgcctgtgtttgcactaatcagtcccacgtcttctttattggttgtctttccctaggcccacgaaagaatgaccttacgaattattgggcccttgggcttttcgtgaggccttttacttctttagtggacccaggggatatctatcccccacagtagggtaatgatgggcccccttgtagcatggtcggtccgagcccaaggtcgggcgaggcggtgattcctccgaggttgaggctgagtccgagccctgggtcgggcgaggcagagaccgtcgtccgaggtcgaggctgagtccgagccctagggtcgggcgaggcggagaccgtcatccgaggtcgaggttgagtccgagccctggggtcgggcgaggcggagaccgtcatccgaggtcgaggctgagtccaagccctggggtcgggcgaggcggagaccgtcgtccgaggtcgaggctgagtctgagccctggggtcgggcgaggcggagaccgtcgtccgaggtcgaggttgagtctgagccctggggtcgggcgaggcggagaccgtcatccgaggtcgaggttgagtctgagccttggggtcgggcgaggcggagtccgtcgtccgaggtcgaggttgagtccgagccctggggtcgggcgaggcggaacttcctatggcgcccgaggctggacttggctgctgtcagcctcaccctgacgggtggcacaacagttggagcagggcaggcgacgctgttttcttgtcaggtcagccagtggaggggcgaagtgactgcggtcacttcggccttgttgactaaggggcgtgcgtcaggataaggtgtcaggcgatccttgcattgaatgctcctgcgatacggtcggttggcgtggcgatctggccaaggatgcttctccgcgaagcctgcccgagctgggcctcgggcgagtcgaaggtgcgcctgttgcttgaggagaccctcgggcgaggcatgaatctgccttggtctactgttcctgctcgaggctgggctcgggcgaggcgagatcgtgtcccttgagtggacggagccttgaccggaatcgcgcccatcaggcctttgcagctttgtgctgatgggggttaccagctgagattaggagtcttgggggtacccctaattatggtccccgacagtagcccccgagcctcgaagggagtgttagtactcgcttggaggcttttgtcacacttttttgcaaggggatcggcctttctcggtttcatttcgttccagtgggtgcgcgcgagcgcacccgccgggtgtagcccccgaggcctcggaggagtggtttgactcctttgaggtcttaatgcctttcgtgatgcctcgaccggtctggttgttccctcatgcaaactggtcgttgccaggtgcatagttaggttgatgctgtcaacggtttggccggagccgggtttgcgagagcagcccctgagcctctgcacagagcgagaggacggtcaaggactgactcggcttttatcatacgccccttcgtcgcctttccgcaaggaggaggggggagagcgccatgttgccctcggagggcgccgaacatggtgtctccagtgagttgctcacgggtgatccgagtggacgcccgtgccccgttcgataagggtcggctagtggcccagaggcgtgctccaaaagtacctgcaggtgatttgccggacccggtcccgtttgatagggtccgagggctcgattcctccctctaatgggattccgttacagaatcgctcctgctggtctcggaaatgtcctagggtacctcgggagcgtagcccgagcctcggccatgtatcagacgtacccagagtcatccctcgctctgcgtgttctgaggcggctgtcgaaccctttggaggccagcctacgtacccctgatcagtagtgggcgcggatcccaagtggcctgaggcagctgtcgaatccttctgaggggccagccttcgaacccctgaccagtagtgggcacggagcccgagtgctctgaggcggctatcgaacccttctaaggggccagccttcgaacctctggtcagtaggaaggctcggggcccgctttcttcgcggagaaggatccctttcggagtatcccctttcccggtccctgtagcaagagagagaaaggggaagaggaaaaggatatgaaattgaacgatgtggcacaccttttttgacgtggtcatcatggcagaggtgaagcatcgcccgcttcgcttgccaagggtgtcgcctgccctgtcgcggagttaatgcgacgtgacgagtggttcgcggggcagccgttgtgcatgcgcgagccgttcgaggaacggaacacgggcgcgttgtcttcacgccgtgggagagggctctctcgctgtcccaggaggggacgtgagcctgcagacgatttgactgctgcttccgcccgcctgccgccgccattactgccgacccacttttggccatatcgaccgtcgcaccttctctcgcggcgtactgacccatgaccgatgtgctcggttggcactgttgggccacgcgcagggtcgcctcgagtcgcggctccggttccgcagtcgagaaggcgcggtactggcgcaagtggcggtgcagtttctcgcacgtagtaaccggcgcgccggttacatgacgtgtgggcctgggcctccatgctggacgcgtcgaagtcgaaagggtgcatccccttggtgcagttgcatgccgcttgcatggcggtccgccctttcgcccgctggtttaggcgaagatggaggagtgctcgtaactgaaagggaactaggcttagacctatttcctaattaattttggtggttgaattgcccaacacaaataattggactaactagtttgctctaagtgtataagttatacaggtgccaaaggttcacacttagccaataaaaagaccaagaattgggttcaacaaagagagcaagggataactaaagtgtgccctggtctggcgcaccggactgtccggtgcaccactggacagtgtccggtgcaccaggggacttcacgatgaactcctcgccttcgggaaaatccagaggcgctccgctataattcaccggactgtccggtgtacaccagactgtccggtgtacaccggacagtgtccggtgccccagaggagagcaactctggaactcgccagcttcaggaattcgctccgctataattcaccggacatgtccggtgcacaccggactgtccggtgagccagcggagcaacgactacttcgcgccaacggtcacctgtagaagcattaaatgcgcgccagagcgcacagaagtcaggcacgcgcgaagtggcgcaccggacactctacagtgcatgtctggtgcgccaccggacatccaggcgggcccagcagtcagagctccaacggtcggaacccaacgacctggtgacgtggctggcgcaccggactgtccggtgcaccatgcgacagacagcctccaccaaacggctagtttggtggttggggttataaatacccccaactaccccacattcaagatatccaagttttcaaccttccaaccacttacaagagctaggcattcaatacaagacacacccaagtgatgaaatcctctcccaattccacataaactttaatgactagagagagtgatttgttgtgttcttttgagctcttgcgcttggattgctttcttctttctcattctttcttgtgatcaatactcaattgtaaccaaggcaagagacaccaattgtgtggtggtccttgtggggaagttttgttcccagttgatttgagaagagaaagctcacttggtccgagggaccgtttgagagagggaaggggttgaaaaagacccggcctttgtggtctcctcaatggggagtaggtttgcgagaaccgaacctcggtaaaacaaatccgtgtgtctcactccttatttgcttgcgatttgttttgctccctctctcgtggactcgattatatttctaacgctaatccggcttgtagttgtgattaactttgtaaatttcagtttcgccctattcaccccctctaggtgactttcaattggtatcagagcccggtgcttcattagagcctaaccgatcgaagtgatgtcgggagaacacgccaagaaggagatggagaccggcgacaagcccactacaagccacgggaaggcttcatcgaaagagccccgcaacaaaaagaaagggaaggagaagaaagcctcctcccacaagtcacatcggagtggcgacaagaaaaagaaaatgaggaaggtggtctactacgagaccgacacttcatcaccttccacctccggctctgacgcgccctccataacttctaagcgccatgagcgcaagaagtttagtaagatccccttacactatcctcgcacttctagacatactccattactttccgttccattaggcaaaccgccaacctttgacggtgaagattatgctaggtggagtgatttaatgaaatttcatctaacctcacttcacaaaagtatatggaatgttgttgagtttggagcacaggtgccatccgtaggggatgaggattatgatgaggacgaagtggcccaaatcgagcacttcaactcccaagccacaaccatactcctcgcctctctaagtagggaggagtacaacaaggtacaaggattaaagagcgccaaggaagtttgggacgtgctcaagaccgtgcacgagggtgatgaactcaccaagatcaccaaacgggaaacgatcgagggggaactcggtcgcttccgtcttcgccaaggggaggagccacaagacatgtacaaccgtctcaaaaccttggtgaatcaagtgcgcaacctcgggagcaaaaagtgggatgaccacgaggtggttaaggttattctaagatctcttattttccttaaccctactcaagtacaattaattcgtggcaaccctagatatacactaatgactcccgaggacgtaatcgggaattttgtgagctttgagtttatgatcaagggctcacgaaagatcaacgagcttgacggtccctccacgtctgaagctcaaccggtcgcatttaaggcgacggaggagaagaaggaggagtctacaccaagtagaacacccatcgacgcctccaagctcgacaacgaggaaatggcgcttgtcatcaaaagctttcgccaaatcctcaagcaaaggagggggaaagattacaagccccgctccaagaaggtttgctacaaatgtggtaagcccggtcactttatagcaaaatgtcctatctctagtgacagtgacaggggcgacgacaaaaaaggcgaaaagaaacgagaagaagagatactacaagaagaagggcggcgatgcccatgtttgtcgcgagtgggactccgacgaaagctctagcgactcctccgacgacgaggacgccgccaacatcgccgtcaccaagggacttctcttcccaaacgtcggccacaagtgcctcatggcaaaggatggcaaaaagaagaaggttaaatccaaatcctccactagatatgagtcctctagtgatgataatgctagtgatgaggaagataatttgcgtacgctttttgccaacttaaacatgcaacaaaaaggaaaattaaatgaattaattagtgccatccatgagaaggatgacctcttggactcccaagaggacttcctaatcaaggaaaacaaaaagcatgttaaagttaaaaatgcttacgctctagaagtagaaaaatgtgaaaaactatctagtgagctaagcacttgccatgagactatagacaaccttagaaatgaaaatgctaatttgttagctaaggttgattcaaatgtttgtaatgtttcaattcccaatcttagaaatgataatgatgatttgcttgctaagattgaagaattgaacaattctcttgctagccttagagatgaaaatgaaaaattgcttgctaagtctaaaatttttgatgtttgcaatgctaccatttctgaccttagaagtaaaaatgatatattgcatgctaaggttgtagaattaaaatcttgcaaaccatctacatctaccattgagcacactactatttgcactagatgtagagatgttgatattaatgctatacatgatcacatggctttaattaaacaacaaaatgatcatatagctaaactagaggcaaaaattaccgagcatgaaattgaaaatgaaaaatttaagtttgctcgtagtatgctatatagtgggagacgccctggcattaaggatggcattggcttccaacagggaggcaatgtcaaaattaatacccctcctaagaaattgtccaactttgttaagggcaaggctcccatgcctcaagataacgagggttacattttgtaccctgccggttatcctgagagcaaaattaggagaattcattctagaaagtctcactctggccctaatcatgcatttatgtataagggtgagacatctagttctaggcaaccaacccgtgctaagttgcctaagaagaaaactcctaatgcatcaaatgatcataacatttcatttaaaacttttgatgcatcatatgtcttaactaacaaatccggcaaggtagttgccaaatatgttgggggcaagcacaaggggtcaaagacttgtgtttgggtacccaaagttcttgtgtctaatgctaaaggacccaaaaccatttgggtacctaaagtcaagaactaaacatgttttgtaggtttatgcatccaggggctcaagttggataatcgacagcgggtgcacaaaccacatgacatgggagaagaagatgttctcctcctacgagaaaaaccaagatccccaacgagctatcacattcggggatggaaatcaaggtttggtcaaaggattgggtaaaattgctatatctcctgaccattctatttccaatgtttttcttgtagattctttagattacaatttgctttctgtatctcaattatgtcaaatgggctacaactgtctattcactgatgtaggtgtcactgtctttaaaagaagtgacgattcaatagcatttaagggagtgttagagggtcagctatacttggtagattttgatagagctgaactcgacacttgcttaattgctaagactaacatgggctggctctggcaccgtcgactagcacatgttgggatgaagaatcttcataagcttctaaagggagagcacattttaggattaacaaatgttcattttgagaaagacaggatttgtagcgcatgtcaagcaggaaagcaagttggtgctcaccatccacacaagaacatcatgacgaccgacaggccactagagctcctacacatggatctatttagcccgatagcttacataagcatcagcgggagtaagtactgtctagttattgtggatgattattctcgcttcacttgggtgttctttttgcaggaaaaatctcacacccaagaaacattaaaggaattcttgagacgggctaaaaatgagttcggcttaaggatcaagaaaattagaagcgacaacgggatggagttcaagaactctcaaattgaaggcttccttgaggaggagggcatcaagcatcagttctcttctccctacacgccacaacaaaatggtgtagtggggaggaagaatagaactctcttggacatggcaagaaccatgcttgatgagtacaagacttcggatcggttttgggccgaggcggtcaacaccgcttgctacgccatcaaccagttgtatctacaccgagtcctcaagaagacatcatacgaactcctaaccggtaaaaagcccaatatttcatattttagagtctttggtagcaaatgctttattcttgttaaaagaggtagaaaatctaaatttgctccttagactgtagaaggctttttactaggatatgattcaaacacaagggcatatagagtctttaacaagtcctctggacaagttgaagtttcttgtgacgttgtgtttgatgagactaacggctctcaagtagagcaagttgatcttgatgagataggtgatgaagaggctccatgcatcgcactaaggaacatgtccattggggatggtgtccaaaggaatctgaagagcctccaaatgcacaagatcaaccatcctcctccacgcaagcatctccaccaactcaaaatgaggatgaagctcaagttgatgaaggagaagatcaagcaaatgagccacctcaagatgacggcaatgatcaagggggagatgcaaatgagcaagataaggaggatgaagaaccaaggccgccacacccaagagtccaccaagcaatccaacgagatcaccccgtcgacaccatcctcggcgacattcataagggggtaaccactagatctcgtgttgcacatttttgtgagcattactcttttgtttcctctattgagccacatagggtagaggaagcacttcaagattcggattgggtggtggcgatgcaagaggagctcaacaacttcactaggaatgaggtatggcatttggttccatgtcctaatcaaaatgttgtaggaaccaagtgggtcttccgcaataagcaagatgagcatggtgtggtgacaaggaacaaagcccgacttatggccaagggatactcccaagtcgaaggtttggatttcggtgaaacctatgcacccgtagctaggcttgagtcaattcgtatattattagcctatgctacttaccatggcatcaagctttaccaaatggacgtgaaaagtgccttcctcaatggaccaatcaaggaagaggtctatgttgagcaacctcccggctttgaagatagtgagtaccctaaccatgtctataaactctctaaggcgctttatgggcttaagcaagccccacgagcatggtatgaatgcctaagagattttcttattgcaaatggcttcaaagtcgaaaaggccgatcctacactctttaccaaaacacttgaaaatgatttgttcgtatgccaaatttatgttgatgatattatatttgggtctactaacgaatctacatgtgaagagtttagtaggatcatgacacagaaattcgagatgtctatgatgggggagttgaagtatttcttaggatttcaagtgaagcaactccaagagggcaccttcctaagccaaacgaagtatactcaagatattctaagcaagtttgggatgaaggatgccaaaacccatcaagacacccatgggaaccaatgggcatctcgatctcgacgaaggaggtaaatccgtcgatcaaaaggtataccggtcgatgattggctctttactctatttatgtgcatctcgaccggatattatgctttccgtatgcacgtgtgcaagattccaagccgaccctaaggaagctcaccttacggccgtaaaacgaatcttgagatatttagtttatactcctaagtttgggctttggtatcctaggggatccacatttgatttaattggttattcggatgccgattgggcggggtgtaaaattaatagaaagagcacatcgggaacttgccagttcttgggaagatccttggtgtcttgggcttcaaagaagcaaaattccgtagctctttctaccgccaaggccgagtacattgccgcaggacactgttgcgcgcaactactttggatgaggcaaacccttagggactacggttacaaattaaccaatgttcttcttctatgtgataatgagagtgcaatccgcatggcggataatcccgttgagcatagccgcactaagcacatagccattcggtatcattttttaagggatcaccaacaaaagggagatatcgagatttcatacatcaatactaaagatcaattagccgatatctttaccaagcctcttgatgaacaaacttttaacaaacttaggcatgagctaaatatccttgattctaggaatttcttttgttgatttgcacacatagctcattcatatacctttgatcatatctctttcatatgctatgactaatatgttttcaagtctatttcaaaccaagtcataggtgtattgaaagggaattggagtcttcggcgaagacaaaggcttccactccgtaactcatccctcgccgtcgctccgagccactctccatctttggggagagagcatgagtccaaagcaaaaggactccgtctttggtataatcttactcatatgttttatttgccaaaggggagaaagtaattctaagggctctaatgattctgtttttggcgatttatgccaaagggggagaaagcatgagcccaaagcaaaaggaccacaccaccacctaattttaaaatgattttcaattggaaatttcaaattggtatcttattatgttccaaagggggagaaactagtatttcaaaattgatatatcaaaaccctcttgaacactaagaggagaatctcatctagggggagttttgtttagtcaaaggaaaagcatttaaaacaaggggagaaaatttcaaatcttgaaaatacttcgcaaaatcttattcatctacctttgactatttgcaaaagaactttgaaaagaatttacaaaacaatttgcaaaaacaaaacatgtggtgcaagcgtggtccaaaatgtcaaaaattaaagaaacattccatgcatatcttataagtatttatattggctcaattccaagcaacctttgcacttacaatcttgcaactagttcaatttatgtatttcatacttgctttggtttgtgttggcatcaatcaccaaaaagggggagattgaaagggaactaggcttacacctatttcctaattaattttggtggttgaattgcccaacacaaataattggactaactagtttgctctaagtgtataagttatacaggtgccaaagattcacacttagccaataaaaagaccaagaattgggttcaacaaagagagcaagggataactaaagtgtgccctggtctggcgcaccggactgtccggtgcaccaggggacttcacgctgaactcttcgccttcgggaaaatcgagaggcgctccgctataattcaccggactgtcaggtgccccagaggagagcaactctggaactcgccagcttcgggaattcgctccgctataattcaccggacatgtccggtgcacaccggactgtccggtgagccagcggagcaacgactacttcgcgccaatggtcacctgtagaagcattaaatgcgcgccagagcgcgcagaagtcaggcacgcgcgaagtggcgcaccggacactctacagtgcatgtccggtgcgccaccggacatccaggcgggcccagtagtcagagctccaacggtcggaacccaacggcctggtgacatggctggcgcaccggactgtccggtgcaccatgcgacagacagcctccaccaaacggctagtttggtggttggggttataaatacccccaaccaccccacattcaagatatccaagttttcaaccttccaaccacttacaagagctaggcattcaatacaagacacacccaagtgatcaaatcctctcccaattccacaaaagctttagtgactagagagagtgatttttgtgttcttttgagctcttgtgcttggattgctttcttctttctcattctttcttgtgatcaatactcaattgtaaccaaggcaagagacaccaattgtgtggtggtccttgcggggaagctttgttcccggttgatttgagaagagaaagctcactcggtccgagggaccatttgagagagggaaggggttgaaaaagacccggcctttatggcctcctcaacggggtgtaggtttgtgagaaccgaacctcggtaaaacaaatccgtgtcacactccttatttgcttgcgatttattttgctccctctcccgcggactcgattatatttctaacgctaatccggcttgtagttgtgattaactttgtaaatttcagtttcgccctattcaccccctctaggcgactttcagtaaccgctgggcagttacgcgctccgcgcgtggtggtttggcttcttctgtcctgggccagcttgcatgacacgtgggacccagcccttgtgtcgtagggggaggaccttggagcgtgttggtgaagacttagtccacgacgcctgaggacgctagtggggagagtcgcctttaaaaagggggcgacccccttggatggcagccatgccttctcactcccctcatgcatcgcgtccttccaccttccaagcccccggatggggagcgcccacgttgctttcgtcttgctgtcgttggaggagcgcaacttcgcggaatttggtacctttcagccatcgctcggcttcaaggattttcatcaggcagcccggctgcatcccctcgccgatggtcacccaagacagtgaccaccagcttgatggtggggagaagcaagccgggctgcggcctctgccccgcccttagcttcaaggatcttcatcatccttgctggggcggagggcaagctgagccggagctctacctcctgcacgggtcggtgggccaccttctccttcagcttctaggggtggaaaccatcctccagctctgcggaggaggcgccctccagccatgccggggaaggcgaactgttgctgcctagccagggtgcaacattccgtcctttgtccgggcgacggtggccagccgcaccagggggtctcacaacacgtcgtacgccgcgagggcggtactcgtgttctaggacgatcccattctcgttttcatggcgaggacgagagtgaggacctgccggtgcgctttggggcggccggcgcccgctggtgcggtgttggtgggcaggtggacgccgccgtcggtgctgaggtggtggtagctggagaaagcttctctgccggcgagaccgtcagcgccacttgcggaccgacctctggctctttggctttgatagcttgtcctcgcccctcgagtggggacgtgggcgagggccttatcgcagctgcgtctgccctgaggtcatcgctgctgctgtttggccgcctggagcggaggtcgttgtcgctgctgccggagtgggcggcggcgagccacctggatgttgtcgtcccgcaggccctccgatgtggggggttgttcgtacctgcgggagtggaaccggagttccgtttgtaatggcaccttgagtgccggtgtctgttcattgtggctgtcggggcctgaacatcgatgtatttgggcgcaataccgtgtttcttcctcattttgagctctaggacttgcctgtcggctagccgaaccgcttaaccaagtgtgagttgccccgtgcggaaggtgacgagtgaggtatccgtatcccggaggcgtaggagtccctcggctcggtcggccttgccgcccgaggcttctcttgcttagttaaaggaaccctcggccgctctgcgatgagccggagccggaggcagcggtgtcagcatggacagaggcggagtcggctcgaaaagaaaacttcgtcggcctaggagcaggtgacttcccaggctgaggaggtgtagcaacggcggccggagcctggccgggtcgtccactggcgggaccaacgccggagtcgggttgccgaggccatgagccgggctgatgtcctcgagggacagctggctgaggctacggagcggccggtcgagccgtctgctcggcggcgatggcccaggtgctgtgctgacatcttccttcgaggtggagatcctccgaccgtgttgccgtccgaggccgggtcggattccgccgaaggtggagttgacgccgagggtgctgctgctccccccactgatgtttgaacctgcaagatcagtttgtctgtagtatgcgtatgttttttgcggccgccgaggcccaaacataccgttgtcgtgttgtaaagctgcggttcttttccccttgctttgagtatcaggacttgttcgtcggtaacaaaatcgtttatccgagcaagagttacttttcacggaaggtgatgagtgaggtatccgtatcccggaggcgtaggagttcctcggctcagtcggccttgccgcttacgtgtactcttactcgtccgtaggattctgttatcgatatagtcgagaaggcacgaaagatgttctggcagaaagactttttctgaggaaaaatttgccgcagagggggttccccccttctagcccccgagggagggtcgggctttgccgaggcaaggctgacccttccttgatggttagactttatttgtgtatgtaaacgaggtatatgaacgacttgaaaacatcttaagggtagaagcgacgtagctgtcggatgttccaagcgttgctgtagacctcgccttgattgttggccagcttgtatgttccgggcttcaaaatgttggcgatgatgaacgacccttcccagggaggcgtgagcttgtggcgccctcgggcgtcttggcgtagccgaagcaccaagtcgcgcacctggaggtctcaggaccgaacccctcgggcgtggtagcgtcgcagagactgctgataccgcgccgagtgtagtaaggccatgtcccgagcctcttccagctggtctagtgagtcttctcggttggtctggttgcttcggtcgtcgtacgccctcgtcctcggggaaccgtattctaagtctgtgggcaagatagcctcgaccccatagactagaaagaacggcgtgaagcccgtggctcggctcagcgtcgttctcagactccagaccaccctccttcatccatcgcctgccgaacttgttgaggttgttgtagatcctcggcttgagtccttgtagaatcatgccgttggcacgctctacctgcccattcatcatggggtgagctacggcggcccagtccacccagatgtggtggtcctcgcagaagtccaggaactttctgccagtgaactgggtgccattgtcggtgatgatggagttcgggaccccaaagcgatggatgatgttggtgaagaacgccaccgcctgttcggacctgatgctgtttaggggtcggacctcgatccacttggagaatttgtcgatggcgaccagcaggtgcgtgtagcccccaggtgccttctgtaagggaccgacgaggtccagaccccacacagcaaacgaccaggtgatgggtattgtttgcaaagcctgagcgggcaggtgtgtctgccttgcgtagaattgacacccttggcaggtgcgtacaatcctagtggcatcggccaccgcggttggctagtagaaaccctgtcggaaggcgtttccaacgagggcccggggtgctgcgtggtggcctcaagcccccgagtgtatttcttgcaatagctcttgaccttcggcaatggatatgcatcgctggaggatgcgtgaggggctgcggtggtagagctcctttccgtcacccagcaagacgaacgacttggcgcgccgcgccagtcgccgagcttcgactctatcgaggggtagctctcctcggtggagatattgcaggtacggggtctgccagtttcgattaggtgggaccccattccgctcttcctcgacgcgcagtgcctcaccctcaggggccgagggtgcctcgggctgagccgagggtgcctcgggcagggccaagaccttctcgggttcgggcgtgtcgtcggtcttgactgagggttgatgtaggtctcgggagaagacgtccggagcaaccgttgtccgccccgaggctatcttagccagctcgtccgcagtctcgttgtatcgtcgagcgatgtggttgaggtcaagcccgtagaacttatcctccaggtgccgaacctcatcgcagtaggcttccatcttcgggtcgcggcaatgggagttcttcatgacttggtcgatgacaagctgcgagtcgccacgagcgtcgaggcgtcggacccatagctcgatggcgatgcgcaacccattaaccagagcctcgtactcggccacgttgttggacgccaggaaatggaggcgcaacacgtagcggaggtgcttcccgaggggtgaaatgaagagcaggcccgcgcccgctcctgttttcatcagcgacccatcgaaaaacatggtccagagttccggttggatcggagctgctggaagctgggtgtcgacccattcgaccataaagtccgccaagacttgggacttggtggccttccgaggagcgaacgagattgtctcgcccatgatctccaccgcccactttgcaatcctacccgaggcctctcggcactggatgatctctcccagggggaaggatgacaccacaatcaccggatgagactcgaagtagtgtcgcagctttcgccgcgtcagaattaccgcgtacagtagcttttgaatttgcgggtagcggattttggtctcggacagtacctcactgatgaagtagaccggcctctggacaggcaatgcgtgcccctcttctcgtctctcgaccacgatcgcggcgctgaccacctgagtggtagcggcgacgtagataaagagggcttctccggcagcgggggggcaccaagatgggcgcgcttgtaaggagcgcctttaggttcccgagggcttcctcggcctcgggggtccaagtgaagcgcttggccttccttaagaggcagtacagaggtaggcctctttcaccgaggcgcaagatgaaatggctcagagccgcaaggcatcccatgaccctctgtactcctttcaagtccttgatgggccccatgttggtgatggccgcaattttctccgggttggcctcgatgccccgctcgaagatgatgaaccccaggagcatgcctcgggggactccgaagacacacttctcgggattgagttttacgccttttgccttgagacacttgaatgtcgtttcaaggtcagagaggaggtcggaggctttcctcgtcttgactacgatgtcatcaacgtaagcctcgaccgttcgaccaatgtgttctccgaacacgtggttcatgcacctttggtatgttgctcccgcgttcctcaaactgaatggcatagtaatgtagcagtacatgccaaagggtgtgatgaaagaagtcgcgagctggtcagactctttcatcctgatttggtgataccctaagtaggcatcgaggaacgacatggtttcacatccagcagtggaatccatgatttgatcgatgcgaggcagagggtagggaactttcggacatgctttgtatagaccagtgtagtctacacacatccgccatttcccacctttctttttcacaagcacagggttggctaaccattcgagatggaatacctccttgatgaaccctgcagccatcagcttgtggatctcctcgcctatggctctgtgcttttcttcgtcgaatcggtgcagaggctgcttcacgtgtcgggctccaactcggatatccagcgagtgctcgacgacatccctcggtatgccaggcatgttcgagggactccacgcaaaaacctcggcgttcacgcggagaaagtcgacgagcactgcttcctatttggggtcgagcttggagccgatccggacttgcttggaggtgtcgttgctggggtcgagagggacggacttaaccatctcagctggctcgaagttgctggcatggcgcttcgcatctggcacctccttggagaggttctctaggtcggcgatgagggcctcggattcggcgagggcctcggcgtactccatgcactccacgtcgcattcgtacgcgtgtcgtacgtggagccaactgtgatgaccccgttggggcccgacatcttgagcttgaggtaggtgtaattggggacggccatgaacttggcgtagcatggtctctccagcacagcgtggtaggttccttggaacccgaccacctcgaacgtgagggtttcctttcgaaagttggagggagtcacgaagcagacgggcagatcgagttgcccaaggggctggacgcgcttcccggggatgatcccgtgaaaaggcgccgcgccggcctggatcgtggacagatcgatctgcaggagcccgagggtctcggcgtagatgatgttgaggctgctgcctccgtccatgaggaccttggtaagcctgacattgtcgatgacgggatcgacaacgagcgggtactttcccgggctcggcatgcggtcggggtggtcgccttggtcgaaggtgatgggcttgtcggaccagtctaggtagactggcgccgccaccttcaccgagcagacctcccgacgctcttgcttgcggtgtcgagccgaggcgttcgccacttgcccaccgtagatcaagaagcagtcatggacctcggggaactcttctgccttgtggccctccttcttgtcgttgtcgtgggctctgccaccttccgccggtggcccagccttgtggaagtagcaccgaagcatgacacactcctcgagggtgtgcttgacgggaccctgatgataggggcacaaatccttgagcatcttgtcgaacaggttggcgcctccgggaggcttccgaaggttcctgtgctcggcggcggcgacaaggtctgcgtcggcggcgtcgcgtttcgcttgtgacttcttcttgcccttcttcctcgcgccgcgctgagcggacgcctcggggacgtcttccggctggcgcccctgatgctgcttgtccttccggaagatggcctcgaccgcctcctgaccagaggcgaacttggtggcgatgtccatcagctcgctcgccctggtgggagtcttgcgacccaacttgctcaccaggtcgcggcaagtggtgccggcgaggaacgcgccgatgacatccgagtcggtgatgttgggtagctcggtgcgctgcttcgaaaatcgccggatgtagtcccgcagggattctcccggcagctggcggcagcttcggagatcccaggagttcccagggcacacgtatgtgccctggaagttgccggcgaaggctttgaccaggtcgtcccagttggagatctacgcagggggcagatgctccagccaggctcgggcggagtcagattggaacagggggaggttgcggatgacgaggttgtcatcgtccattccacccagctgacaggccagccggtagtctgcaagccacagttccggccttgtctcccccgagtacttggtgatggtagtcggggttcggaaccgggtcgggaacggcgcccgtcgtatggcccggctgaaagcttgcggaccaggtggttcgggcgaggggctctgatcctccccgctgtcgtagcgtcccccacgcctggggtggtagcctcggcgcaccttatcgtcgaggtgggctcgacggtcgcggtggtggtgctcattgccaaggcgtcccggggccgcaggcgctgtgtcccgcgtgcacccggtgtgggccgaggcttcccgcatgaatcgggaagtcacggcgcgatgcttcgggggtacccttgccttcaggaggcaaagctttcggcccgtcgaaccgcggcgtcctccaggagattcttgagctctccctggatacgccgcccctcggtggtggatggttccggcatcgctcggagtagtattgctgctgtagccaggttctggccgaccccactggaagccgggggcagccttgccctagcatcgttggcgatgcggtggtggatgtcctgggccagatgacgcgcttttccggccggtgctcgacctgccccctcctgcccgatattctgccggagctgcacaagttgtcctgcttcctcgtcgagcctggcctgcatctcgcggatttgctcgagctgtgcgtcctgaccccccgcagggactaggaccacagctagctcccaaaggatgtcaacgcgaggcgcaggcctagggggatcgctgtcctccggcataccaaggtggttgccttcgtcgagaccccctagatcgacgtggaaacattcgcgacttgggccacagtcctcgtcgccgaggctgtggctactatcggagcaatcagagaggcagtagtcacatgcggtcatgaagtcccgcatggcactggggttaccgagcccggagaaatcccaaccatagttgagctcgtcatattcctcggaacccaggggcccgtaggtcgagacgaccgttagtcggtcccagattgaccacatatgataccgcggaaggttcggatatgcctttatgaaagcatccaccgaagcggggtcgcttggtgggtcgaagctgaatctaaaaggcataggatgaaaaacagacggtacctcttgatcgacggatggtgacaaagtcgcgtcggggacggactgcaccgttatctcaggtacgaggctaacacccagcaagtccttcgcgagcgtgcggaggaaggagtatcatgtcgtagctgccgtcgagggacatgaactcgagactcccgaaatggagcatcgtcccgggttggagtggttgctggagactacccatctggagcttgacgggaagctattcgtcaacacgcaacaggcccctacctggcgcgccaactgttggtgtttcaaccccgggggctccctggaccgatgagtaaattgtcgctgcgtgtcccagcccagatgggtcggcgcgagacggcgcacaagggggaaaacagtaagggtaaaccgtggcctcgtgttgtcctgtgcccagggcgaatgcgcttgcagtagggggttacaagcgctcgcgtgggagagagagagagcgtgagcctgtgcgtcagcccgtcctcctgcgcggccaccttctcgtatgagagccctggaccttccttttatagatgtaaggagggggcccaggtgtacaatggggggtgtagcaatgtgctaacgtgtctagcagagggaagccagagtcctatgtacatgccgacgtggctgtcggagaggttttggcgccctgttcatgtgatgttgtggccgtcggaggagcgcttgagccctgtaggagcatagctgtcggagctgtcggttccttgctgacgtctccttgcttccgtaaggggctgagaaccgccgtcgtcatggagcacgcggggtgccatcattacttgtttaccggggcgagccagatgggacgccggtcttgtcgcccgtagcctgagctagctaggggtagggtaatgatgggtcccccttgtagcgtggtcggtccgagcccaaggtcgggcgaggcggtgattcctccgaggtcgaggctgagtccgagccctagggtcgggcgaggcggagaccgtcgtccgaggtcgaggctgagtccgagccctggggtcgggtgaggcggagaccgtcatccgaggtcgaggctgagtccgagccctggggtcaagcgaggcggagaccatcgtctgaggtcgaggttgagtccgagccctggggtcgggcgaggcggagaccgtcatccgaggtcgaggctgagtccgagccctggggtcgggcgaggcggagaccgtcatccgaggtcgaggctgagtgcgagccctggggttaggtgaggcggagaccatcgtccgaggtcgaggttgagtccgagccctagggtcgagcgaggcggagaccgtcattcgaggtcgaggttgagtccgagccctggggtcgggcgaggcggagtccgtcgtccgaggtcgaggttgagtccgagccctggggtcgggcgaggcggagtccattgtccgaggtcgaggttgagtccgagccctggggtcgggtgaggcggagcttcctatggcgcccgaggctggacttggctgttgtcagcctcaccctgatgggtggcacaacagtcagagcagggcaggcagcgttgttttcttgtcaggtcagccagtggaggggcgaagtgactgcggtcactgcggccttgtcgactgaggagcgtgcgtcaggataaggtgtcagacgatccttgcattgaatgctcctgcgatacggtcggttggcgtggcgatctggccaaggtagcttctccgcgaagcctgcccgagctgggcctcgggcgagtcgaaggtgcgcccgttgcctgaggagaccctcgggcgaggcgtgaatctgccttggtctactattcctgctcgaggcttgtcggcgtttcgagaccggggggtccctaagccgacgagtgaatgtcgctgcgtgccccagcccagatgggtcgacgcgaggccgagcgcgaaggggggaagtgaggtggccggagatgggcgtgagagaggtggaaatcccgcggccttcgtgttcatcccacgcccaggtcgggtgcgcttgcagtagggggttacaagcgtccacgcgggagagagaagcgagcggccccaagagagcgcctgtcccgtcctcgtccccgcgcggccaaccctctctaagagggccctggtccttccttttataggcgtaaggagaggatccaggtgtacaatggggtgtagcagagtgctacgtgtctagcgggggagagctagcgccctaagtacatgccgatgtggcagccggagagatcttggcacccagctggtgtgatgtcgtggccgtcggaggagcgacggagcctggtggagggacagctgtcggagcggttgagtccttgctgacgtcctcctgcttccgtaagagagctgagagccgccgtcgtcacagagcttgcagggcgccatcattgcctatctggtggagctagtcagatgggacaccggtcttgttctctgcggcccgagtcagctcggggcagggtgatgatggcgcttcctgttgacgcggctggcttgcgccctaggttgggcgacgtggaggctccttcgaagccgaggtcgagtctgtcttccatggccgaggccgagtccgagcccctgggtcgggcgaggcggaggtcgttcggcagaggccagggcggagtccaagccctagggtcgggcgaagcagagttcgtcgtcttctggggctgagcccgagtccgagccctggggtcgggcggagcggagttcgccgtcttccgggacttagcccgagtccgagccctgggtcgggcggagcggagttcgccgtcttccgggactcagcccgagtccgagccctgggtcggggcggagcggagttcgccgtcttccgggacttagcccgagtccgagccctgggtcgggcgaagcggagttcgccgtcttccgggacttagcctgagtccgagccctgggttgggcggagcggagttcgccgtcttccgggacttagcccgagtccgagccctgggtcgggcggagcggagttcgccgtcttccgggacttagcccgagtccgagccctgggtcgggcggagcggagttcgccgtcttccgggactcagcccgagtccgagccctgggtcgggcggagcggagcttcctatggtgcctttggcagggcctggctgcctgtcagtctcactctatcaagcggcactgcagtcggagtggcgcaggtggcgctgtccttttgtcaggccggtcagtggagcggcgaagtgacggcggtcacttcggctctgccggggggcgtgtgtcaggataaaggcgtcaggccacctttgcgttaaatgctcctgcgattcggtcggtcggtgcggcgatttagtcagggttgcttcttagcgaaggcagggcctcgggcgagccggagatgtgtccgccgttggaggggggcctcgggcgagacggaaatccttcggggtcggctgcccttgtccgaggctaggctcgggcgaggcatgatcgagtcgctcgaatggactgatccctgacttaatcgcacccatcaggcctttgcagctttatgctgatgggggttaccagctgagaattaggagtcttgagggtacccctaattatggtccccgacagtagcccccgagcctcgaagggagtgttagcactcgcttggaggcttttgtcgcacttttttttgcaaggggaccagcctttctcggttgcaatttgttccggtgggtgcgcgtgagcgcacccgccgggtgtagcccccgaggccttggaggagtggtttcactcctccgaggtcttaatgccttgcgtaacgcttcggccggtctagttgttccctcatgcgaactggccgtagcccgggtgtacggtcggggcccaagttctcgggctggtatgttgacgctgtcaacggttcggccggagccgggtttgcgagagcagcccccgagcctctgcacagggcgagagggcgatcagggacagactcggcttttttacatacgcccctacgtcgcctttccgcaaggaggaggggggaaagcgccatgttaccctcgatgggtgccgaacatggtgtctccggtgagctgcaagcgggtaatccgagtggacgtccgtgccccgttcgttaggggtcggctaggggcccagaggcgcgcccaaaagtacctgcgggtgatctgccggacccggtcccctggcgacggggtccgagggctcgatgcctccctctgatgggattccgttacaatatcgctcccgctggtctcggaaatgtcctagggtacctcgggagcgcagcccgagccttggttatgtatcgaacgtacccctggtcatccctcgctcggcgtctgaggcggctgtgaacccttcgggggccagccttcgaacctctgatcagtaatgggtgcggagcccgggtagcctgaggcggccgtggaacccttcggggggccggccttcgaacctctgaccagtagtgggtgttgggcccacgcgatctgaggcggctgttgaaacccttcggggggccaaccttcgaacctctgatcagtaaggaggctcggagcctggttccttcacggggaaggatccttttcggggtatccccctttcccggtccctgttgcaagagatagagaaagaggaaaaacggaaaaggatacgaaatcgaacgacgcggtgtaccttttttggcgcggttattacggcgaaggcgaagcgtcgcccgctcctcctgccagaagcgccgcctgtcccgccgcggagttaatgtgacggggcaagtggttggcagggcggccgtcgcgcgtgcgcgagccgttcgaggaacggatcacgggcgtgttgtcttcacgccgtgagaggaggttctcttgccgcccccggatgggacgtgagcttggctgacgacgtgaccgctgctcccgcccgcctgccaccgtccttactgccggcccactttcggtcgcattgaccgcccgcgccaggctggcgctgctgggtcgtgcgctgggtcgcctcgagtcgcagtatcggttccgcaatccaggaggcgcgatggtggcgcaagtggcggtgcagttgcttgcatgcagcatccggcgcgccggttgcgtgacgcgtgggcctgggcctctaggctgggcgcgtcgggagtcggagaagcgcgtccacttggcgtggttgcatgccgcctgcatggctgcccgcctctttcgcccgttggtctgggcagaagtggagggtcacttgtaaccgctgggcggtcgtgtgtgccacgcgcggcggtttggctccttctgcttcgagccggtttgcatgacatgcgggacccagcccctgcgccgcatgggagggccttggagcgtgttggagaagactcggcccgtgacggttgggggcgcaagtagggagagttgcctttaaaaggagggcgacccctttcggaaggcgaccatgtcttctcgctcccttatgcgtcgcgtctttccaccttccaagcccccggatgggggatacccgccgtcttttcgcctcatcgttggaggaacgcaactccgtgggagttggtacctttcagccatcgtttggcttcaaggattttcatcagccagcccggctgtacccccccgccggtggtcacccaagacggtgaccaccaattcctgggtggggagaagcaagccgggctgcgatcttggtcccaccctcagcttcaaggatgttcatcatcctcgctggggtgggggccaggctaagccggcgctctacctcccatgcgggttcgtgggtcaccctctcccgcggcgttcgagggagagggcgctcactggccctgcgggcggcccggacttcgacaacgcggggctggtcgatggcaggcgtcgtcacctccagcgtgtcgggctcgccggcttggctcccggcggccccttctgccggagggcggctgtcgcgccgtgtgcacgggaggaccaccctagatgccgcgcgctgctagggcggcgttcgtgttctagggtggtcctgcctttgcaccggcgtggcatcttcacgcggaggccggtgccccactcgtccgggaggatttgagtggggatctgccagagggctgatggcccctgtcgtcggtgtcaaggcgaaggcggttcgagaagtccccgtcgccgacgggatcaccgccaccatccgcgcctcgggcctccggctctttgtacttgtcctcgcccctcgagcgtcggcgtgggcgagggcaagattgcagcagcgcccaccctgaggcctgcgctgctgcagctcggccacccggagcgggggtcgttgtcgtcgtagtcagagcgggcggccgcgagccgctcatcagtctttcgttgctccgcaggccctccctgtggcggaactgcccgaattgttccaacttaagtgcctaagccctgccttagaggctagaccacacttaaatgggaataacccgtcaatccctcggatctagtccgacacggccactgacaggatcaagtaccacaatctcactcgatggtgagtcacagtgcaaatacaataaagcataaaaccatgcatgtgagagtattagattattacatcatcatcatcggagtttttgcaaaagtaaccatcattgttctaagtgcagcggaaataaactacggtaaataaacagagagatggggaagcctgtcccatcactcctcatgctcctcctcagccgaggcagggtcccactcaacagtccaacccggtggtaaggtggacggccaagtcactccagcaaccatgtcctccagagaacctgtaaaattatgccacaagcaaggctgagtatactaatactcagctagacttacccggtgtgaggagtctactcctctacctctagacatgcagctgtttggctgtggggtttggttgccaaaagcactagctgagtttctaaatcaagatttaactttgtcaaaattaagtgtgactctcttaaggctaaaagtgtactatctactcatacatagtagcaagcatttttagcaatcaacatcttgtatcatctcaacacagttccacttgttactcaatgtagcagcatggatcaagcagtctcattagctacgagaagcagacgattcgaatcgagttttttaaaccttgcaaggtaaacctaaacacacgacatgcaggggcactccgtccccacacacatcaaccgtccccatcgattccccgtcagcagatcagggctcaccgccttggcgtacaatgcctcactgaccccgactggccgtcgtgcagtgaccgcacttgtacccaccataaccggaatgggagacctcgtctcaggtcgcgtgaggggatatgtccactgccaggttcactcaggtactaggcttaccgatttaccatatttctcggcatgtgcttagtacgttcaaacgcttgactcacggtaccacaccttaatccttattccagttcccacctcgtagataaccaatccccatggattgttgtccacagaccaacaccattatgatataaaaaatggatacaaccaatttcctgatctcgcgcgagtgctagaaaaatcactcgacttctaccgagatcctacttaataaagcagctactcgacttagcatactagtattcatcacaatggggttcctgagatcatgcaactagggtttcaaacaactcctacacttaagtgcacaaacaatcctacaatcattaagtgtagtaaaatagtataaataacaggttatgcataaaaccggggcttgccttccaaagcagtggcaggcaggtcctctggtgcaggctctggtgctgggtctggggctacctcctgagcagctccttgctccggcacgaggacgtactctccgttagcaagattacagtctatcgaatgaaatgaacatgtatgttatgattatgcaggattaataacattatgcaaaagaaaactaagttaaggaataacttaaggtttctgggtcatacggggcttttagtggtttaggcttatcactcctaggtttagatttttgttgaggataacatagtgaatttgcattgtcctcacacatttcaatggaaaatgttataagggatttaggatgacactaattaccagtatttattttcctttctttaatttctactaagggtttttagtgtaggtttgaactgtgacagtgggttaataattctcaaaaattctgtaaaaattgcagtgggttgccattggctatcctagctggtttcaatatttgagacttaaactataaaggctaggcttatacaaaaataacaagggcggtgtaaaatgggacactttacactacacctcaccattatagttgagttcttcctaagggcatttttgttgggatctaacagtaatactaaaccgtctgtgccaaaatccatagaaagttaattggtgattatttaattgtgattttctaaagttttatgccaaaaaggtgcttataactaacttgtcatttgaaaaatatcaaacaacagattttgtatttttcctctgttcataataaccaaacattagttatcccaaggtttggggtgtctttgccttagggttatttttgtagggtttttctaagttatccttattttattaaattaaaaggtatcctacttattttatactaaaccaggtatgatatatttttccagtgaactacattaaataagtatcctaacaaaaataagggtgctctctggttcatggtttaaattacattttctatttttctatctttaagcatattatggaataaggggtaaaaactaacttaatagagtggtcagagaggttcaacatttttaaacaggtcagtaggtagatatgaatttctccaaattttcctaaccctagtcaatagcacaactatttttctttctattattgagcttttggccaaaaatatcactaaatcagagctttaaaatcttccttaataccaaggggttttatatttttctcaaataggttacattaattagagtctggcaaaattggtttgaccaaatttggatgaactaaacataagttatgaatttttaaaatctctgttcaattttaaattagattttaaaaagagtttcctggaaaaacaatttacaccggggtccctgggtttaaatcaaatcaaccctcgcagatctaccctcgcgccactgttcccctgtgtctctgacatttcacaaaacccccccgaccttctctccctctcacccacagtccttcccccaactgaaacagtaaccgtgggaaagaaaagggtggcgcggcttaccggcggcgagggaggtccggcgaagggtggggttggctcggggagactctagcggtcacgtcgaggtacggcttgacgtcggggatggccggaatcgcccggtccacgagcgcaggcgggtgtgctcgtcggcggcgagtgcaccggccaaactacggcgaactggttcaatccaagggcacagtgagcttcacggtgtaacgtagcgactgtgtgcacaaggaatcgaaggatggttgagtggtttacccggtccacgtactccggcggggttgagagctccggcgagcgtgggctggcctctccggcgaagcaaactccgattcctcgctcggggagcttcccggaggcgtgcacggccttccccgagggctggacgaggttgggaatggctctgttggccggtctacggtaacagagggattgggcggccgcggacttgctgcgcacgggcaaacgacgacgagctaaactccggtgaggtttggagggtgcgcggaagagtgcagtcgaagcctgggagggctttataggctcgggcgcgggccgcggcactggtttggctcgggcgcggcgctgggcatgcgggggcacgcgcgggcgtgctctggcgtgggcagaaggcgtcgaacacgtggaggtgagtttcttccattgttcaaacgtctccagagatcgcaaacgtgcgaatcttgccatgaatccggcgcagacctcctcttggcacctagggctatctcacatgtgtgagattctaaaggaggatacgccctagatcaggagatagacgggcgccaaatctggcttgtctcactgcccactccgcgacaaaactgatgccaatccctgtcaaacgtccaagtctcggtctccactttttccagggggtgccttaggtggtataccacatttttggtatagaacccaagtggttttggtgccatcttcaaggtgaacacggttgatccttaaactagggttaaaaatggacttagagggaaatagagagctctagccctctctccacttggagatttgaaatggggtttctccaagggcctttttgcattatttctctcccctaattgctggttataaggttgcttagggtttgggtaaagattgcccatgctttgcacatttgctcaccttcttcccccccctttacttagggttttggaagatagggtttaaaaagaggtctagggttcttctcccttcttatccaaggtagtaagtgagcaaggattagagtaatgcttcttaggtcattggcaacatgattagcacatgatctccaagttcttgggtgtggccctgagcctctaccacatgtgatcaaagcctttagtatcaaggtgggctctaaccaaggtaacacctggggtgttacactcccccatggagttgggttgttcgtacctgcggagggggaaccggagttccgtttgtaatggcacttttaatgccagtgtttttgttcattatggctgtcgaggcctgaacatgtatgtaattttggcacggagccgtgtttttcctcattttcgagcactaagactcgcttgttgattatctgaaccggttcaccaagcatgagtcgccccgtgtcaaggtgacgagtgaggtatccgtatcccagaggcgtaggagtccctcggctcggtcggccttgttgtctgaggctcctctagcttagttaaagggaccccttggccgctcttcgacgagccgaggccaggggtagcgatatcagcatgaacagaggcggagttggctcgaaaatgaaaacctggtcggccggagcctagccgggttgtccattagcgggaccgacgccggagttgaccagccgaggcctcaggtcgggctggcgcccttgggagatggttggccgaggccccaggggtaaacagccgagccgcctgctcgggccggattcccggagaagtccctggcagccgttgtccgggcgtggcgatgacgtcgtcctccagaatggggatccctggaccgcgtcgccgtccgaggctaggtcagaccttgctgaagttgtcatcgatgccgagggtgctgctgcccccttccagcgtcaagacccgagcctgcaggatcagattgtcttgtagcgtgtgtcttctgtgaccgccgaggccagaacacacaccctcgctgtgttgtaaagctgtgtctcttttcctcttgtttcgagtatctggactttttcgttggtaacagggatgtttgtgcgagcgagagttgcttctcgcggaaggtgacgagtgaggtatccatatcccggaggcgtgggagtccctcggctcggtcggccttgccgcttacgcgcactttcacccgtccatgaggccctatcaccgactcagtcgagaaggctcgaaggatcgcttcggcagaagaacttccgaacgtgaagacttgttcggtccgcggaatcacttatccgaacatgagttacttatcgcagaaggtgatgagtgagatatccgtatcccagaggcataggagtccctcggctcggtcagccttggctgcttacgtgtactccgtcgttttcaggatccacttttcgaagtagtcagaaagcacgaaagatattctggcagaagagatcttttttcgaggaaaatttcaacacagagggggttcccccccttttagcccccgagggagggtcgggctttgccgaggcgaggctgacccttccttgatgactaaactttgcgtgggtgcaaggtatatgaacaacttgaaaacatcttaagggtagaagcgacgtagctgttggatgttccaagcgttgccatagacctcgccttgattgttggccagcttgtacattccaggcttcagaactttggcgatgacgaatggcccctcccaggggggcgtgagcttgtgcctccctcgggcgtcttgccgcagccgaagcaccgggtcacccacctggaggtctcggggccggacccctcgggcgtggtagcgtcgcagggactgctggtaccgcgccgagtgtagtaaggccttgtcccgagcttcttccagctggtccagcgagtcttctcggctaacttggttgctttgatcgctgtaggccctcgtcctcggggagccgtattccaggtcagtgggcaagacggcctcggccccgtagaccaggaagaacggcgtgaaacccgtggctcggctcggcgttgtcctcaggctccagaccaccgaggggagttccttcatccatcgcttgccgaacttgttgaggtcgttgtaaatccgaggtttgagcccttgtagaatcatgctgttggcacgctctacttgcccattcgacatgggatgagccacggcggcccagtccacccggatgtggtgatcttcgcagaagtccaagaactttctgccggtgaactgggtgccgttgtcggtgatgatggagttcgggaccccgaagcgatggatgatgttggtgaagaacgccaccgcctgctcggacctgatgctgttcagaggtcggacctcgatccacttggagaatttgtcgatggcgaccagcaggtgcgtgtggcccccgggcgccttctgcaaggggccgacgaggtccagaacccacacaacaaagggccaggtgatgggtatcgtctgcagagcctgagcgggcaggcgggtctgcttcgcatagaattggcacccttcgcaggtgcggacaattctagtggcgtccgccaccgccgttggccagtagaagccttgccggaaagcattcccgacaagggctcgaggcgctgcgtgatggccgcaagcccccgagtgtatctcttgcaggagttcctggccttcggcgatggagatgcatcgctggaggatgcccgaggggctgcggtggtagagctccttctcatcgcccagcaagacgaacgacttggcgcgtcgcgctacccgccgagcctcggctcggtcgaggggtagctctccttggcggagatattgcaggtacggggtctaccaatttcgatcgggcgtggccccgctccgctcctcctcgatgcgcagcgcctcgccctcggaggccgagggtacctcgggctgaaccgagggcgcctcgggccaagctgagggtgcctcgggctgtgccgagggtacctcgggctggaccgagggcgcctcaggctcgggcgtgtcgtcgatcttgacggagggttgatgcagatcccgggagaagacgtccgggggaaccgttgttcgccccgaggctattttagccagctcgtccgcagtctcgttgtagcaccgagcgatgtggttaagctcgagcccgtataacttgtcttccaggcgccgaacttcatcgcagtaagcctccatcttcgggtcgcggcagtggcagttcttcatgacttggtcgatgacgagctgcgagtcaccgcgggcgtcgaggcgccagacccctagctcgatggtgatccgcaacccgttgaccaaagcctcgtactcagccacattgttggacgccgagaaatggaggcgtagcacatagcgtaggtgtctcccgagggtcgagatgaagagcaggcccgcgccggctcccgtcttcatcagcgacccgtcgaaaaacatggtccagagctccggttggatcggagccgtcggtagctgggtgtcgacccattcggctacgaagtccgccaatacctgggacttgatggccttctgaggggcgaacgagattgtcttgcccatgatttccaccgcccactttgcaatcctgcccgaggcctctcggcactggatgatctcccccaggggagggatgacaccacagttaccggatgattctcgaagtagtgtcgcaacttccgcctcgtcaggatcactgcatacagcagcttctgaacttgtgggtagcggatcttggtctcggacagtacctcgctgacgaagtaaactggcctctgaacgggcaatgcatgcccctcttcttgcctctcgaccacaatcgcggcgctaaccacctgagtggttgcggcgacgtagaccaagagggcttctccgtcagctggaggcaccaagataggcgcctttgtgaggagcgccttcaggttcccgagagcttcctcggcctcaggggtccaagcgaagcactcggccttcctcaagaggcggtacagaggcaggcctctttcgccgaggcgtgagatgaagcggctcagggccgcgagacatcccatgaccctctgtacgccttttaagtccttgatgggccccatgctggtgatggctgcgatcttctccgggttagcttcgatgccccgctcggagacgatgaaccccaagagcatgccccggggcaccccgaagacacacttttcgggatcgagcttgacgcctttcgctttgagacatcggaatgtcacttcaaggtcggaaaggaggtcagaagctttcctcgtcttgactacgatgtcatcgacgtaggcttcgaccgtgcggccaatgtgttcgccgaacacatggttcatgcaccgctggtatgtcgcgcccgcattcctcaaaccgaacgacatggtaacatagcagtacatgccgaagggcgtgatgaaagaagtcgcgagctggtcggactctttcatcctgatttgatgataccctgagtaggcatcgaggaaagacagggtttcgcacccagcagtggaatccacgatttgatcgatgcgaggcagagggtagggaaccttcggacatgctttgttgagaccagtgtagtctacacacatccgccatttcccccctttctttctcacaagcacagggttggcaagccattcgggatggaatacctctttgatgaaccctgccgccattagcttgtggatctcctcgcatatcgctctgcgcttctcctcgtcgaatcgacgcagaggctgcttgaccggtcgggctccggcccgaatatccagcgagtgctcggcgacatccctcggtatgccgggcatgtccgagggactccacgcaaagacgtcggcgtttgcacggagaaagtcgacgagcactgcttcctatttagggtcgagcccgtaaccgatccggatctgcttggaggtgtcgccgctggggtcgagagggacggccttgaccgtctccactggctcgaagttgccggcatgacgcttcacgtctggcacctctttggagaggctttccaggtcggcgatgagggcctcagactcggcgagggcctcggcgtactccacgcactccacgtcgcattcgaacgcatgtttgtacgtggggccgacggtgatgaccccgttggggcccggcatcttgagcttcaggtaggtgtagttggggatggccataaacttcgcgtagcatggcctccccagcaccgcgtggtaggttcctcggaacccgaccacctcgaacgtcagagtctcccttcggaagttggagggtgttccgaagcagacgggaaggtcgagtcgtccgaggggctggacgcgcttcccgggaatgatcccgtggaagggcgcagcgcctgctcggacggaggacagatcgacgcgcaggagcctgagggtctcggcgtagatgatgttgaggcagctgcccccgtccataaggaccttggtgagcctgatgtcgccgatgacgggatcgacgacgagcgggtatttccccgggctcggcacgtggtcggggtggtcagcttggtcgaaggtgatgggcttgtcagaccagtctaggtagactagcgccgccaccttcaccgagcagacctcccggcactcttgcttgcgatgccgagccgaggcattcgccgcatgcccaccgtagatcatgaagcagtcgcggacctcggggaactcctctgcttggtgatcttccttctcgtcgtcgtcgcgggccctgccaccctccgcgggtggcccggccctgcggaagtggcgccgaagcatgacgcactcctcaagggtgtgcttgacgggcccctggtgataggggcacggctccttgagcatcttgtcgaagaggttgggacctccggggggcttccgagggttcttgtactcggcggcggcgacaaggtccgcgtcagcggcgtcgcgtttcgcttgcgacttcttcttgcctttcttcttggcaccacgcggagtagacgcctcgggagcatcttctgatgggcggccctggggcttcttgtccttttgaaagatagcttcgaccgcctcctggccagaggcgaacttggtggcgatgtccatcagctcgctcgccctggtgggggtcttgcgacccaacttactcaccaggtcgcggcaggtggtgccggcaaggaacgcgccgatgacatccgagtcggtgatgttgggcagctcggtgcgctgcttcgagaatcaccggatgtagtcccggagagactctcccggctgctgccggcagctttggaggtcccaggaattcccggggcgcacgtacgtgccctggaaattgccggcgaaggcttggaccaggtcatcccagttggagatctgccccggaggcaggtgctccaaccaggcgcgagcggtgtcggagaggaacagggggagattgcggatgatgaggttgtcgtcgtccgttccacccagttggcaggccaggcggtagtccgcgagccatagttccggtctcatctcccccgagtactttgtgatagtagtcgggggttggaaccgggtcgggaatggtgcccgtcggatggcccggctgaaggcccgcggaccgggtggttcgggcgagggactccgatcctccccattgtcgtagcgtccgccacgcctggggtggtaacctcggcgcaccctctcatcgaggtgggcccgacggtcgcgatgatggtgctcgttgccgaggttgcccggggccgcaggcgcggtgttgcgcgtgcgcctggtgtagaccgaggcttcccgcatgaatcgggaagtcgcggcatgaggttccgaggggtatccctgccttcgggaggcagagctctcggcccgtcggaccgcagcgccttccatgagattcttgagctctccctggattcgccgaccctcggtggttgatggctccggcatcgcgcggagaagcatcgctgctgcagccaggttctgaccgaccccactggatgcgggtggcggcctgaccctgacgccgtcggcgacgcggtgctggagaccctggggccggtgacgtatttctccggccgggggttggctcgcccatgcctgcccgacgtcccggtggatcggctcaagcactcctgctccctcgtcgagcctggcctgcgccccgtggacttgctcgagctgtgggtcgtgaccccccgccggaacggggaccacagctagctcccgcgggatgtcagcgcgaggcaccggcctagggagatcaccgtcctccagcatgccgagatgattgccttcggagggatcccctagatcgacgtggaaacattcgcggcttgggccgcagtcctcgtcgtcgaggctgcggctaccgtcggaacagtcggagaggcagtagtcacatgcggtcatgaagtcccgcatggcactggggttgccaaatccagagaaatcccaacagatgttggggtcgtcatctccctcggacccaaagggcccgtaggtcgagacgtccgtcaaccggtcccaaggcgaccgcatgcgaaaccccagagggtttgatctcgcctctacgagagcgcccaccaaagcaaggtcgctaggcgggttgaggctgagtccaaatgacgtaggatgggaatcggtcggtacctttcggtcgacgagcagcgacatagtcacgtcggggactgattgcaccgtcgtctcaggtacgagggcgacgtcctgcaagctctccgcgagcgcactggcgtcgtccacttgctcgggattggcgtgtcgcggggagatggcgctcgccttcgtctcaaacgcgaggtcgacacccgacgcgcccctcgttggagcgctggggacgtcgactcgctcgacagccgacgaggcgcagcctcccgcttggccttggttgccccgcctcctcctccgttggtgggggagaggacggggtgagctcgaatgttgttcttccgccacgcggggaagacgtcgtcgattccaccaccggcgggcgggctgtcggccgccattgtcgttgtcgcacggcggtggaaggagtatcatgtcgtagctgccgtcgaaggacatgaactcaagactcccgaaacagagcaccgtcccgggtcggagaggttgctggagactgcccatctgaagcttgacgggaagctgttcgtcaacacgcagcaggcccctacctggcgcgccaactgtcggcgtttcgagactggggggtccctaagccgacgagtgaatgtcgctgcgtgccccagcccagatgggtcgacgcgaggccgagcgcgaaggggggaagtgaggtggccggagatgggcgtgagagaggtggaaatcccgcggccttcgtgttcgtcccgcgcccaggtcgggtgcgcttgcagtagggggttacaagcgtccacgcgggagagggaagcgagcggccccaagagagcgcctgtcccgtcctcgtccccgcgcggccaaccctctctaagagggccctggtccttccttttataggcgtaaggagaggatccaggtgtacaatgggttgtagcagagtgctacgtgtctagcgggggagagctagcgccctaagtacatgccgatgtggcagccggagagatcttggcacccagctggtgtgatgtcgtggccgtcggaggagcgacggagcctggtggagggacagctgtcggagcggttgagtccttgctgacgtcctcctgcttccgtaagagagctgagagccgccatcgtcacagagcttgcggggcaccatcattgcctatctggcggagctagtcagatgggacaccggtcttgttctctgcggcccgagtcagctcggggcagggtgatgatggcgcttcctgtgacgcggctgacttgcgccctaggttggggcgacgtggaggctcctccgaagccgaggtcgagtctgttttccatggccgaggccgagtctgagccccctggggtcgggcgaggcggaggtcgttcggcagaggccaggggcggagtccgagccctagggtcgggcgaagcggagtttgtcgttttttggggctgagcccaagtccgagccctggggtcgggcggagcagagttcgccgtcttccgggactagcctgagtctgagccctgggtcgggcggagcggagttcaccgtcttccgggacttagcccgagtccgagccctgggtcgggcggagcggagttcgccgtcttccgggacttagcccgagtccgagccctaggtcgggcggagcggagttcgccatcttccgggacttagcccgagtccgagccctgggtcgggcggagcggagtttgccgtcttccgggactcagcccgagtccgagccctgggtcgggcggagcggagcttcctatggtgtctttggcagggcctggctgcctgtcagtctcactttgtcaagcggcactgcagtcggagtggcgcaggtggcgctgtccttttgtcaggctggtcagtggagcggcgaagtgacggcggtcacttcggctctgccggggggcgtgtgtcaggataaaggcgtcaggccacctttgcgttaaatgctcctgcgattcggtcggtcggtgcggcgatttagtcagggttgcttcttagcgaaggcagggcctcgggcgagccggagatgtgtccgccgttggaggggggcatcgggcgagacggaaatcctccggggtcggctgcccttgtccgaggctaggctcgggcgaggcatgatcgagtcgctcgaatggactgatccctgacttaatcgcacccatcaggcctttgcagctttatgctgatgggggttaccagctgagaattaggagtcttgagggtacccctaattatggtccccgacaaggctgggctcgggcgaggcgagatcgtgtcccttgagtggacggagccttgaccggaatcgcgcccatcaggcctttgcagctttgtgctgatgggggttaccagctgagattaggagtcttgggggtacccctaattatggtccccgacaatgacagatgtcccgttcaaatcgaccaagaccagcacccaacataagacttctctagttatttagcctagaccagcgccatgatagttctcatggttgcactattttcctcagtggtactccatgttccaattaactcatatgatcttgtttatgttagaaatatgccctaaagataatcatagagatgagcatatttctttgtatccatgatatatatatattgcttaattgaatatccatgaaaggcaccttgtattgtttagcagttatgtgaattgtttgtgagattctttacttgtatggttattctaaatgatgtccctagttagagtcgatgactagcacatgtattagttgatgactacatttcacaagtcatggacatggagatgttaaactaataatgtggggatgacatgaggctataccgacccaacatgagatattgtaatatagttctctttttgcaacatgtatactgtatccttagacctgagattgtcgcatgttctcaagatatgaattgacttacttagggactattaaacgctactccgtaactggatagttataaagataattttgggtatgtcaggaagcatgatgtgaggcatgatcagtcaagatgaaatttgtccctctcttattgagagagatatctctggacccctccagtgattggatcaagaaatgcatggttgtgctagggttaagtgttaactaatgaaaggattctaattcacagtatcgagaaagagaggtcagcttagagccagaccaaatatcgtgaaacaaagggaacaacatgtacataatgttgcagtggttcatctgatatgatctttacgtgcgcataggagttgacatgtcttgctagaggctgctgtctattattaggctaagtaagagtacttgggccatgtctatatgtacgtgaacctatagggtcacacacttaaggggaaggaagcctaactcaggttagatccgaaattagatagggctttagggttactgatgggcctcggagttagaagcccaccagaacgcctatataatgaggggtaggggcatggttaggtgaaccctaatttgccaccagtaaacgagcagccacctgtccctcgctctctcctagccaccgttgcgaacctagaagtttggaacgcgacgcttcctccctgtatgtgtggataccttggaggtgctgcatctagagcactaggacaaaccgcgcgaggacgtaaaggtcgatgacgactgcatagcactgctcgatgcgttcgtctacatcgagacatcttccgctgccctacgcgttagtggtaattccatgatctataaccgcagtagttcctagttttatggggtcgaaaattttgttttatgctagtgtaacctccccataatccttcagtttaatcaacgaggcatccacaatagcaatgataatggtaacatgatctttggaacaataatatcataaacatgagtgtctgcgtaaagttaaagttatagcaatagcataactactaaagtaaagtacaatacctaggtttgatcaaggaataaggttggaaaggttatgtgtatttgaataggtaacccatcaaattatgcttctcatgaatgtaaacttagttatcatgtgttgaataggttcaaacataatatggagggagagaagaccacttgccttgcttaaagaaaaagccgagattcttcctcatgattgaatcttgattctcaaatatgaggtcaataactgaacatcgcataaacaaacaagaaacatacaccattcaataacatacaacattcaccatagacaaagctaaaagaaagcataacggaaagagaatttgcttttcaaaaacatcacaagcaatagttataacaaaaggtgctcttttgaaaattgtttggttcatattttataaaacaagacataagcgtgaaaacaacttaactataaatttatgaacatttggtgaacattttaatcttttttgaagagttatatagaataactaaagctatgggttaaaagattataaaacacattataacattattatgcctcattgaaaagctaaatctaaacaatattcaaatgcaatgataagaacaaatggtcatattttatttttattaggaatcaaaattataaacttcgcatttctaaaagatgaaattatcattctaaacatggtatagactactatgcttattttaataattttagaatagactaatgtgttattaacatggataagcattatacatgttatacacatgtatatataaaacttgaacatctaactaaatctttcatttatcttttagctttgatcgagaaat

SEQ ID NO: 872 - DNA, 9601 bp, Zea mays
  Intron number 2 from transcript GRMZM2G076789_T01 (locus G RMZM2G076789) derived from phytozome v7.0 (chr-ID 1; pos 1 74432256 to 174441856 reverse strand)
acatgtatgagtttgcaatctaaacaaaacagttagtgtttacatgtattttattcttattgaaagggaattaggctcacacctatttcctataactaattttggtggttgaattgcccaacacaaataattggactaactagtttgcccaagtttataagttctacaggtaccaaaggttcacacttagccaataaaaagaccaagtattgggttcaaacaaaggagcaacggccaaccgaaggcaccctggtctggtgcaccggactgtccggtgcaccaccggacagtgtccggtgcaccagggaagaccgacttcaaactcttcaccttcgggaattctcggaagccggcgcgctataattcaccggactgtccggtgtacaccggacagtgtccggtgctccacgaagtcgcgactccgaactcgccaatctcaggaattcgcttcggctgctccgctataattcaccggacatgtccggtgtacaccggactgtccggtgtaactgcggggcaacggctacttccggcgccaacggctacctgcagtgcattaaatgcgcgccagcgcgcgcagaggtcaggcatgcccatgctggcgcaccggacactctacagtacatgtccggtgcgccacaggacatcaaggcgggcccagaagacagagctccaacggtcgaatcccaatggctttggtgacgtggctggcgcaccggacatgtccggtgtgcaccggactgtccggtgcaccatacgacagtcagccccaccaaacggctagtttggtggttggggctataaatacccccaaccacccaccattcattgcatccaagttttcccacttcaactacttacaaagagctctagcattcaattctagacacatcaaagtgatcaaatcctctccaaactccacacaacgccctagtgattagtgagagagatttgcttgtgttctttcgagctcttgcgcttggattgctttcttctctctttgattcttcattgcgatcatactcacttgtaattgaggcaagagacaccaatcttgtggtggtccttgtgggaactttgtgttccaaacatttgagaagagaaagctcactcggtccgcgggatcgtttgagagagggtaagagttgaaagagacccggcctttgtggcctcctcaacggggagtaggtttgcgagaaccgaacctcggtaaaacaaatcatcgtgtctcacttcgcatttgctcacgatttgttttgcgccctctctctcggactcttgtttatttctaacgctaacccatctcgtagttgtgtttatatttataaatttcaatttcgccctattcacccccctctaggcgactttcaattggtatcaaagcccggtgcttcattagagcctaaccgctcgaagtgatgtcgggagatcacaccaagagggagatggagaccggcgacaagcccactacgagccacgggagcacttcatcggaagagtcccgcaccaagaggaaggagaagaagaaggattcctccaaacggaaggagaaaagatcttcttcttctcaccacaaagagaagaaggagaaatcttcttcccacaagtcgcatcggagaggcgacaagcacaagaggatgaggaaagtggtctactacgagaccgacacttcatcaacatcgacctccgactccgctgcgccgtctataacttctaagcgcaaagagcgtaagaagtatagtaagatccccttacgctacccttgcattcctaaacatacacctttgctttctgtcccattaggcaaaccaccaatgtttgatggtgaagactatgctaggtggagtgatttaatgtgatttcatctaacctcactccacaaaagtatatgggatgttgttgagtttggtgtacaggtaccatccgtaggggatgaagattatgatacggacgaagtggcccaaatcgagcacttcaattcccaagccacaaccattctcctcgcctctctaagtagagaggaatataacaaggtgcaagggttgaagaatgcgaaggagatttaggaccttctcaagaccgcgcatgagggtgatgaactcaccaagatcaccaagcgggaaacgatcgagggggagctcggtcgcttccgtcttcgccaaggggaggagccacaagatatgtacaaccgactcaaaaccttggtgaaccaagtacgcaacctcgggagcaagaagtgggacgaccacgaggtggttaaggttattctaagatctctcattttccttaaccccactcaagttcaattaattcgtggtaatcctagatacacactaatgactcccaaagaagtaatcgggaattttgtgagctttgaatgtatgattaaaggctcaaagaagatcaacgagcttgatgaaccctccacgtccgaagcacaaccggtggcattcaaggcgaccgaggagaagaaggaggagtctacaccaagtagacaaccaattgacgcctccaagctcgacaatgaggagatggctttaatcatcaaaagctttcgtcaaatcctcaagcaacggaaggggaaggaatacaaatcccgttccaagaaggtttgctacaagtgtggtaagcccggtcactttattgctaaatgtccattatcaagtgatagtgacagggataacgacaagaagggcaagaggagagaaaagaagaggtaccacaagaagaagggcggcgatgcccacgtgtgccgcgagtggaactccgacgagagctccaccaactcctcctccgacgacgaggacgccgccaacatcgccgtcaccaagggactcctcttccccaacgtcggccacaagtgcctcatggcaaagaacgacaaaaggaagaaggttaaatctaaatcctccactaaatatgaatcctctagtgatgataatgctagtgatgaggagaataatctgcgtaccctttttgccaaccttaacatggaacaaaaggaaaaattaaatgaattaattagtgctattaatgaaaaggatgaccttttggattcccaagaggacttcctaattaaggaaaacaagaaacatgttaaggttaaaaatgcttatgctctagaagttgaaaaatgtgaaaaattgtctagtgagctaagcacttgccatgagaccattgacaaccttagaaattaaaatgctaaattaattgctaaggttgattctcatgtttgtattgattcaatttccaatcctagagatgataatgttgatttacttgctaggattgatgaattgaatatttctcttgctagccttagaaatgagaatgataaattgattgctaaggctaaaaattttgatgtttgcaatgttacaatttccgatcttaaagataaaaatgatatattacgtgctaagattgttgaacttaattcttgcaaaccctctacatctaccgatgagcatgtatctatttgtgatagatgtagagatgttgatatcaatgctattcatgatcacatggtattaattaaacaacaaaatgatcatatagcaaaattagatgctaaaattgccgagcataacttagaaaatgaaaagtttaaatttgctagaagtatgctctataatggaagacgccctggcatcaaggatggcattggctaccaaaggggagacaatgtcaaacttagtgcccctcctaaaagattgtctaattttgttaagggcaaggctcccatgcctcaggataacgagggttacattttgtaccctgccggttatcccgagagcaaaattaggagaattcattctaggaagtctcactctggccctaaccatgcttttatgtataagggtgagacatctagctctaggcaaccaactcgtgctaagttgcctagaaagaaaactcctagtgcatcaaatgatcatggcatttcatttaaaacttttgatgcatcttatgttttgactaacaaattcggcaaggtagttgccaagtttgttgggggcaaacacaagggctccaagacttgtgtttgggtacccaaagttcttgtttctaatgccaaaggacccaagaccgtttgggtacctaaaatcaagaactaaaattgttttgtaggtttatgcatccgggggctcaagttggatcatcgacagcgggtgcacaaaccacatgacgggggagaagaagatgttctcctcctacgagaaaaaccaagatccccaacgagctatcacattcggggatggaaaccaaggtttggtcaaaggtttgggtaaaatagctatatctcctgaccattccatttccaatgtttttcttgtagattctttagattacaatttgctttctgtatcccaattatgtcaaatgggctacaactgtctatttactgatgtaggtgtcactgtctttagaagacgtgatgattcaatagcatttaagggagtgttagagagtcagctatacttggtagattttgatagagctgaactcgacacttgcttggttgctaagactaacatgggttggctctggcaccgtcgactagcccatgttggaatgaaaaatcttcataagcttctaaagggagaacacattttaggactaacaaatgttcattttgagaaagacaggatttgtagcgcatgccaagccgggaagcaagttggcactcatcatccacacaaaaacatcatgactagtgacaggccactggagctcctacacatggacctattcggcccgatcgcttacataagcatcggcgggaagtaagtactgtctagttattgtggatgattattctcgcttcacttgggtgttctttttgcaggaaaaatcccatacccaagagaccttaaagggattcttgagacgggctcaaaatgagttcggcttaaggatcaagaaaatttagaagcgacaatgggacggagttcaagaactctcaaattgaaggcttccttgaggaggagggcatcaagcatgagttctcttctccctacactccacaacaaaatggtgtagtggagaggaagaatcgaactctattggacatggcaagaaccatgcttgatgagtacaagacaccagatcggctttgggccgaggcggtcaacaccgcctgccacgccatcaaccggttatatctacaccgaatcctcaagaagacatcctatgaactcctaaccggtaaaaagcccaatatttcgtattttagagtttttggtagcaaatgctttattcttgttaagagaggtagaaaatctaaatttgctcctaaaattgtagaaggcttttttactaggatatgactcaaacacaaggccatatagagtctttaacaagtcctcaggacttgtttaagtttcttgtgacgttgtgtttgatgaaactaatggctctcaagtagagcaagttgatcttgatgagataggtgaagaacatgctccgtgcatcgcgctaaggaacatgtccattggggatgtgtgtcctaaggaatccgaagagcctccaaatgcacaagatcaaccatcctcctccacgcaagcatctccaccaacccaaaatgaggacgaggctcaagttgataaaggagaagatcaaagaaatgagccccctcaagatgacggcaacgatcaagggggagatgcaaatgatcaagacaaggaggatgaagaaccaaggccgccacacccaagagtccaccaagcaatccaacgagatcaccccgtcgacaccatcctcggcgacattcataagggggtaaccactcgatcttgtgttgcacatttttgtgagcattactcttttgtttcctctattgagccacacagggtagaggaagcactacaagattcggattgggtgatggcgatgcaagaggagctcaacaacttcactaggaacgaggtatggcatttagttccacgtcctaatcaaaatgttgtaggaaccaagtgggtcttccgcaacaagcaagacgagcatggtgtggtgacaaggaacaaagctcgacttgtggccaagggatactcccaagtcgaaggtttggatttcggtgaaacctatgcacccatagctaggcttgagtcaattcgcatattattagcctatgctacttaccatggcttcaagctttatcaaatggacgtgaagagtgccttcctcaacggaccaatcaaggaggaggtctatgttgagcaacctctcggctttgaagatagtgagtaccctaaccatgtctataggctctctaaggcgcttttatgggctcaagcaagccccaagagcatggtatgaaatgccttaaaagaatttccttatggctaatggcttccaagtcggcaaggccgatcctactttgttcactaaaacttttgacaatgatttgtttgtatgccaaatttatgttgatgatattatatgtgggtctcataacgaatttacatgtgaagaatttagtaggatcattacacaaaaattcgagatgtctatgatgggggagttgaagtattttctaggattccaagtcaagcaactccaagagggcaccttcattagccaaacgaagtatactcaagacattctaagcaagtttggaatgaaggatgccaagcccatcaagacacccatgggaacgaatgggcatctcgacctcgacacgggaggtaagtccgtggatcaaaaggtataccggtcgatgattggttcattactctatttatgtgcatctcgaccggacattatgctttccgtatgcatgtgtgcaagattccaagccgaccctaaggaatcacaccttacggccgtaaaacgaatcttgagatatttggcttatactcctaagtttgggctttggtaccctcggggatccacatttgatttgattggttattcggatgccgattgggcggggtgcaaaatcaataggaagagcacatcggggacttgccagttcttgggaagatccttggtgtcttgggcttcaaagaagcaaaattcggtcgctctttctaccgccgaagccgagtatattgccgcaggccattgttgtgcgcaattgctttggatgaggcaaaccctgcgggactatggttacaaacaaaccaaagttcctcttctatgtgataatgagagtgcaatccgcatggcggataatcccgttgagcatagccgcactaaacacatagccattcggtatcattttcttagggatcaccaacaaaagggggatatcgagattgcatacattaatactaaagatcaattagccgatatctttaccaagccactagatgaacaaacttttaccaaacttaggcatgagctcaatattcttgattctaggaatttcttttgctaaacttgcacacatagctcataagtatacctttgatcatgtctcttttatatatgctatgactaatgtgttttcaagtgtatttcaaaccaagtcatagttatattgaaagggaattggagtcttcggcgaagacaaaggcttccactccactctactactcatccttcgccgtcgctccgcatcactctccatctttggtataatcttcacttatatgttttatttgccaaaggggagaaagtagttaggaaagggcttatatctcactcaaagtatccgtttttggcgattcatgccaaagggggagaaagtatgagcccaaagcaaaaggaccgcaccaccaccctaatttaaaaaaaattgatgattttcaattggtaaatttcaaatgggtatctctttgtgttctaaagggggagaaagtagtattttcaaaattgatatcttaaaaccctcttgaacactaagaggagaatttatttaagggggagttttgtttagtcaaaggaaaagcatttgaaacaaggggagaaaatttcaaacttgaaaatgctttgcaaaaatcttattcatctacctttgactatgttgcaaaaggactttgaaaaggatttacaaaaagaatttgcaaaaacaaaacatgtggtgcaagtgtggtccaaaatgttaaaaataaagaaacaatccatgcatatcttgtaagtattgatattggctcaattccaagcaacctttgcacttacattatgcaaactagttcaattatgcacttttatatttgctttggtttgtgttggcatcaatcaccaaaaagggggagattgaaagggaattaggctcacacctatttcctataactaattttggtggttgaattgcccaacacaaataattggactaactagtttgcccaagtttataagttctacaggtaccaaaggttcacacttagccaataaaaagaccaagtattgggttcaaacaaaggagcaagggccaaccgaaggcaccctggtctggtgcaccagactgtccggtgcaccaccagacactgtccggtgcaccagggaagactgacttcaaactcttcaccttcgggaattctcggaagccggcgcgctataattcaccggactgtccggtgtacaccggacagtgtccggtgtacaccggacagtgtccggtgctccacgaagtcgcggctccgaactcgccagtctcgggaattcgcttcggctgctccgctataattcaccgaacatgtccggtgtacaccggactgtccggtgtaactgcgggggcaacggctacttccggcgccaacggctacctgcagtgcattaaatgcgcgccagcgcgcgcagaggtcaggcatgcccatgctggcgcaccggacactctacagtacatgtccggtgcgccacaggacatcaaggcaggcccagaagacagagctccaacggtcgaatcccaacggctttggtgacgtggctggcgcaccggacatatccggtgtgcatcggactgtctggtgcaccatacgacagtcagccccaccaaacggctagtttggtggttggggctataaatacccccaaccacccaccattcattgcatccaagttttcccacttcaactacttacaagagctctagcattcaattctagacacaccaaagtgatcaaatcctctccaaactccacacaacgccctagtgattagtgagagagatttgcttgtgttctttcgagcttttgcgcttggattgctttcttctctctttgattcttcattgcgatcatactcacttgtaattgaggcaagagacaccaatcttgtggtggtccttgtgggaactttgtgttccaaacatttgagaagagaaagctcactcggtccgcgggatcgtttgagagagggtaagggttgaaagagacccggcctttgtggcctcctcaacggggagtaggtttgcgagaaccgaacctcggtaaaacaaatcatcgtgtctcacttcgcatttgctcacgatttgttttgcgccctctctctcggactcttgtttatttctaacgctaacccatctcgtagttgtgtttatatttataaatttcagtttcgccctattcacccccccccctctaggcgactttcacttatgtagtatttataattgttttgtaggtgtttatttcgataaacatccgagagacgcact

SEQ ID NO: 873 - DNA, 1843 bp, Zea mays
  Intron number 1 from transcript GRMZM2G079746_T01 (locus G RMZM2G079746) derived from phytozome v7.0 (chr-ID 8; pos 6 2827973 to 62829815 reverse strand)
tgttgtcgcagcttcctgtctcatcgccggattcggtacgcgccctggcttctcctccgcaaaccctactagatgtgccccttgctttcggtgtgccttggcttcggggttccggttgacgttgactccgtcgtagggttctggtagggcttacatttcttttcacttgctactattcgttatatccagtattctatctcagaagttttcagtagctctgccccaatggccattgacacatgattcattaatattatactaactgacaggctatacatttacttgttcactacaaagattcagctgttacatttcccacccaagatagttaaactgcaatgctaactagtactccctccattccacattgtaaatcgatatagatttgtgtaactttgaccaagtttatagcaaaatatattaaaaagtgcaccatcaaaatatatttcatggtatatctaatgaattagttcgatgatgtaaatatctgtgcatttttctatagtcgtagtcgaagctagagtggtttgacttaggacaaaactaaaatcgcttacaatttggaatggacggagtaggagtactcttaagtacctaaagaaaagttgagaagctagctgtaattgaactattgaagacaaaataggttaatgctagaccggttttcagctcaatttgactagtttttgttgcctctcttcacttttaaatctctatttctgttttacctgaaaatgttctatgtgaaatccgctgtattttgttggtgcagatgtgtgccataataggtattattttctccatccaaaatctggttatgctaagttcctaatcttcctccaaaattgcattaaaaagcgaacacttgctttgcttgtagaggtagaccgcattaggttatgtgttatgaatttgaatggcatttgaaaagacttgattgccaacaaggaggtttctaccgtctaccaataataaatagactcatgaaaaccaatatagcctgtagaaattgcccaatgcacacacaaaaagtgttagcccacatcatttatgaactctgctttgtggattcattcatttggatagtacaagtaatagctctgtccactttatgtggtgttgtaggctagaaatgtttgtgtgcatttgttgaatttaacctatttataccattgtatattagtaacgtcaatagtttgcctcagtttatccttcacaatcccttgctatctagtttgactaagtaacggcgttgtcctaccctaaacacgctggtgacaactcacgagccagagtgatctcaggttgacagttttgtgtgggaactggataattttttgctggcagctactgttgttcaaatttatggagcatcataagcactaggcattcaattcttctcacagtttctacctataaagggtcaattcaaaagtgatgagattgaatgtacattgtgtgaagcccatttaaaaaaacaagcatcgaacaacttaagtagtggtcttgctatggttatgattcatgacccaaaatgttcttgtgcaatttgacactttgcagcgattagcaggggacaaacggataggaagtggtgctgtgtgcgtcataatttcagaaagaaacaagatcaattttattgattctgtgaagtgtgaacacacattttaacaaacttgtttcctaagttttactgacttgcctgcctgaacctttgcaattatctactgggaaatgttaacacctgctattgatttgattttccttctgccaaatgatttcaactaaccttatatgtgtaatttcaggtctctttcttccagcagttgtccggccaatcctg

SEQ ID NO: 874 - DNA, 1217 bp, Zea mays
  Intron number 7 from transcript GRMZM2G116714_T03 (locus G RMZM2G116714) derived from phytozome v7.0 (chr-ID 1; pos 1 72280374 to 172281590 reverse strand)
agttttcggtaaatctctttctttcagtcctgttgttatcccacaaatagctggtaatctaaaaaggttctatcttacacaattattgattttacagtttgatctatgcttttgattgcatatgcaccgatatggatagtgaaaccttttagccaatgttgatcacatatattcttgatagatcatacacctatctggtatctgaatgattggttctctgatatcctccaatatctgacatcgtagatcacatatgtttgtgtttactccagccagatattaggatgcaaacttgggaggtagtgtatactttaattgcatttgtttctatcccagatgaaaaaatatttctatgataaatccttggaatgatatttttaccaagtcaagtatgttgcattgttaccatgattcaaatgcaattcacatggctctggtggcataatatatcctatatggtaaattccttgtagtcgattctgtcgatttgatctatattcagtgaactgcactcaagactatttagtttgacttttgataataacagattggtgatgtgattcttaatataatgcacttagacctgctgtgcaggtttctttagttgtttctgagattttccgcaaatacatttgtgtgaatttgctatttaaggataaataaaattttcctctctgatgcaccagaaaacttggacatcagtgagttatctattgtacaaggtcgtaatagttgcctaatagaatgtaagtaaacatgggctggtattccgatcatctgatgaatggcaagtaaagttaaaaaatcggtggatttatctctactcttgaagctaaattgctattcggtctgaaatttgaagacgttctcgagaaacttgctgtgaagcaacctcgagattatcttatggctattgctgatattgtactccggggaactctgttgtcacttagggcttgttcgtttgggagggattgagtcggtttaaatccataacaagtcaaaatacatcccaatcccacccaatacactccaatccacatgaaatatcaataaccgaacaaggccttaggagggcattttccctgtgtttaaattggtggttgtgctagtgtcttgttattccacaatactatattttgatgtactgcctgtagatttagtacatggaatcttgaacttgaagtgatgcctcacactgcataactgtgcaggaa

SEQ ID NO: 875 - DNA, 3772 bp, Zea mays
  Intron number 7 from transcript GRMZM2G033135_T02 (locus G RMZM2G033135) derived from phytozome v7.0 (chr-ID 1; pos 2 74255494 to 274259265)
accaatctttccaaggcttgtcactgcttctgtttgttcattaaattcagttctctaagatcaatatatttacctgtttttattgtgcttggcgtttttagatttcagtatattaaaaatttatattgacatggtttttcatgtgcatggaaaacaactatccatgtgcctgaaccttgacttgtggtttctattgattcaactctagccttttttcttgaatacgcaggaaagctgcatatcattgtattaaggtagaaaagagggggggggggggttcttacaaaagaaaactacacccccactccgaaaccaagagtgaggggtttgaaccgaaacaaactaaagagagacctggtctaaggaaggagaaacacttgacccccacggccccacacacactagagccctaaggaactccaaaggtggcgctcctccaaataggcctgcacagcagcttgtacccgcggttgggctccttaaaaaagtaaaaaacacaagcattacgaagtttccataaagtccaagcctccagatcaacctgagttgagacccctcctaatatccttttggagatttttgcataccttcctccacgattctgtgaacttttgaagcaaggctaagaggagctaagattttatgccaaaggtcccgggcaaagacacaagtggtaaaaaactaaaatgtgttgaatgacctcctcttggtcacaaaagcacaatgttccggatgagggaggcctcgcttctttaacctgtcagctgtccaacaacggtttccaatggccatccaaagaaaaaccttgcactttgtaggcgcccaagacttccaaagcctcttccaaagttcgaaggagatagaaccattggagaaggccctaaaagtaaggatccctgctgacaaggcccctgggcctgatggttttactggtcgcttttacaaggtatgctggcccattataaaagttgatatgatggctgcaatctccgctatttggggtaggaagtttgataattttgggtgccttaattctgcatatataaccatgatcccaaagaatgatgaagctgaaatggtgaaggatttcaggcctatcagccttgtgcatagtttcgctaagttgatcacaaagatcctagccaataggttggctaaaaggcttaatgagatggtgtcacctaaccagagtgcgttcattcaaggtagattcatccaggacaattttatgttggttcaacaaacctcaagattgcttcaccaacagcataaggcttcttcgctctacaagttggatattactaaggctttcgactcgatttcttggcctttcctagttgaagtattgaagcagcttggttttggtcagatttggagggatattatttgtggtttgttgacctcttcctctactcaagtgatgctgaatgggtttccaggacaacacatcatccaccggagaggacttcggcaaggggatcccctgtctcctttattgtttattcttgccatggatgtcctggtatatatgttttccaaggcagaggaggagggtttactccagcagttatccaacaggaaaagctccatcggatctccttatatgctgatgatgttgccctttttgttcacccatcagcagcagatttatctatcactcttggtattcttcagctttttggggatgcctctgggctgcacaataatgcccagaaatctaatgtcattcctatcagatgctcaatggaggatatggtggaaacccaaggtctgctgccttgtggaatatcttcgttcccttgccgttatttgggtcttcctttatccttgcacaagctgtctaggcagcacctccaaccttttattgatagaattgctgaccagctatcaaattggaaggcagacttattgacgaaggcagggagaagaaccctagttcaacatgttcttaccagcatgacggtttatatggcaatggcagtggatatcccacaatggggtttagatgccattgacagattaaggaaaggtttcctttggcgaggtcgaaaagaggtaaatggggggcactgccttgtagcttggagaaaggtttgccgcccccttcagcttggtgggctgggtatctccagtttaaaagaactctgctgggcccttcgaatgagatggctatggctgtctaaaacagacccctccaggccctggattggtctcccaatgaaaatcccaaaaaaggccacttccttctttaatgaggtagtgctcactgaagttggtgacggggccagcaccaaattctggaaagacaagtggttacacggtaaaaaaattgcagacatggcacctagactcctagctacaattcctaagcggattgtgaacaacagaactgtgattgaagctttgactaacagaaaatggattgccgatataaaaggggctctctcagtgggtgtgttgattgattaccttcagctatgggagatgctctcagccattgagctgcagcctggagttgaagacagacatattttcagtattgccccggatggaatgtactctgcaaaatctgcttataatggactgttcatgggttcagtttcctttggacacttcacaagggtttggaaaacctgggccccgccaaagtgtcgttttttcatttggcttgctgaccataatagatgctggacagcagatcgtttagctaagaaaggcctaaaccaccatgagaaatgtctgctttgtgaccaagctgaagaaacccttgatcatcttctggtggcttgctccttctcgagagtcttttggtaccagtttttccggaaatttgggcttcactccctacttctctagctccccagtgggcggtcacctccttcttgaattggtgggaggaggtttcagaggtggtctcaggtgtcaccagaaaaggccttaactccctcattatcctgggtgcttggactatttggattcatcggaacaaatgtgtcttcgatggattgtctccttgcctcacctatatccttgcttgggcagacgaggagagaagtcgttgggaggcagctggggcgaagggcctatgttctctggctgcttctgcagctgctccctagagtggtgtgttgtttgttcctttcacatgatgagttcttttttgtatgctattttctggcccccgtgaggaggcctgctgttgtttggtctattttagacctttttcctatcttcttaatatataaaggggcgcagctctcctgcgcgttttcgagaaaaaaaaggccctaaaagcagatttggaagagtaaactccaggaaccgtgaatctccaaatgtggctgtcatctactcatcttgataggttcacttcctgaatggcatcccacagctgaaaatattcaatcaaataagcatatgagggaaaggttgccttggatgtctgctgtccagctaaagtccaccaaagcttcttcaactgtcttctttaaacaaaactgaacaggaacagcttcaaaaaccttaggcgcaaggtcactaatgcagcaaccaaacaaccaattattgtatgattttgatatatgtggaccataaaaaacaatattggaatatgctaaacaatattcctgtaacatatacagagtaaatacttattgtcaatatgtttttggtagaacatggtattgcctttttttaatctgaagaaaagcttatgttttgtcttttgtgctcaacaggcaaatacaattttgtttccacttgaggtttgtct

SEQ ID NO: 876 - DNA, 9130 bp, Zea mays
  Intron number 4 from transcript GRMZM2G138828_T01 (locus G RMZM2G138828) derived from phytozome v7.0 (chr-ID 8; pos 1 19242336 to 119251465)
gaaaacagaagtgagagcacctagagggggggggggggtgaataggtgatcctgtaacacttaaaaacttaggccacaaaaacttggttaagtgttagcacaataaccgccaagtggctagagaggaatcttcaacaaaacacaataaccaacaagatcaatcacagagatggcacggtggttatcccgtggttcggccaagaccaacgcttgcctactccacgttgtggcgtcccaacggacgagggttgcaatcaacccctctcaagcggtccaaagacccacttgaataccatggtgttttgcttgcttttctcaatcccgtttgcgaggaatctccacaacttggagcctctcgcccttacacttgaagttcacaaagaaacacggagcaagggagggattagcaacgcactcaagacaagaaatcacagcaacaccacacacacaagtcgcaacgagagctcacaacacaactcaatgagttcaccactcaactagagctctaattgctatcgcaaagaatcaaaggcgcggaatcgatgtcttggtgcttaggaatgttgtaggaatgcttggtgtactcctccatgcgcctaggggtcccttttatagccctaaggcagctaggagccgttgagagcaatctaggaaggctgatcttgccttctgtcgactggcgcaccggacagtccggtgcacaccggacactgtccggtgctcgatttctttccaaaaatgtcttagtcgaccgttggcagcctgagagccgttggcgcactggacatgtccggtgcccccttctagccgttggctcggccacgtgtcccgcgcagatcgcgcggccgaccgttggccctactgaccgttggctcaccggacagtccggtgaattatagccgtacatcgccgatgaattcccgagagcgacgagttcgcctgtgaacggcccaccggacagtccggtgcaccaccggacagtccggtgaattatagccgtacaccgccgtcgaagtcccgagagcagcctgttcgccagagccagcctggcgcaccggacactgtccggtgcaccaccggacagtccggtgctctagactgagcagagtcttggctgctcgagccaaggcatttccaattggatttttcctgtttccagcacttagacacaatacattagtccataaaacaatgtactaagtctgagaaacatacctttattcttgatttgtactttgtccacctttttacactaggacacttgtgttggacactaaatcaccaaaatacttagaaatggcccaagggcacatttccctttcaatctccccctttttggtgatttatgccaacataacataaagcaagtagaacaactacaaaatcaattcaaataagaactcaaaattgttttgattcaaatttgacatatatggatcactctttgccaccacttggtttgtttttgcaaatcaaactcaaatttctatctctaagtcaaacacacatgttaagacataaaaagagtcattccaagagaaattgattcaagatttcaaaaactcccctttttcccataatcaatacttctccccacaagaagccaacttttgacaagagagtcaataaaagagttttgacaaaccaaaagctctattctactattttcaaaatctctcaagtggtagctgatccatttatcgctttggcctttattttctccccctttagcatcaagcaccaaaacgggatcaatcttggcccataaaccccattgcctcacaaaaatcttcaaataagaacacaaaggcaataagagtacatgagatgaacttggaataagttaccctctcatcggagtgcagtggaagtctttcatggtccaagtccaccttttccctttcaaaactcctttgagactaaatcaagcaaactcaagcaaacggttagtctcaaagggtcaagttgtagcacaactccccctaaatatgtgcatcacttgcacaaggacttgtgaggtccggggagtgtttgtacaacttgagcaccacaataagcaacaaaatgcagaatgaacatgatcaaaggcataaacacgtgtatgctacaattcaatccaagttccgcgaatctaggatattgagctcactacgcaacctgcaaaaggtcttctcatctagaggtttggtaaagatatcggctagctggttctcggtgctaacatgaaacacttcgatatctcccttttgctggtggtctctcaaaaagtgatgccggatgtcaatgtgctttgtgcggctgtgctcaacaggattttccgctattcggatagcactctcattgtcacataggagtgggactttgctcagattgtagccaaagtcccggagggtttgcctcatccaaagtagttgcgcgcaacactgtcctgcgacaacatactcggcctcagcggtggatagggcaacggaagtttgtttcttagaattccatgacactagggaccttcctaagaattggcacgtccccgatgtactcttcctatcgaccttacatccagcatagtcggaatctgagtacccaatcaagtcaaagttagacccctttggataccagatcccgaagcaaggcgtagcgactaaatatcgaagaattcgcttcacagccactaagtgacactccttaggatcggattgaaatctagcacacatgcatacgctaagcataatatccggtctactagcacataaataaagcaaagaacctatcatggaccggtatgctttttgatcaacggacttacctcctttgttgaggtcggtgtgtccgtcagttcccatcggcgtctttgcgggcttggcgtccttcatcccaaaccgctttagcaagtcttgcgtgtacttcgtttgggatatgaaagtgccatccttgagtttcttcacttggaacccaaggaagtagttcaactcgcccatcatcgacatctcgaatttctgcgtcataaccctgctaaactcttcacaagacttttgattagtagaaccaaatattatgtcatcgacataaatttggcacacaaaaagatcaccatcgcaagtcttagtaaaaagagttggatcggctttcccaaccttgaaagcattagcaattaaaaagtctctaaggcattcataccatgctcttggggcttgcttaagtccatagagcgccttagagagcttacacacgtggtcggggtaccgttcatcctcgaagccagggggttgctccacgtacacctcctccttgatcggcccgttgaggaaagagctcttcacatccatttggtacaacctgaaagagtggtgagcggcatatgctagcaagatacgaattgattctagcctagccacaggagcaaaagtctcctcaaagtccaaacctgcgacttgggcataaccttttgccacaagtcgagccttgttcctcgtcaccaccccgtgctcgtcctgtttgttgcggaacacccacttggttcccacaacattttgcttgggacgaggcaccagtgtccaaacttcattgcgcttgaagttgttgagttcctcctgcatggccaacacccagtccggatctagcaaggcctcttctaccctgaaaggctcaatagaagagacaaaagagtaatgctcacaaaaattaactaatcttgaacgagtagttactcccttgctaatatcacccaatatttggtcgacgggatgatccctttggatcgtcgctcgaacttgggttggaggtgcctgaggtgcttcttcctcttcaacttgatcatcctgtgctcccccttgatcatgcgcctctacttgaggtgcctgttcgtcatcttgggttgggggatgcaccatagttgaggaagacggttgagcttgctccaattgttcctgaggccgtacatctccaatcgccatggtgcgtatcgcggccgttggaacgtcttcttcatctacatcatcaagatcaacaacttgctatcttggagagccattagtctcatcaaatacaacgtcgctagagacttcaaccaaacccgatgatttgttgaagaccctatacgcctttgtatttgaatcataacctaataaaaacccttctacagctttgggagcaaatttagaggttctacctttcttcacaagaatataacacttgctcccaaatacacgaaaataagacacattgggtttgttaccagttagcagctcgtaagaagtcttcttgaggaggcggtgaaggtagaccctgttgatggcgtggcaagctgtgttcacggcttccgaccaaaagcgctcgggggtcttgaactctccaagcatagtcctcgccatatctatgagcgtcctgttcttcctctctaccacaccattttgctgaggtgtgtagggagcggagaactcgtgcttgatcccctcctcctcaaggaattcctccacttgaagattcttgaattcggacccattgtcgctctttatcttcttcaccttgagctcaaactcattttgagctctcctgaggaagcgcttgagggtcccttgggtttcagacttatcctgcaaaaagaacacccaagtgaagcgggaaaagtcatcaacaataactagaccatacttacttcctcctatgctcagataggtgacgggtccaaagaggtccatatgcaacatctccagaggtcttgaagtggtcatcacattcttgctgtgatgtgctcctcccacttgtttacctgcttgacaagctgcacaaggtctatctttttcgaaatgtacattggttagacctaccacgtgttctccctttagaagcttgtggaggttcttcatccccacatgagctaagcggcgatgccacaaccaacccatgcaagtcttagccattaagcatgcatctagaccgacctcttcttttgcaaaatcaactaaataaagtttgccgtctagtacacccttaaaagctagtgaaccatcacatcttctaaagacagacacatctacatttgtaaatagacaattatatcccattttgcataattgactaacagataacaaattatatccaagcgactcgactaaaaacacattagaaatagagtgctcagatgaaatagcaattttacctaacccttttaccttgccttggttcccatcaccgaatataattgaatcatgggaatcctcatttttgacgtaggaggtgaacatcttcttctcccccgtcatatggtttgtgcatccgctgtcgataatccagcttgagccccctgatgcataaacctgcaaggcaaatttaggcttgggtcttaggtacccaactcttgttgggtcctactaggttagtcacaatttccttagggacccaaatgcaagttttatcacccttgcattttgcccctaatttcctagcaactatcttcctatcctttctacaagtagcaaaggaagcatttaaagcatgataaattgtagagggaccattcataacttttctaggaacatgaacaatattctttctaggtacatgatgaatatttttcctaggcatatctctaccatgcatataggaagaactggaagcatacatgacataagaatcataggcatgtgaatcaaaagcattacaactcctatgagactgtcttctatcattgtacataaaagcatggttctttttagtactacttgccataggggccttccctttctccttggcggagatgggagccttatggcttgttaagttcttggcttccctcttgaagccaagcccatccttaattgaggggtgtctaccaatcgtgtaggcatccctagcaaattttagtttatcaaaatcacttttgctagccttaagttggacattaagactagccatttcatcatttaattttgcaatagaagctatgtgttcactacaagcatcaatatcaaaatctttacacctattgcaaataacaacattttctacacaagttgtagatttactagctatttctaacttagcattcaaatcatcattaatgctccttaagctagaaattgtctcatggcaagaagataattcacaagaaagcatttcatttatcttaacttctaaggcatgagatttttgtgcttctacaaatttgtcatgttcttcatacaacaagtcctcttgtttttctaaaagcctattcttatcattcaaggcatcaatcaattcattaattttatctaccttggttctatctaggcccttaaataaacatgaataatctatttcatcctcatcactagattcgtcctcgcttgaagaagcataagtagagtctcgagtacataccttcttctcccttgccataaggcatgtgtgacgctcgttggggaagagggatgacttgttgaaggcggtggcggcgagtccttcattgtcggagtcggacgaggagcaatccgaatcccactccttgccaagatgtgcctcgccctttgccttcttatagttcttcttcttctccctcttgttcccttgatcctgatcactatcattgtcgggacagttagcaataaaatgaccaagcttaccacatttgaagcatgagcgcttcccctttgtcttggtcttgcttggctgccccttgcgaccctttagcgccgtcttgaatctcttgatgatgagggccatttcttcatcattaagtccggccgcctcaatttgtgccaccttgctaggtagcgcctccttgcttcttgttgccttgagagcaaggggttgaggctcgttgattggaccattcaatgcgtcgtccacgtacctcgcctccttgatcatcattcgcccgcttacgaattttccaaggacttcttcgggcgacattttggtgtacctgggattctcacgaatattattcaccaaatgaggatcaagaacggtaaaggaccttagcatcagtcggacgacgtcgtggtccgtccaccgcgtgcttccgtagctccttattttgttgataagggtcttgagccggttgtatgtttgggttggctcctcgccccttatcatcacgaatcgtccaagctcgccctccaccaactccatcttggtgagcaaggtgacgtcgttcccctcatgagaaatcttgagggtgtcccatatttgcttggcgttatccaagccgctcactttgtggtattcatccctgcacaatgaagctagaagaacagtagtagcttgtgcattcttatgtatttgctcattaatgaacacgggactatccgtactatcaaagtgcattccactctctacaatctcccatatactaggatggagagagaataggtgactacgcattttgtggctccaaaatccgtagtcctccccatcaaagtgtggaggcttgccgagtggaatggagagcaaatgtgaatttgaactttgcggaatacgagagtagtcaaaagaaaagttcgaattaaccggtttccttctctcgtagtcgttgtggtcgtcgtccttttgggaagaagtagactcatcgctgtcgtcgtagtagacaatttccttgatgcgccttgtcttcttcttcttcccatctttccgtctatggcccgagcccgagtcggtaggcttgtcatccttcggctcgttgacgaaagattccttctctttatcgttgatcacgatacccttccccttaggatccatctcttcgggcggttagtccctttgtgaagagaatggctccgataccaattgagagcacctagaggggggggggtgaataggtgtcctgtaacacttaaaaacttaggccacaaaaacttggttaagtgttagcacaataaccgccaagtggctagagaggaatcttcaacaaaacacaataaccaacaagatcaatcacagagatggcacgatggttatcccgtggttcggccaagaccaacgcttgcctactccacgttgtggcgtcccaacggacgagggttgcaatcaacccctctcaagcggtccaaagacccacttgaataccacggtgttttgcttgcttttctcaatcccgtttgcgaggaatctccacaacttggagcctctcgcccttacacttgaagttcacaaagaaacacagagcaagggagggattagcaacgcactcaagacaagaaatcacagcaacaccacgcacacaagtcgcaacgagagctcacaacacaactcaatgagttcaccactcaactagagctctaattgctatcacaaagaatcaaaggcgcggaatcgatgtcttggtgcttaggaatgttgtaggaatgcttggtgtactcctccatgcgcctaggggtcccttttatagccccaaggcagctaggagccgttgagagcaatctaggaaggctgatcttgccttctgtcgactggcgcaccggacagtccagtgcacaccggacactgtccggtgcccgatttctttccaaaaatggcttagtcgaccgttggtagcctgagagccgttggcgcactggacatgtccggtgcacaccggacagtccggtgcccccttctagccgttggctcggccacgtgtcccgcgcagatcacgcggccgaccgttggccctaccgaccattggctcaccggacagtccggtgcacaccggacagtccggtgaattatagtcgtacgtcgccgatgaattcccgagagcgacgagttcgcctgtgaacggcccaccggacagtccggtgaattatagccgtacaccgccgtcgaagtcccgagagcagcctgttcgccagagccagcctggcgcaccggacactgtccggtgcaccaccggacagtccggtgctctagactgagcagagtcttggctgctcgagccaaggcatttccaattggatttttcctgtttccagcacttagacacaatacattagtccataaaacaatgtactaagtctgagaaacatacctttattcttgatttgtactttgtccacctttttacactagggcacttgtgttggacactaaatcaccaaaatacttagaaatggcctaagggcacatttccctttcaagaagcaacagaagcgaactactacattctttagctttt

SEQ ID NO: 877 - DNA, 15981 bp, Zea mays
  Intron number 6 from transcript GRMZM2G133757_T02 (locus G RMZM2G133757) derived from phytozome v7.0 (chr-ID 4; pos 1 0578480 to 10594460)
gcccagcgagaggttctttctgcaacctgatccgtaggattttgtgtcatttaaagaaatgcgggtttgttagcgctttgattgttttaccatttgttttttacgcattctatgttacatccttgatttctttgaatattttctataaaataatagaactcatcatctaaaagcccttcatgctacttatttagttgttcccttgttaatttgggaaacgtcctatatgtgcccttcaactaaccttgcaatgagtccaccctgaactcatgtcaatgcaaaataattgttttcctcagcccacattacccctattttgaaggctcatgcggtactgagtgctttgatatgttcaaggataagatacaatcagtataggatcacatgccagaaatctaccatatatcttaattttgttctcactgtttttttcctcttgcctggccagactaggcttccctaagaaacatcagaactgctgtcacttggccatgcactttactggcgtctttcctcccctgctgtactgttgtgtgatgcgtgtaatgcccctcccagatatagtgtacttgttgcttccttgtgagtagagcccatgcccgaaatgcaataggtgggtgaggctacaatatctatatgtggtctattactatcttgttctcttcaaagttagtttcgctggttctaatcctgaattcctcggtgacaagcatttaatattaaggtgttactttgtgttggcagtgtaattgttggccaccggaagcattgagtatcatgtgttgctgagtgttaattgtgattgtgcattgtccaagggaagcaccttgtggaatatgttagcgtgtgatgactaagatgacacgtgatggtgtgcaaaggcttagtgtcagctaggcaacttgggtccccagtgcttaacgcaacaaaggactggccagtgcaagtagtctcaatctgaggcgacttgtggtgatacgaggggcaactagagaagtccatgggacatgagttaagtagggaatgccaattttttattgcatgcaagaggatagagctgtaggattaattgcttacttttctctgtaacacactagagaagatggtggggagaacgggagattatccattccaactcaatcaaattggctagtttatggaaactataatttgttggattgatccttttatctattgctttgtttataaatgagtaactgaatcactaatataaaaagcataaaagggtgtttggttattttaagtagattttgtgccatttaatttatatgggttttcatgtgtttatttcacaatacattttttttatattctagctaagagactgttagttcaggaaattcagttctatttgaaattagtaataaaagtgcatatgcatatcccatttagaaataaggggcctagtaaagatatacgcgtaaaaaggggactaacacaaagcaactagaagggagcttgatggaccctcgaaaggatggtcttctaggaaaagggctaaacattagtttttctttttacttgcggtatgaaaaaaaactcgaccggtaggggaaggaccgcctccacaatattatattaagaagctcaatcggagccccgaccgagaaagatcacgaaagttggtcccccgtgcaacatgagggtctgtcccctataggccgaatctttactcgtgctttgaaccctcctagcctctacataaggatccgcccccataggtcattccatctaatgtgcacacaaccaggggaaccaacaagatatcttttttaacctcagcctggaattcgttctcatagggattcgaactcagaacctaaggagtgctactcaccacctaaccaactcggctagaggccctatagtcttttacttgcggtaaggactataaagagtagaacaccatgttttttcccattcaatatcatacaatacaacaattcattttttacagtgaaatgcgacatgtacactactacatacatagtctttcgaccagctggtgagcaaatgtggtaataaagttttgtggtagcagatagtgataggtgtgatatttgggtgtaaaatgatctgctatgttagaaacttaatcacattattaaaactcaacaaccctaggatgtgtttacgcttgttacactttattttacttaacttttaaaagtttattgtgttgcaaatgttggattcacatttttggacggtactattattctaatgctcatcttacgtagtccatattagaaataaaggctgctcatgtttgtttaatgctaatatttagtatatatgctatagcagaaatgcatagttatgcctcctatggatgcattcctcggcaaggtctacaacagcgcaatcgaaaacatggtagcgggcgaacccaatcattgggtttcaaacactaaaactggaaatacatgtttctagttttaatacactatttgattttcttagcatatttgttgggtacatgtcagtagaacaatgtgggattggtccacagaagagatttattatatatagtattgtgagaatgtgaatactctaaacatctgtgttgaggctcatgagttggtggaacagtcctatagatagagatggaaactaatctatcctactataacaacctggattcttatggatcagtgcatgagcaatgtgaatggttagactggagtccaaaacatggtttgttaaagcggtaaaacgataaaacgttaggaaccaccttttcaacatttaaacgttgaaacgtcttttcagacttgacataaaaccacacaatagaagatgttcatactcataagttagcataaaaggaaacataccaagttcaaccacacaagtctatgcaactatgccacatgcaagttagaacttgcatctaggatcagtaaccatcatccaactcatcaatatcaagagcattttttttctcgaaagcgcaggggaactgcgccttaaaatatattaagaagaggaaaaaggtctaaaatagaccaaggttacaacattaagctccttacggaggccagtacctcacataagtgaaagagtccaatgaagccagactcaaaaaactactattaaaatagaaacaacaggattcagccatttgtcaaggaagctgccaaaaaagagagacctttggccccaactaatgcccacagtcttctctcatcataagcctgccgaaggatggaggggagactgggagtttgtccatcaaaaacgcatctgttacggtggttccagatcatccaggcccccaaggagatcagtgaattcagacctttcttgaccattccctgaacaatttcagaaaccatctcccaccattccaggaaggaagtctggcccggctggggagccaagatatccaacccgaactttctgagcagattataccagaaaagccttgcaaacacacatgagaccagcaggtgattaatagtttcaggttcctgatcacacaatggacaactgctaggatgattgagccccctttttgctaatctgtcagcagtccagcacctgtgttgggccaccagccagaggaagaaacggcattttgatggagcccaagttttccaaaccctcttgtagtgtccaaatgcacatgatcccaggaagagacccttgtaagctgccttcgctgaatattttccatctggggctatgctaaagatgtgtctgtcttcaatgagggggtgcagttccaaaccagagagacagtcccagagcttaaaataatctgccagaactcccacagttagaccacctctaatatcataaatccatctgttgtttaacaaggcctcatgaaccgttctactttttgctatcttctttgggattacagaaaataggctcggggcaatgatcgagatgctttttccctgcaaccagttatcggaccagaagagggtattatgtccattacctacccaccgagataaggactttactgaagaacgctctggctttacttggaacctgaataggaagccctgtccaaggtcttctagagtcggttttttgtagccacagccatcgcatccggagggcccatccaagttccggtagactagagatacccagtccaccaagctgaagtgggcgacacaccttgccccaagccaccaaacaatgtccccctttagcttcttttcttcctctccaaagaaagccctttcttattttatctatagcatcaactgcccagtggggtatatcaattgccattgccagatacacagtcatacctgtgagcacatgttgcactagtattctcctgcctgctctggtcatcaaatcagctttccaattaggtagttgatcagcaaatttatcaacatacggctggaactgttgcttggacagcttgtgcaaggatagagggagtcccaagtacttgcaaggaaaaactgcgatctcacacggtagcagactttggacttccaagagagtttcttctgaacactgtatggggtagacattggatttttgcacattagttttgagaccagagacactgccaaaaagctgcaagatatcaagagtgatggagatttcatccaccgtagggtgtaagaagagggctacatcatctgcataaatggatactctgtgaagttgtcttcttgctggttgctgctagctgctgcaataaacctgcctcttctgcctttataaataagtgtccaagaacatccatgaccaatatgaacagcatcggtgacaggggatccccttgtctaagccctcttctatgctgaatttgttgaccaggaaacccattgagcatgacttgtgtggtggatgaagcaagaagaccacaaaccatgtccctccagatctgtccaaacccaatctgctgcatgacatcaattaaaaagggccaggagaccgagtcaaaggccttggtgatgtcaagtttgaggagcagccgagataatctatgttgatgaaacagtcttgttgtctgttgcactaacatgaagttgtcctggatgaatcgccccttaatgaatgcactttgatttggggaaaccaattcattcagtcttggtgcaagtcggtttgcgagaattttcgtaatgagttttgcaatgctgtggaccaggctaattggcctgaaatccttaacttgctcagccccatctctttttggcaccatagtgatgtaggcagtgttaagtttccagaaattgctgaaacttctgctccaaaccgtagataccactgccataatatcacttttcacaatgttccagcacactttgtagaaaagaccagtgaatccatccggtcccggggccttgtcagagggtaaccctttgatggtctccaggacctccttttctgtaaaaggggagtccaaggcagccaagttgtatctaggtaggccaagagctgccaggtcaattgttacatccctctgtccatcctgcccaataagatttttgtagaagaggtccactgctgcagctttctcactctgctcagatagaatgtggccgccatcaactaacttggcaacaaaattcctcttcttgcgatgcctagcatgaatgtgaaaaaactttgtatttgcatcaccttctcctaaccatgtgatcctagatctcagccttgccatagtacgtttgaaagaagacaacaacagtgagtgttttttgaggcagttcttgaaccaattttcagctggggagagggctctttcgtcctgtgccatctcaaacctgtgaagcagttcttttgccaaggctaactgcaatctcacatggcccacctgtttgtcactccagctttgaagagatcttgctgttacccttagcttcaaatccagggtttggaatggacacctgatattgtgtaccgaattccaagcagtctgtaccacctccaggaaaccttccatttttggccagaaagcctcaaaatgaaagcgtttcttcccaggtttgttcccttgaagacccagcaggagcggacaatggtcagaatcatgtgatgccatgctctggaggaggacgtttgggaaacattgctcccaagacacagagcagaacactctatccagtttaactaaaacaggatttgcttgctggttggaccatgtgtactttcgcccatgtaatggaatttccttaagagcaatgtcattgattgtttgtcgaaaacgacccatcattgccctattaatattggaattgttcttatccgcagagcagtagatgagattaaagtccccagccaccatccaaggaccatcacatgcatttctgatgtctctaagttcctggaggaactgaattttttccccctcaccctgaggtccatacacacaagtaagccaccaggcctgcccctctgccctacagaactggaccgaaatactgtgattatgaaatttgtttgtcctgtgtgaccaatgtgtctcctccaagcaatcaaaataccaccacttgcccccacagatgggaggtacacatactcaggaaaatcagctcccaacatagacaaaatgtttctcctagagatgttctgcatttttgtttcttgcaagcacaccacatcaacctgggaggagtccaccaattcttttattgagtcttgcctaacggaggcattcagccccctcacattccaaattaaaagttttccaggatccattgataacagataaaagccactactgaataaaccaaaaggccggggacctaacaaacaagtccaggtggaggggtccaaccaaagagggctgccaaagcctctacctggttatgggacaacggttgcttgaaaatctttgcatacgcgtctagtgcttcctgggtagtacctttgtcatcagataagatatgcaatgctctcatagcctttttagtagacctgttaccccaatcttgcatattaaattcaaccccagcccccgcaatgcgtcggctgcgcctaggagcagccacctgagaaggttgtggggctgatgaggtattcatggcttgctttggagccggcagtatttcgtcagctgctttactgatttttctgaggaattcttccttccctgataaagattggttcagaagtctcgaggccgagtgaaaggtgttgtttgtctgaattatgctggcctctgtcccctcattctgactgatttggagaggatgtgccttagttcttctgcgaaagtagaccttgagagcttttgttgcttcgttgtgtcggactgttactgccatcctcccagccattcccagcatctgtagaggcaagccagcacttggaattgttgactcagggaaaccagaaactagttggggcgagactatcatgagggtgttcgtcttcagcggcccagagcacagttggggcgagacaggcaatgaaatgcatgtctccagcggcccagccggctcatgaggcgagacaggaacaggcccagatgtctctagcgacccaaccaggcaacgggccggatccggcctgagaatccttaactgcccattaatctcaaggcgggaagtcaccccgccagtttcgtgtaccgcagagtagcaggcttggggactgtttctcttctccatcattacttgtcccgccgcttcaaaatctggtgaaggtgcgccatcaatgtgaggagacgcctctggatgcgcttcagcatgaaggggctcctcggtcgtcggcggcattaattgcataacacgcagagtatctccagaattctcccgcgaggcgtatggcggcgtgggcgcttcgatgtcgcggcccaaaggcggctgcgggccctggcgaaggtgcagcgacctcacctcggacgtcggagacacttcagtgcccagtgttaaatgcagatcccgcccagtatctcccgtcacttccttcgaggcgcaggactgcgcagacgcctcgttgccgcggcctaaagacgactgtgggcccaatcgaagatgcaacgacctccgctggacctgagagccacctggaagtcgaggatgggggtcttgggttccatttccgtcttcatcacctgggggttttctgccagccacagatgaagtggggtccgctggtgtgatgcttgaaccagcccgcagcacgctaacttgaatcttgtatgtgaggcatcttttctcaaacatctgcaacccaggctcaataatgtgaagaaccgaatcacgttggagtttctccgggttaaagcaccaaactttgacaacaaacgaagatagatcttgcttgagcaaagtgtcagggtgcacttcagcgatcaaacaggagtcaatcagaatactctttgccgtagaaagtgcccaagcatgctcagggatccctctgatttccaagtctaccagccctgacattatcgaagatgaggcgtgtgagcatctcgtccaccgcttgaatatcaggctgaaacgaggtcctcttagaatcttgccgccattaagcacccttgaagcagtatcttcgtcaggtaaaaacagaagaaaatcctctggcttggtttgatgaatcttcatatcctcaaacttgacgttaaaactgtgagcaacttcctcaagaacctcaggccccatcactaatggtctggttcccactattgtaacgaagagagctcttctcatatttgcttcttcacgagccatatcatcactgaattcaagggtacaggaagaaaaagccccccagttcctctcgccttgatcacctgccctctgaacaggggtctgtctaatcgacggaggtaccgcatcatctgacgaggccgataacgcctggccaggggcgaccacagaccttgatgatccttttccatgcttggatcgtcttctctttcgtttgtagcggaggcttctatgtgactccccatcatcagccatcctaggggggtcttccttcatcgcagcagcctcaggtttgctgatctggacccacaccgagcgacgcctacagggatcagcccgctgcgaagccactggcgagtcttcgcgctgctctgaaaggcgctgcgagcatccatgtcttgatcatcaccatcttttccactattgcttgcaccaatttcatcttccacatcaagatcatcaagcatatattcctcgtactcatcttcatttgcgtcgtggcggatctgttggtgctagacggctggaggatggaggaggggggcagaggagaggatggaggcctgcaacggtggacgactggagccggcgacgctagatgagaggagggaggtgggctacggatggctctgcatagggagaagaggttgtcttgacctagtatttttttgggcatttgagaggctcaataacgtaaaatgtctgaaacacacctaaaacgtccaaaaacgtttaaacgatgtgtttcacggatgctctacacgattttgttaaaacgtttggacgttctaccctttaatcgcgttttatcgtttaaacgatacttaaacaacgtttaagcgacattttaataaccttggtcgaaaatgacaaggttgttcaagtagatgattgccttttttgttgccaatgttgctaagagcgctatgttgtcgacatcccttgagaagggagttgtagtcctaaggtactaacacaagcacacacatgcacataatcaacttgatcttcgtgggtgcctcactaacgactttaagggtgtagatggtgtttatttggatatatatggagaataggaattgtgtaataattggatggatgtattgcattgagcaattgggcactttatatagaatacaagacttgggagacgaggcaacacacatgtatttatggcagtttacgatacacaatatatgaactaccaaatatactccatctctgcataatcatagtgggagcatcacaaaccgttagactttagaagagaagccaaaggctaacatcacctcatggagtaaaaatcaacaaggaggtcatgcagatgatagccctttatgtgccgatctcgaggtaccgagcatgagggcgcaaaagctatggtcaaagaagccgtgctagagatagctgaggtcgacatagctatagtcagatcgccgatgtcaagacggtggtgcatatgaagccacatgcgcacaagaggtgttgttgtgtgacgaagatgcgtcggggcagctgtcgtggaagggggtgattttgagattgacgcagtcagtgctgtcatggacatagaagaaacgcgacaatgcaactaaggcagatggggtgggaatgagagagttagagcctgtttggtaggctgacccaggcgccacaccgcgccacactccagccgccgcgggtgtggcgcccaaatcggccgccgcaggtgtgacgtgctgcggcgccgcagtcgcctatccaaacatgcctttaatgcaatcaagccacattaattgaggcatgttgggtttgctagacctagcaatgtgttatggacgaaagcacacgtcgttgttgccaataccaaacgtacaagaaagagggccccaaccaggagtggttgtattggtcgaagaaaaagcagtgcaggagcggacgcttccaatccgaaggtagtgtgattggatggttgtattgcattgagctcttggggcaatttgtatagagtacgcgacttgggaggtaaggcaacccatgaatacatatggcagtctacggtacacaatatctaaactatcaaatatactgcaacaagatagcccactcaatgacaagaatgagtaacatgaggcagacccattgcctggccaggcagtgatctcaacaatgatgttgactcaaacctttttcttagaagtgtgacacctcatggttgtggacgacaagctagcgtgatctagcattgaatgacgatcgagtagatcacttggtttggcgcaaacaagactgggccaaggtgggaggtgcaaccgcctatgacctaggtttgagaggggcccattagcctatatgtgcactatgcagaatagtagatgcaacaccttcaaaagttgctagtagaaaaaagaaatgtgcagttgcttgtcgaccttagcatgtgctcagcgttcttggccttgactcgatggtgccttaggctcctcggtgctccctcgtttgttcatcacaccatgtgttagagtaactgttagggctttgttagggtttccctgtatacccctaccgtaatgggctttggcccacttaactcttcttaatacatacccaacccaggattatggttagggtttcacccattccaacattgtatctagctaggtctctctcctcccaccctcccacagccgttgaccccttccacctctggccgccgccccctacactcctggccgtggcccctccccttctccaccactggcccacgactgcaacaaccgccgccgctggctctctgctgctgcccgccaccctcaccacggccagcggtcgctttttccctcccgatttctcgagcgccgctgccgcctccccatcccgtggcacggacgctgtcctcacaggtgtgggcatgagcgccgtcctcattggggctgtcgcggacgccactcctatcgaccttgcccccaacgccgtggtgggtgccactgccttccccatctggggcctgagcgtggccatcgccacccgcctgcctcccagcaccggccaacacatcaacagtgccgccgccctaccacctcatgccgttgcgactctgtgtgccttgctcgccgaccccgcagtggctgccgctctcctctccaaccattagccctttgtgtgttgcctcttcgaccctatgtgggccctcacggcttcatccggccttgtcgacctaacctcgtccttctccgacacgctccccttcgccacgaccattgacacaccgtcgcttgtgtccgctccacctccgtcaccagttgcagctccatccttcgccctggcggtggcccttgccactatccaggctgccgtggccgccgcttgggaggatgatcacgatgcgaccctcacttgggaacacgagtgtaccacgacggatgccctcacctctgttggttgaggctaagcgtcttctccttggcccctccgttggcctcagcgccatcttccatcgttgggctcgacgacaccaccatcgcttctcttcatgctcaggcggccagtgtgcacaacatccggtccctggtctctgtcatgctggatccggcgtccacccactacacccactggcgcgatcaggtgctcctaacgcttcggcgctacgcctctccgaccacgtcctcgttgacgttgtcgcaccgctgcctttaacctggcaccagatggacaacgttgtcctctcgtggctcatcggcacactcaccgtcgagctctaggacatcgtccgcaagaggggggcaccgctcgctaggcctggatgccctcgaggcctagtttcccagcaattgggagacccccgctctgcacctctacacatccttccgcatattctccccaggggacctctccatcagcgagtactgccgtcggatgaagggtatggcagactcccaccacgacctcggcgaactcgtctttgaccataccctcgtcctcaacctcctgcagggtctcagccgacgctatgaccacctgcgagccctcatcaagcgacaacgtcgttcccctccttccacgacgtccgcaacgagcttctcttcgaggagctcaccatggatgttgagccccccgcatccaccatgacgctctacgacacgtcctatgacagcaccacgagctcgccccttcgtcctttgtcgacaggggctcctgcgcgccttcctaccgcctcacccctagagcccctcgccaggctcccggctctgacgacgatcgccggcctcacaaggggaggccacagggggcggtggctctacccatggtggccccatcggtcgtggtggtgctccggcgtggccgtcgttctacaacccctggatcgggaccatctctatgtggctgggctcgaccatgggtgcctctttgccgtgtcctcctcatccagctctcccgacgacgccaccctacgacattcgcctcaccttcggcaatgtcgggtccgcctcttctactgcctccggggacccctacgtcgataccttggtcctcgctggctggaggctgggactagggcctccctcgtcgcctcgttcgacaccatggcgctgactccgcccccaccgactgggtggccgactccggcgcttcctaccacaccactcctactgcgggcacgttatctcggtcccaccttcacatccctctcatccttcctctatcgttgtgggaaccagttccacggttccaccctcccgatcaccttattaggtgacttggttcttccgggaacgttctacctcaacgccattctcgttgcccctcacatcattcaaaaccttctttctatttgtcggttcaccaccgacaactcctgttccattgagtttgatccgtttggttaatctgtgaaggatctggctaccaggatctttctcgcccgatgtgacatctcagggtcgctctacatgcttcggccatccactttctccaccggctgtgccccctcggctccagcggcccgcagctccagctgcgcccctctgctccagcgcgcggctgttgcagaggcctcttctcgagctgatcctctccggtgtgcggcacccgcctctgctctaggcctccatcggagtccaccctccatcgcgcgaccatcctccactgatccactccacctcctccatcagacttctttagagtgaatcagttcagacttcagagaacttcagagttcagacttcttctgagttcacagttcagactttcagagtccgttgttctgctacaactatagtatattgctgtactgttgtcttgctacagctatagtgtaccgctgtattgcagtcctgctacaactatatatattgatatatcaatatatatacatatggtcttgttataggtggacgacattaggacgactaggagtcgactgggctcgactaatcgagaaaatcgacgactaatcgcgattagtgaacttatcggtgctcaggcgactagagtcgactagcttcgttattaaggtatcctagatatatatatggaaactaatcttagctaccatgacaacctgtatccttgccttatactcaaacaagtattcctattttactggcatggccccaaaggaagatctaataaagcttaccaaattccttatactacatccggatgttaatacttgacgctctggctagtagcagacctaggattttgtagttgggtattcccactagaagcttttatttcacatgtaactaccaagctggctgtagtagagggcaagcacatgtaggcattgggttctaggccttcacttctaattagggttgggtaactagccaactaaacttttttttagctttctttgaaattgatatattatcatttattagtctcttgtgttgtttgatacccgatttcaaccgagcttactgagccaagccaaaagttgaagtcattcaagatcacctaattttggttttaaagaaaaatgggttcaatcacaacatttttgaaacgagccaccaagctggccctactagttctaatgagctcatttataattttatatagctcattaatttgctagattaagaaaattaatttttacatgacttaagttatacatatgtatcataaatgctatatacctactctagtgatgaaaatgttggatattcctaagaataactgagacaaagctgggtccactcctggctctagcaatcatagttgttaaggcgtcgcttaagcggtaaggcgaggtttaggggcaaggcgtccgccattatggccctttattttccctctactttaatatatgggtgcgcagtcctcctgcgctctttcgaaaaaaaaaaaaaaaaaggcgtccgcctcgccttgtggccgtgactaaggcgtccgccttagacaataaggcgttgccttagcaccttgagtgtcgccttagcgacgctttgcggacgccttggatggctgtcctccctcagtgtgctctcttccctctctgctctcccccagtgcgctatcttcccttccctctctgctctctctgttatctcccctctctgctttctctgttctctccctctctgctctttctctgtttcaattaactcagtttcagttaaatgctagtgttcttagttagttaactcagttttaattgatttatgttgaacttgtactcctatttgctactataatattattatccctaactatttgagactatattcctatatattcaatttttattgcctatttttgtatattactaaggcgtcaccccgccttacgccttatcacttaaaaggtaaaaagggggtcggtcgccttacctcgccttgccgctttaacaactatgctagcaatacctaagcctgttggtggctggatatgccagcactctaacaacccaacatatagacatattattactatttagtgatgccaaaccattcttggaatatctcaatgaatttggaaatgatcggtttcatagaatcaattggagtagatgatacatcaaccaacgacttttgcaatcctactacacgagtgtaaacaaaatagcaagtttttgttacttatctacaaaaaagaaaatcttcatgcgtggatctcaaccaagtgcacaaaagataagaaatcaattcaaactgcaacaccacatagttgccaaacgctcaaaaccgcaaaaagaaccctatgcccattgaagtctggatggatgaaggcacacaaagaaaattccaatgtaattttgaaattttgatcatattacatgtcaaatgaatttgttacttcttgcagaaaattatcgaatatctgaggaagg

SEQ ID NO: 878 - DNA, 3160 bp, Zea mays
  Intron number 1 from transcript GRMZM2G045753_T07 (locus G RMZM2G045753) derived from phytozome v7.0 (chr-ID 4; pos 1 0247971 to 10251130 reverse strand)
tatcgcttcctcccggccagccccatcctccggctccttctcctcctcgcactcctctccctcatcccgccggccttcttccacctccgtctccgccgcttccaccaagtgcgccctccagccacctagattcgagatcttcaataaggagccttttacgccccgagatctcacttatccaatttattcggtttcttctctgacacgtttgttaatcctttttggttgctgtgttccagatgcgcgagaggaagtgcgggtggatcgcgaggccacccatggtgtgcgcgcacggcggtgactccaccaacgccttccccaattcggtcggtgtgacttgtgagaggctgagacggtctcagtgaattcgaatttgttctataacaagagttatttctccattctgttcggattgaggtaaatgtgttgatgagttgttagttttgtcgggatctcatgagtcagatggacgcatttcggatggctctcgacgcgcgggtcgactgtgtggaggtggatgtttcgaggtcctatgatggtgtgctctttgctctgcatgacaggtaattgaactgccactttgctggtgtggtataatgtatcacaaacgtgttgtttttgtaacatgaacatgcatctaaatggaaaacatcaagatcactatctatcatgtgtgactgtttacccactgcatttgctatttagctgatcattagttggatggcacaaccattttttgctacacccatttacataatttcgttatttactaaaatactatattttttattaaattggcaaacaattaaatttggttttgtaattatgagaattgagaacacagttttctctgccaattactgtctttgatactggccttcttcatgaatgatgcacacttcagtttttgaaagcagctgcaggaagcatgtcattactgttttatttggtgttcttaatttttaaggctataagatgattgaaaggaggcatgcacccccctcctgctggcagcgacctggctcaggcgacctcaacagcggctccctctcaccaaaccgcccaccatgccttcgtccacaacctctctgctttggctccttgtctcctcttcttgtgcttggcagacacctcccactattcccttctacgtcgagcctggttctggcgtggctggctcttcgttgttgcagtgtggctccgtccacgctggctttatgtgacctaggcacaaccttgaccttcgtcggtgagttggggcacgggccgctaggagcgcttggtgggtgtttgacacaatgccccaatggtggcacgctgtcgacacaacgcctctccaacttcactccactccagcaacccgctctgccacgtgccctcaacgctaacaagcatcatgcagcaagctcaactgaacaacaagctccaccagcggcgggcgttttggatgcgaccgcctcatgagcgactgaagttcttcaatggtccaccactgggagcaacacataattgataattgcctccttggggattggtggcgttcaagacctcgattgtggttggctccacactttatggctcgagtatgcattttcaaacctttgttctcacaaattctactgcccggttgttaggcctctgtgctcccacttgtttctcaagttcaactgtggatcacccaggacaatggtgtgtcctcgatgaatcctgagttcattgccaaggccctcaactaccacttctgtggtagtcctgaatccttcatgattgtcccctttttcgacctcatcttctcttctcaagtcgcttccgtctctgtccaacatctattctgcaagattggagtttttgctttggatgtgatcatctttcacattcatggtgacgccgcctttgccagatggccattcgacagtcgatcaacagccaggtggattcgaattttgaaggttagggtctctgtccagcagtctctaggattactcaacacacaagcaatctcgacgcttcttcctctgctccttccctgaacccgggcagcatatactttgctgcatgttgcctgaaagaaggtcccccgtgcaaactatgatggacgatgataatacttcctaccttccccctttaattctctggggtcttatcactttgcctgttcaaccttttctagggtggatggtgttgttaagtcacctaaacatctaacgagtgatggggtctgtccctagaatggggtcagaaggctagaatgcatcagctgagctgcgctccacctcatcccttcataccacactgatgctccatgttgtgaatcatctttgtggaatgcatggattttaaaatattttagcttgactaacttttgttaatggtttagtatgatcaagacatccattagctccaaccagcaaaacgatgctgaaaatgtgatcaaatttgtaacagcacatttcttagaacaaagcagctagtgcttccttttctttgaaacaaacatacctggacctaattcacaattgacacaggcagggatctacaaaagatgtctggtaattctacagcaaaagttggccactggaccacagatgaggtgattcatttacagtttcaatcttgttatcactttctaaaatgactgcatttgggccgttgtcttcttttaagtaactcctttctcttcattcttttttaataagatgcacagtaggggccttccctactgtatttcgcctaaaaactgtaattaactaattggagttggtgcacatggtttgagatatcaggctatcagcagttgttttgttgctgttatagcttcctgcatcatttcatggccatttactgattctggagctgtgatgctaattcattgttcttttagttttttgtagataaaagcactaaggacgaggtttcagttgtcaaaaagagtccaaaatgaggaagttcccatggcagaggaagctctggcggtaaacattaaccaaaccaatttaatcagttggaaatttgatagttctgatgaatagtctatgtaatccattaagctttaactgacttgtgtggaacagtgaaagctttgccataaacattttatgattttattgggtagttctataaattctattgtttgcatgcctgaaccttttccttctcgcag

SEQ ID NO: 879 - DNA, 7759 bp, Zea mays
  Intron number 2 from transcript GRMZM2G151009_T02 (locus G RMZM2G151009) derived from phytozome v7.0 (chr-ID 5; pos 1 94807172 to 194814930)
aataggaagttcctcattgttgttcctgttgtcctgtaagtgctggccgttatatttctccgtccaatttcattttaattctctatggctatgtttaggaaaaatattatatgatagaagcactcaaaatgtttggttgacccacaacacaatatcatgagagatatttgaaattgctaaacgtttatttttacaggatatggttaagttccgttaatattgaatgactggtataatttctttgaattgtattagatcctgcatatatgtattctctttttcacagcataatctgggttcatttttctttttctcaactattaaattgtttgtacacatccctgttgtaattgtttatttttgtgatggttgacttaataggagtatttccataattctccaaagcttcttgatctgtatattaatccactacatgtccttttttcctaaaaaaggattctgcagttgctgtagctatatgctatttttcaatccattcagaataattcaattgctcgtatttttcatggaaaccgtaacctgtatgaacccaggcttattaatgattcttatgtttcagttcattttagacccaccatcgtgggaaaatctcactgtttaccaccctgtttggtcaatgaccattactataactgaaaccagaatctgtaaacgaaaatgaatccactatcttgtgagatctcactatttatcctcatcaactatgttttttgaggttagacatatggaccataacccctatcctttctttgtagaaaataaaaaacttttgtgtgtaatctttgactcctttcgtgtgcaatttctctgtacacattagtttcttatttgcatatccttatctctttattaaatgaaatctgctactaagacatgcacaaggtcgacgaagcgagtcaaggtatgagagggcacacgtggctcaaccggggttggctggcatacgtgtggagcggtcgagggcatggccggggaagcgtgaccgggcgtggcacaactattgatgtcgggccgcgtgtggcgtcgttagtggcaccagggccgcatgcgacaacaatggggttaaactacatgaggaaaaagaaggggcgtttgtccgagagacgctacatgttagtctcaagcaggaaatacaactttgtgatagagccatagggaggggtggaaatggggaagttcgacatgtcgaagatgacgtgttgtgagatcaagcggtgatgagtggtaagatcaagacatcggtatcctaattaggggagtgcccaaggaaaacacaacaggaagagcgaggcacaagcttatggggtagcacaatgaatatgcgaaggagggagtgataccgaaaaggtcaaaggacgaagaaatcagatgaatagatatcgaactcttgcctgttgtcacactagactaccttaatggtgcgatcaaactgagtgaaaacttaagcgaagaagtgagaggataaaaagcattagactccaagcgcaagtttaaagtccacgagtaatgagagcaataatcaagaaccaccaagtaatacttgtagcccaaaacattgttaataggtgagatccacaaatcacagtaaatgagataaaaaagatgcacaacttgagagtaggagctagggaaggaaattctaacatgacaacctagctggcaggcgtggcgcagacgcccatgagtggccctagcacaagaaatggtcgaactactagacaacttggacaacacgtccgtattaggttgaccaagttgacgatgccaagtgttggaaggagctgtagtagtcaatgtatgcgtctaagacaaagatgctgaagtagcggaagcagtgggtcgagtagcaaaatcagtgaaagtttgaagccgcagagtgtacatggcctagagctatcacaacgggcaaggaggctctgggtggcaagatccttcatgtgcaagtcaaaagggtaaaagtccatagaacaaggatcatcagtagcaaattgacgaacagataaaagattttgaataatgttggggcgacaagaaagtttcagaggcggaaagaaccataaagaacaaaatcatctcctgaggtgaccaggagaatgttccttttgccaacaatgatagaggaaggatgtgatgggtgagaggatgggatgagaagagtataccaacatctagagtggtgtggtaggaggtaccggagttggccacctagtcagtgatggcaggcagagttagagtaatcctgctagacgagttagcaagtaactgttggttctagccctcggtccatggggtccacaactgaaccaggtggggggtagaggtagaagcggcgactagtgtggtgttaaaggtgccgtgtggggtggtccaaggggacacccagagctactaaaggtcggcatcactaagagagcccgttttggcgggtgcggcgatggacatcatgtggttggggcgggccacatggagatgtggtccgtccacggattgtagagtgacagccagagagtgtcatccttcccgtcaccaccaccctggctgcccctctaccgacgactgtcaccaatgcttttggaactagagccggtaggagggcacaccgcttctgataccaatggagtaggcgagcgtgaggatgaaatcctgaagctggattggaaatagttgtgtgcataggtgcccctagagctggagttgtagagggccttggcggtgttggagcggacctaagcccccttggtgatctcctcgaggacatataatgtaatggatcacatattttaggtccgcaagtgattgttgcgcttgttgaggcctcatagaaggttgtggacaagcatgcgatcggaaacgagcttgttgagatcacaaagagaatcttccatgcccttcatttggcggacaatacttagtgatggagaggtcaccgtagatgaaggtccgaaggcaacgtcaaggtagagggcaggaccgcacgagcctcatagttgccaaggaactactcaatagccaccacgctcgtggacgacattctggagctcgacgatgactgtgtcgagtaccaagagaggaccacatgtccacattgtccattcgacactaggatggtatagtggggcacacagtcgtagtgaggacgtggtcgtcgagaacgtagcattgcagggtgagaaagacgaggtcgcgctaacggacttatgcgaaggagtctgggtctaggaggatggggaccagagacaggatgttctaaacacgagtcccatgagcgtggaggttggcgataacaacaacctcgtacaccgatggggtctcaacctcctggtgccctatggagggcctatggtggtaggtccctcgaggtggcactcaacctccgcaagttggcgagtgagtgcgttgacggtggtgtgctcttgctcccagacgagagcagttgtctgttcgcgctctctggcagcagagattgcaggctaagcagttgcaagggctgtgggagtgtggagacctcatgtggaggaggggagcctgcagtgccaaagctagaggggaggcccgtgactaggcgctcgccccactgggcggtgggacgatgacaccaggctgttgctgctgcgtggaatcaggctttggcggatccgcgacattgacgaacacatggacgacgctgacgttggaagcccacaaacagccagggagaggagatgcaaggggaaaaggtctcccaggggaggagacggccgcatcggccatgggagggaggacaggcgataggggttagggagtggccaagaagagagaagatgatgggggaggtctccttagggtaggcgacggtcgagccgactagggagcgaaggttgtcggtggcgatggacagggaggagccaacgaccaggggaacgagggaggaccggcggcgacaacaatcaagaggctgacgactaggggaaggaggtgaggaggtgataggggtgtgtgtatgccatgggagggcaggaggtggtggctaggaagggctggcggcgatagtggcaaggaggggacggggaccaggggaaggcgatgttagggttggtggttatctgataccatactagaagaggatagttggattagagaatacattatttatgctacacatgggctgggctctaggcccatatacacaacacggtctaacacaaaagatgggttgtcagacactccatagtagtgacttggctagttataagggaataggaaaccttctgttcatttaggtagcctacttggcttgtttggttatatgggaactaggaaaccttttatttattaggtagcctacttggcttgtttaaaaacattaccatataaacaaatcgtcgagaaaattggaatgtaaggtattacctttttatgcatgtcggaggtaaactccagctgggtggcggatagcacacaccctaatcctaagatgaggagggggcttgaggttagcctgtagagaaggatgaacacaagaacgcacaaggatttagagtggttcgggctgtcagagcgtaataccctacatccattgtgagttgtactacttgagtctgagttcgagaggacttgtccctttccatcgcatgtgtccttccttttatagcccaagggaggtacgtacatagtgatcgagccccgacaagtgggcccgataatctaatactaaatacatagaatacagagtgatgattcctagcataccaagatctcctctgcggtcagatgtcttctcttggtcttcgtgcggatctcctggcttgatacgctcttaccccatctagtcggagcacgggcataggctttggcgtagcctgatacgttgtcgtgtgtaggggtgtatggagggtgccatcctgtcccctccacttgttccacctcgcctcggtaacacgcggggaacaataggagtcataatgacaggcacccatgcggcatatcgagtcaatggccttgcctcggtaacacgtggataacagtgtaacccgcgcgttgcatactgggcgcgccgcctgccaccggagtggacaggtgcacgtcttatccgtatttaatacagggacgcctcatgccagagtcttgtgtcaaggtccgcctgttggcttacgtaacgagccataggccacgtggcgacattgggactccgcctgagcggggagcaagggctagtagctactggacacatggcaaccccggaccgccccgactcgaggattcagaaatcactcgtggggatccgtgccttattcgcaatagcttggatacgtggcagcatcggattgcccttgatcggggtctcgatggcacacaggggtccaggaccgcgaccccatttgggcccggcccccaactgtaacctgcaaagtgcttcatttatggggactcgtggtgcctccggacctcccctcgccggggatctggagggcttacgtggggcccgggagcctcctgcgggggctcggacctatggctgaagttgtcggacaactttggatcttggatacacgatgtcactgcgccagtccagcaaggcggagacttggtaataggcctgacagccggtagccctgttggtcgggcccatgctctgagtcgggttacttagctccttcccacgtggctacagatcaccacacaggtcctcgtctggacccaacagtagtgggtaccctagttccaaggtaccgaccatgcatatgattttttatcgtggttctcaaggaatgaaatcaaagcatgtcagaaaaacaaatacaaattttacctttggaaactaaatactcttagtatagctttcgtgcagatattcagggcagtgtcctgtgcaaatatgagcttgcctttcttttgtgcttggtagctgcgatcttgttgattctgttacaacattaatcggtcatcacgaaagacttatggtgcagtctgactttttaatggcttcagtagttcaatatgaataccttatggaaagctggaatagcattgtcttttgatccttgaagacattatcatgccatttgatggcaccatgcacttagatttcaggaatattgaccctgcttgctgctaagatgaaaagagcctttttaattagttaggaagttatcattaaatggtactccctccgtccaaaagtcatcatcgtttaagtgtcccgcaccaagaccaaggacgcccctccgtccgcatggccgccactgtgaagttaattatctggcgctgttttgtattttcaatatacgcatatgtaacgtcgcgaaaaccttccgttaaactgccattcatcacccgcgaaactgaaaatctgggcgcgccacggacatgcatgcttcggatggagtttacggcagggaacggagacgtatttgaagcaactggacaatgaagacgcatcaaatgaagcaaagcaaacgaggagccgtgaacgtctgggatgaggtgcaaactgtggtccctagcttaaacgatgtggattcctcgaagattttatattgcttggacgatcaggactttttggacggagggagtatatgatagtgtaagcaatcaaatgtttactacttctctttgtgtagcagccacgcttgttgaatgttgaaggcctagtgtccaatttcatgttgtttactctgctctgaatttggttgtccatagccacagttcactgtgttgttcctggccatagttcactggagaaatttgctgtctctcttctgagtaatgttcaatttgtggaaacttgcttttttgcttcttgtaatgtctcatgtctctatagtaggctatgtaagttgtttatgtcattctaggacctgttagtattctgggaccactcactggatctgttacaaggatgaacacatccgacctttctttctttcactgtcaagaaaacaacaagatgaactgagaaaaaacacttcatgtgtagcattaacaataagctatagttagcttaggctgtttgctgcagatcgtgtaaaatagaggatttgcactgtaaattacactgtttgcagagtgaagtttgaaataggggatgggatacgatagctgctggagacagccttagctgtcttagaataagcgttattataaaagacatttttagtgggaatgtgggataaatcttgaatgttgccatgtaggtggtagagcaccttttctagttgtgtagcaacggacattggagtttgtctagggtataatgtgtacaattgaatgctttacctgcatttgcatagcataatggtgttcacaatagttcaatgctgctgtagttttgacagatatttgtcagcttgtacacgttgctgactgttcattatgctgattctgttatagttgtagagctgtggtgccattaatatagactgatctttcatgtgacttgtgcattctcctgtcgctaatcttttcaagcactccatcaggttcacatgatatatagtgaacatgcatgatagactatagctaatcctaacaaaaagttaactactcttcatgcttgattcgttactactattatatgctaatgcaatgagtaatgtaacgcagaatcacactatttttatccattattcgcagaaagatactatcagccatgtgtttctttttttttttatctagtgtttttgttactaactgtagcttgcattccccccatatttccttaccaggtatctgatagctttgcacaccacagactaccaac

SEQ ID NO: 880 - DNA, 4282 bp, Zea mays
  Intron number 1 from transcript GRMZM2G176995_T01 (locus G RMZM2G176995) derived from phytozome v7.0 (chr-ID 6; pos 1 36422360 to 136426641 reverse strand)
cgcgcgggctccgcggcctctacacgcccatcgaggtaaacaagcgcgcacgatcggttggattgccgtttggttgtggtgattagcggttttgggttcgggagggattggtgttttgttgctttgtttaattggtggttgcgcctcgtttcgactcggtcaggcggaaattctgggatttggaatcagggtcctttctcaaactgtggtctcatgatttcagagacgtactgcttagttgcttcacgaatgcattggtttatcttttatgttccactcctgatggactgtgaggcggggtttggggtttttttaatgtgtccccaactccggcctgatcaccaaaactgctcggactcaagcaggcaacgcgtttcgtatgacccactttgttctaactttgttctgggaaatgctctgcactccaaatatgaagaaactgatctcgctgtattgcagttgcgtgcctcgtttaattcgccttacgtttttgttccatttctgatgggaattatattatgaactgcgatagggcacattaagtttacaattgtggtccctcacgttgattgacatcgcattgtgttcaaaataagtgtaacgattttgtaaacttccataggcattttttctacaagggaatcaggtgaggtcaactacattttaaagtggagtgggtgctagaggggggaggaggaaaaagtcttttgttttatggcacacacaaccactatcattttccttttggtaagaggggatgaattaggacaactatttttttgttctaatctagaccctaaattttacctcttaaacaaaacctatgtagataaccaaacaagctattgccttccttgcacttgtctttcttgctggatgttcgagaattgattgtacaatcaacatcggcatctgtagtatttttcaatcttggccacaaatcattaaattcaaaattgttgcagaaattgtacctcatatgggaccaagtatgaattgaatttaaaacaaataaaacaacctgcatagatacataatcccatatgatcattggggaaagctctaattccgacaaaataacctctcgatagggaataatatgttggtcaatgcaatctaggtttatatcatcattgataagtaaaatacctccctcaattggtctcttaacattactagtaagaatatcactagtagatgtatcatcaattgaaagaatatgattggattgaaattttggtaaaatgtttatgctttgtatcttgttaatcatgttgtagaagtacatgtccttgacgctgttgctccttatctctagaatatggctaactatagcctgctccacaaaaaagttctcggaatccatagggaaaatcagcctgaccgttttacacagtaggaggcacagttggaataggcctatccgactcaaaatcggcctaggcagataaagttgacctagccgtccaagacttggcctaggtagataaagccgacttggttgacccagacccggtctactcggcttgtgcatcagaggacgaagtcggcctggtcgaccctatggcggcctggccgaccatatggtggtctgtccgacctttttggtgtaagctctatcttctcctttttatgcttttaggggcttgatctttattaccttcatataccaaacaacgcttggttatatttcatgttgaccaatgatgcagtattcacgggataaacatacaaccactttagctctctaaaaatcaagtctatccaacttcttgcgcttcccatgtttttctgtcgatagacttgtttcttgagatgtgattgattcataaaggatattttgttgttcatctctagccaaactatatccatatcaattctttctttgtgaactgcaccaactagcaaaatttcttttcttacgttcacaaaaaaaaactcggccggggaggggaagaccgccctcccggtattatattaagaagagaccgaaacatggtcccggccaagaaaatccccgaaccctgccccccccccccacactagcgggccgtcaccgcccactctgcaacggcccagccgaagggtggcgcgcaggacgtaatccgggagcgggcggggcacaacgaggggatttttttaaccaggctagaaattcgcccccgagggggatcgagcttaggacctggaggtgctactcagaagccttaaccattacgctagaggccctttcgccttttcttacgttcacaatcgatgactcaggtgtgatgggcttcttgctagttatcccaaagtgggcaccaagcacgactcataactcttttttacaactctaaataatgtttatagagagtctaaatttcctttctaactttagcaaggtctgattaagaatatctagctaaattctcattgattcagcttgagttaggagcgacatataaagttgaatcgtgagtatcaccaccattagcatactttgctaaattttccattaattcggtttgagttagaagtaacataataagttaaattatgagcatgagcatttgcatataatgttgaatttataagtagaacctgtgctctattatcatattatgcagcatataaattgagagtaactgactgaattattagctatcaccatagccaattctctcattcattggcatgtcttgtggaaccacatattgtgaacttatagtcgatgactaaggatatgcacgttgtatgttgctagtagcattaagacccaaagaatttatagttgacatcggctgttgaacatgatgcccaacattatgatttttgtgataaagatcattattaacgtaataattagccgatgcaacaaatctgctatttttatgacttcaacatgaacatgagaatttatatcacttgcaaaataattattagaatcatatggtgtatttgcaagatatacatcagggtaactatagcagttttatagtgtcataccttggtattctataagcaatgaatttgacttccttgctgattttaaagcaacacaattctcaatagtaagcaagatcaaaagagggtcaaaaattagatgcgatcaaccttttgggccaaatgcatatgtaatggcaagcacaaaaagtatgcatcaaagaagaatatgtttagggcaaagggattcagctataaagtagagttaaagtaattgtttttttcttttttttctcgaacacacatgagagctgcacatcattatattaaaaagaaaaataagggggtccaaaatagaccaatacaagaagtgtgttgatgtggaattggatcacacactaactagggtagatcattcagatttcaatggactagagaaggccgcagagatatcacacttgcgtggtgaaggacggagaggtttacaagtaaaccatgaaaggataaccaatcacatgtgacgaaaaacaactagtttctgggaaaactagcaaagtaactgccgaagctcgttcaggagggaccccatcgggaaaggacgtcgtcaggttgctatagattggctggcaagcctatagcgtcatccttgattgttggatcaagcgatgaacaataacattagggttggaagagagatagtagtttgtttttccattggatgttggataccgcaaacgactgtaaccctctcatatatttagagggaatggtcttaccctagtagaaaacaactccacaacatattttaagtttccaattctaaaaacgatttagaaacgaatcgattcggaaaaccagcaaaagttgccctagccgactaccaagttggctaggtcgggtttcacggaggccaagcctggcaacaggaagttagtgtgcccggcttttgatggtggcctagtcgactttagggacctagcctggccggcttttccatggtgacacctagcctggtcagcttctatgtcgggacacttttgagtgtcaacacaaatcttgttaccacatcctaacttcttcatggtatttggatataataacttacatcgatttatgatttgtggggtagtttgatttaagttttccttagtgatcttaattgccttagaaagatggtgtactaacctatgattctgtgccaattaggcctatatggcacaacttagtaacattttgcctgagttagctacaaatgtcaatctgatgatctcttgtgctgatgaagtgatgcctgatatattattgtcttcctctaattgcagttgtcattttcagcatcgaagttgcggaatacaga

SEQ ID NO: 881 - DNA, 1243 bp, Zea mays
  Intron number 6 from transcript GRMZM2G002002_T01 (locus G RMZM2G002002) derived from phytozome v7.0 (chr-ID 1; pos 2 0288261 to 20289503 reverse strand)
tacaaacaacaatcttggaagaagtgtcagtaaaggtaactatgatatgggaacttgctttatggtttaccttactggtgaattgaacagagtaaatgttctttggtagtttggcttcacttatttccatacaattgatggtgtgctgtgttcgatttgatgatttttactgtgattctgtggtatttgtaatgttagactactatatcatgcactggacatgtggtaattgattgctagtttgctacatcaatgtttgattgttccagttttcttcttttgaatggggaattttgtggcagtattcttctgctgtcacagtagctattttatagcgtaattaagaaactatatattagatttaatcagtttaactagttatgacacattttctgttagcagaagtatttggtcaaaactctaaagtccacataactgtaactcattctagcttatgtcctggtggaatgtcactgttatgcagatatatgcattaatttttctagcaaatcaacctaatactggcaatgagatttttgttcttttcttatgctgtaacaggtcctctgtagctgtagtttactttgttgtctggtctattctggtctttctagctatgctaggatgtttggcacttgaacaaaatagcagcctcatgtcgaagctatatattctcaccagtcatctggtgtatgttaatcattacgtgagtatataattagagtgttgtgatccaatcttgttagtgccaacttgacaaaattatatggcctcaataatatctgctgagccagcaattttaagctccatgcatccctcttcggcagatttcatttactagaattcttgtcaaactggttaagagatacaaatgggccttaaacagcaactagttgcacctactttattttgggcttgttacaatttatgtgaatactaacagcattttgtaagaatatgacccttaataaattctacttgagcagttttgtgatgtcacacacattcactcttacatgtattgacttcttgagtatgctaattgagggtagcatacttcgattgtttaatacttaaatatgataaattcttccttgtgttctttacttggaaaagaacacttgtcattattttgtcttcttatccttttgttgctaattatgtccagtctcttagggtgtgttcagcgattttttttggttttgcaggaaatttctttagaatacgcagtgcttttgcgtat

SEQ ID NO: 882 - DNA, 9722 bp, Zea mays
  Intron number 1 from transcript GRMZM2G075590_T01 (locus G RMZM2G075590) derived from phytozome v7.0 (chr-ID 5; pos 1 9061621 to 19071342)
cttaagaaggttgacttcgacaatgtgagttacgctgtctcagtagagcatcaatgtgtattaagctatagtagttgttggagacttgctctcaaatgctatgaatcaagagcaaggcaacataaaatgttaaataataacgtccttcgtccttaaaacattattcccttcgggataatggatcttggacgaaggttgataagaggataattacgaagttaaaccttcgtaataaaacttcaataggcatttataagataatacaaaagatataagatgagtgaataaatcatatactaattatattatatttattcattatattgaatcattgaatacaataatacctatgccttggcaaaggttgaattccgagagatgcgattgcaattatcagaatgcgtgaacagtaacggaattgctgttcactatttataggcacaggacgcagcctgtgaggaattacaagtatgcccctcataaaaacttacaacattgactcagacctttatggactaaaaggtcattctatctttaagtcggtttgtaatgccgaagcttcacgaagaggaaccttcggctatcttatacaaacagcttcagccgaggaccacttcttcctataagaccttcggcgacgaagcataaacccaacagtagcccctttcgcggtgctagatcgtttttcgtaacgagcttgatccgtgaaaaaagtctcttaagcttcggagtgccgaaggtctgaaaaacaccttccctgagctcgttgtcgagaaacgattcaatctcccaacgagtagcggccccaccttgcagagttactgttcggtctctgcggtccaccacgcagcgagtgcgagcgggtgtccgcctggtgtaaaaattctggcgcttcgccttcttacctgcatcactatataaacaaacgagtaggtgtgaagttaccacagcattcattgctatttgtactgtttttgctgccaaaatttttaaccatcgccgaagcttgtctgtcggaatcgaacgaagctgcagcttgaaacctgcttcggaggaagaagaaagtattaaagtttcacaagttcatagttaaatggccagagtgcgttctaccgccagggttgagcgtgaggggggcgaaactgaagcttcggagactgttcccatctccgaagccatgcaacgatccgggctggtggtttctgaagagatccctagtgaagatgcagaacaagcaaaacaagcagttgccggagtggaagaagaagttattgaggaaactgatcccgaagacgattatcgtattgccatgccaagcaagcccagccacttggactttggaaaatctaccgtttcgagggctgatctctccaaaatggtaaaatcaggctttttcaatgaggatcagaagaagctattacgcttcgggggagaagagactaccccgaagccggaaaaggatgaaattgtcatttttaagagctttttaaaggctggattaagattcccccttcatgggattattgcagaggtactaaagaggttcggtatctattttcaccaactgacccctaacgctatcgttaggctcagtgtttatatctgggcactccgaagccaagcagtggagccatttgcggacagcttttgccgggttcacgagctgcattaccagacgaaggctagaaaggatggattgcatgacaattttggctgctacaattttgcttatcggaaaactacgaagtttcctgtaatcagctatcggagtaaatgggcagcagggtggaaatccgagtggttctatgtcaaggttaatgatgacaaggagaagctcgtgcaaagtccactcgaactaatcttcggagaaacccggcctctctgcaacatgtcagtagacggtaccacacaaaaagcaatggatgaattcagaattgttgcagagcatattagtacaagagacctggttcaggagttcttggctttccaagtttttcctagtttaaaagaatgggaaatgccgaagctgaaggggaaaaagaaagaaggtgaacttgtgcgtttgccttactatttcaaatttaagaaatactttaaaacaccttgccaagagtggctggaaacaattgaagcaatgtgcaatgaaatacttggcaattattccaaaaaagaagatcaattgatgaccgcagccttcggcacccgtccgaaacgaaggctaaatcgagtgttggacgccttgggctttgattaccctgattatgaaaacctgaacaaaggtgctgggggtcaaaaaagaaaaaggataactgaggccgtgaatgaagaaaaagaaccaaagaagaaaattccgaagaagaggacagcttcttcttcgaagcaacaaatatccgaagcagaagaaacccccgcatcaccttctgctgctgtcgttgaggaaattctgaaggtaatgactgaatccttacctgcgaagctaagtccactgggccctcaactgacaaagttttttcagaaggacaaggagcccgaaaaatcgaagaagacaatcaaggcaaagaaacaaagaattatcactgtgacagaggtaattgacaagacgccgccaagagcttcagcccagaaaacaccggcggctgcagaggggacagatattgaaattgcaccttcggaggccgcagctgccgaagctgcctcagctgaagatttgaacctggagagcacaattgaacatattgatcaaatactgctagacatggatgcagaagaagctaccactgctgccgaagaggccgtgaccgtagcgtcgaagaaaggaaaagaaattgctgatgaagcttcagaaaacgaagccttcgtgttccagaacttagttggagaacatctatcaaaagctgaaatagaagagcttagagagtatgccaaatcctgtggatacaaacctggggcactcctcttcggaggcgttgatgatgagaaattagagtgtattcgagatcaaacaggggccaaagttatcagtactctgtccaagagtattggattcccgaagctagaaacagacatcagccgctaccgacgacaacatgtcgttggtagtttattttactccaacttcaaggtgaataacttgtcccttaacttttattgtttctaataataaaaacatgtctgacgaaggttgtgttcgtgtagagtatgctgttgagcaaagccttgcaaatgcagcaagattttgaagataagaagcacgaagttataattgaaaatttggaaagcaaaataaatgaacaatcagatgctttcgagaaaaagaactttgagctccaggcaaccgaaggtttattggcggaagctgaagcaaaaataacagaactgaacacgaagcttctccgccagtctgagcagttcgaacgagaaaaacaagatcttaatgcaaaacttgaagccgaagctcaacaaaattcagatttgagaaaacgactgacaagtcttcaagaaaaatgcttggaatttagcaacaaatgcattcaacgattaagaaagattttttactcagttggagccagcagtgaaaaattcaccccctcagctgaagatcttccgaaaaccttcgaacatattgagggggagattgacgagctcgacgaagtcatagctgggcatggtgacttctgtgcctgggtggcttctcgaggcactgctgcggctttcctgaaggctggctgcgatcatggaaagattgtcaacagaccaaatttcactttatcaccatcaatcctggatgacattcctgatcttgcccgaagtatctcgaatagatttgtaaaaatgatatggacaaaaggtgggcgagaaaaggctggagatgaagctcgtagccaccttgagccagtaagaaaccataccttgtgcttaccttttcctgtaagcttgattttgacttacaacgaccttattcatgtaggatgacgaagccgaagccgatgatcaaaaatgacgccgaagccgaagctccttgaagattagatagcagactgtagacagtacttgagaaacttttgagataacttttgtaaatgtaactaaaacttgtctttaatgaattctgttcataccttgttatatatccttatccttccattgatgtatgagaagtgctttggtgtggacgaaattttcttttgagccgaaggcgaaaaaacaccttcccttcttttcgtacgcagcgaagcatagaaaacaacattttcctttttcccgaagctctcctttttgtacacgaagctctttatgccatgaagatgattatcctacatatgtctagatgaatgtttatgaatgcaaatgctatgatgtaatgtgatgtgcaaatgaattgccaaacacgcatccgaagccatactcataaccattattctcttaaaaacaatcacacctcagctctgcattcccttaggaacgtctttggagcttcttcgcctttacttttggcggaatcagcgttgacttttcgctgtaagctctgcattcccttaggaacgactttggagcttcttcgcctttacttttggcggaatcagcgttgacttttcgctgtaagctctgcattcccttaggaacgactttggagcttcttcgcctttactttttggcactcgatggtgcgctctcagcttttacatttacattccttgggggattttgctcttatagaactaaaaaaggaaattacatgtgctggccccattaaaaacctttctcccccttcggaaaggaaaagggtgccatgaaagaaaaataaaaaatatgaaaaattacatcgagttatacataatatcgccgaagctcatccgcattccaagacctaggaatgtcgttgccgtccatatccttcaatctgtatgaaccgggtcttgacgaagatgctactaagaaaggtccgtcccatttcaactgtaacttgcccactgtttctgggttggccactctccgaagcaccaagtgtcctggctcaatattttttagccgaacctttctatcccgccacttgattgtttcggcttgatatttactgatgttctccacggcttgtaatctgatcccttctaaagcatctttttctatagaataagcagcttcggaatctgattctgccgaagctactatccttattgatccggttttagcttcctctggagttattgcttcgtcaccgaataacaacttgaatggagtgaagcctgtagaccttgatgttgttgtgttgtggctccacaccactttggttaactgatctggccattttcccctgggttggttgaagattaacttcattattcctgtcattataatgtcgttggctctttcaacgagtccatttgactccgggtgcctaactgatgcaaaatggatcttcgtaccaatttggacacagaaatccctgaaagcttcggagtcaaactgtgtcccattgtccacagtgatagcccttggcaccccgaaacgacaaacaatattctgccagaaaaacttttggacggtggccgaagttattgtggctaaaggcttcgcctcaatccatttagaaaaatattccacagctactataacatatctcaggttcccttgggccggtggtaacggacctaacaagtcaaggccccacctttgcaatggccaagtgggttgtatgagctgtgttaaagacgaaggttgtttttgatctcttgcacatttctgacaaccttcgcacttttgaaccaattctgctgcatccgaagctgccttcggccaataaaacccttggcggaaaatttttccaagtaacggcctagatccgatgtgagatccacacaggcctgcatgtatttctttcattaactctataccttcggttctggataaacatttgagcagcggagcacaaactccatgtttgtacaactccccttctattatgacatatggacgagctcttgcctctatccgcttgttataagcttcgtcatctgaaaggaatttaccctgaaggtaagagatgatctcggttctccaatcttcgctataaacaggagatatattgaggactgctctttcaagaagttccaccgaaggtgcttttattgtttcgaagaacacatccgaaggtaagggcagcccctgtgctgttgacttagctagcaaatcagcatgttcattttgtcctcaagggatatttttgacagaaaatccctcgaaagaagcttcaactcttcgaaccatatccaaatacttttcaagcttcggatctttagccttgcaactcttgtcaatatgacccgaaacaacctgggaatcagttttaagtatggcccttctgattcccattgcttttaacttccgaagacctagaagcaatgcttcgtactcggcaatgttatttgtgcaactaaaatcaagctttgccgcataacaagttttgactttggaaggtgaaaccaacacagcagccgctcccgctccgaaggttccccaagatccatcacaaaacactatccatgcttcgttgtctttattcgtttcttcctcctgagtccctggcgtccagtcagcaatgaagtctgccaacgcctgggactgaatcgaagatctatgaacatattcaatacaaaattcgttgagctctgcagcccattttccaatccttccagtagcttctcggttcctcataatatccttcagaggttgtgaagaaggaacaattatgttgtaagcttggaaatagtgccgaatcttcctggaggccatcaagacagcatacagtaccttctccaactctgtataatttttctttgataaactaagaacctcggatacaaaatatattggggcctgcctcttgacttgaccatcaagcttctcttggacaagcgctgcacttaccgctgagtgcgaagctgccacatataataacaaaggagcccctggcactggtggggtcaatgttgttagatctattaaatactgtttcagctcttcaaaagccttctgctggattggtccccattgaaagacttcggctgacttcagtacttcgaagaatggtaagtttctctctgctgacctggatatgaatctattgagagatgccaatcttcctgtcaatctttgagcccccttctttgtagttggtggctccatccgaagtatagcttcaattttacttggattagcttcaattccctttgttgaaaccaagcatccaagaaattttcccttctttactccgaagacacatttttctggatttaactttaagccagcttgcctgaaactcgcgaaggtctcctggagatcagcaatatgattctcctgcttcgtgctttttacaatgatgtcatcaacataagttagcacatttctgcctatttgagattggagaaccttcgcagtcattcggctgaaactccctccagcatttttgagcccctcaggcatccgaagatagcaatatgtgccacttggagttatgaagctagtcttcggctcatcttccttcttcatccaaatttgatgatagcctgaataacagtctaacagactcatgagctctgaagaagctgctgcatcaactaaagagtctatccttggtagtgggaattcgtccttcgggcaagccttgttaagatctgtaaaatcgatgcacattcgccacttgccattggccttttttaccataacagtgttagctagccattctgggtacttcacttctctgataactcctgcactgaggagtcttttgacttcgttgcgagcaccttcggccttatcatctgacattttccgaagcctttgctttctgggtctgaaggatggatcgacattgagcgagtgctcaataacatctctattaactccgcagagatcattggctgaccatgcaaaaacatccttgttattgaacaaaaaccttatcaaggttttctcctgctcttcggataattgagagcctaacagcaccttctgctctgctatatcctcacataagagcataggcttcggctgatctgctgaagctgctttctcccttctgaatttgtactgttcacaagcttcagctccatctatgttatggattgcttttgagtcagtccaattgccttcggcccttcttgcggcttcctgacttccatggatagcaatgggtccctgatccgaaggtatcttcatgcaaagataggcaggatgaaggattgcttcgaaggcattgagggtaccatgaccaataattgcattgtaagggtattccatgtcaacaatgtcaaacacaacttgctcagttctagtgttgttgatgaacccgaaggtcactgacatggtgatcttgcccagtgctacaatctgtcttcctccgaagccacagagaggatgtgtagcatcatgaatcttatcttctggctctcgcatttgtctgaaggccttagcaaatatgatgtcagctgcactgcctgtatcaaccaagacattgtggaccagaaatcctttgataacacaagagataaccatggcatcgttgtgtgggtaatctttgagctgaaggtcctcttgggagaaggtaataggaatgtgagaccatcttgacttgatgaagggtccttgcaccccaacatgctgtacccttctctgtgcttccttcttttgtttcttgttagctggctctgaggacgagccacctgtgatcgggagcaccagcttcgggtccgaagcagctccagcttggtcgttgaacgaagccatcagctcaaaaagtggaagtgagttcaccggaggtgggcgccaatgttggagacttgctctcaaatgctatgaatcaagagcaaggcaacataaaatgttaaataataacgtacttcgtccttaaaacattattcccttcgggataatggatcttggacgaaggttgataagaggataattacgaagttaaaccttcgtaataaaacttcaataggcatttataagataatacaaaagatataagatgagtgaataaatcatagactaattatattatatttattcattatattgaatcattgaatacaataatacctatgccttggcaaaggttgaattccgagagatgcgattgcaattatcagaatgcgtgaacagtaacggaatactgttcactatttataggcacaggacgcagcctgtgaggaattacaagtatgcccctcataaaaacttacaacattgactcagacctttatggactaaaaggtcattctatctttaagtcggtttgtaatgccgaagcttcacgaagaggaaccttcggctatcttatacaaacagcttcagtcgaggaccacttcttcctataagaccttcggcgacgaagcataaacccaacagtagtatagtggctacatctattataaatgaaatcaaccttggttcgtaagagaattaagctactgtgagttgacataactcttgatttgcatggataaaatgcattttctagcatacattagactggaaattggatttaccctcttttctgctttgccgtcttagatcagcatttggaatgtagattcacattgcttttgctgataaattcctcttactagttccacttttgttgcttgttgccataagtgcgatccacatagatctaactggtttgccgactcattttccatgctacattcagtgacattcttaag

SEQ ID NO: 883 - DNA, 10132 bp, Zea mays
  Intron number 2 from transcript GRMZM2G055606_T01 (locus G RMZM2G055606) derived from phytozome v7.0 (chr-ID 6; pos 1 37680832 to 137690963)
tcccctccctcgggcgaggatagaagggaggcggggtgtgtctgccgcgcgatgaacgcgctgcagatcttgcgggagacggtgcgggtgctgtgcggagacccgcacacattcacgtccatcctcttcctgctgctctgtttgacgtccgggtgcctcctcctgtccgcggccgcgctcgtctgcgctctcttgtccccgccatcaacgcccgccatcggacccgtacgcgatatcagcaccgcccgtcatggaaggttcccgaggatcccccaccctcctcccccacatctgtcatggccatggggcttcccggcctccattgctgtcgccttcccgctcacgggtcactcactccactatgtgccgccctcgctcgcaggcccctcccgcggacctcggctctccgctactcctccctcgaagcccaaggtatttgaaagggaattaggcttacacctagttcctaaataattttggtggttgaattgcccaacacaaatctttggactaactagtttgcccaagtgtatagattatacaggtgtaaaaggttcacactcagccaataaaaagaccaagttttggattcaataaaggagcaaaggggcaaccgagggcacccctggtctggcgcaccggactgtccggtgtgccaccggacagtgaacagtacctgtccggtgcaccaggggactcagactcaaactcttcaccctcgggatttctcggaagccggcgcgctataattcaccggactgtccggtgtgcaccggacatgtccggtgctccaaggaagcgcggcctccggaactcgccagcctcggtttcgcgtggcagccgctccgctaaaattcaccggactgtccggtgtgcaccggactatccggtgtgccagcggagcaacggctctcttcggcgccaacggctctctgcggtgcatttaatgcgcgcgcagcgcgcgcagacgtcagacttgcccataccggtgcaccggacatcaaacagtacatgtccggtgtgcaccggacacccaggcgggcccacaagtcagaagctccaacggctagaatccaacggcagtgatgacgtggcaggggcaccggactgtccggtgtgcaccggactgtccggtgcgccatcgagcagacgcctccagccaacggtcaagtttggtggttggggctataaataccccaaccaccccaccattcattgcatccaagtttttccacttcccaactactacaagagctctagcattcaattctagacacaccaaagagatcaaatcctctccaaattccacatacgccatagtgactagagagagtgatttgcttgtgttctttcgagctcttgcacttggattgcttcttttctttctcacttgttcttgtgatcaaaactccattgtaatcaaggcaagaggcaccaattgtgtggtggcccttgcggggaagttttgttcccggctttgatttgagaagagaagctcactcggtccaagggaccgtttgagagagggaagggttgaaagagacccggcctttgtggcctcctcaacggggagtaggtttgagagaaccgaacctcggtaaaacaaatccgtgtgtcacccttcattatttgctcgcgacttgttttgcaccctctcttgcggactcgtttatatttctaacgctaacccggcttgtagttgtgtttatatttgtaaatttcagtttcgccctattcacccccctctaggcgactttcaattggtatcaaagcccggtgcttcattagagcctaaccgctcgaagtgatgtcgggagatcacgccaagaaggagatggagaccggcgaaaagcccactacaagccacgggagcacttcatcggaagagtcccgcaccaaaaggagggagaagaagaagagctcctccaacaaagggaaggagaagaaatcttcttctcaccacaaagagaagaaggaaaaatcttcttcccacaagccgcatcggaaaggcgacaagcacaagaggatgaggaaggtggtctactacgagaccgacacttcatcaacatcgacctccgactccgatgcgccctccgtcacttctaagcgccaagagcgcaagaagtatagtaagatccccctacgctatcctcgcatttccaaacatacacctttactttccgtcccattaggcaaaccaccaacttttgatggtgaagattacgctaggtggagcgatttaatgcgatttcatctaatctcgctccacaaaagcatatgggatgttgttgagtttggtgcgcaggtaccatccgtaggggatgagaactatgatgaggatgaggtagcccaaatcgagcacttcaactcacaagccacaacaattctcctcgcctcactaagtaaagaggaatataacaaagtacaagggttgaagaacgccaaggaggtttgggatgtactcaaaaccgcgcacgagggagacgagctcaccaagatcaccaagcgggaaacgatcgagggggagctcgatcggtttcggcttcacaaaggggaggagccacaacacatgtacaaccggctcaagactttggtgaaccaagtgcgcaacctcgggagcaagaagtgggacgatcacgaagtggtaaatgttattttgagatctctcatttttctaaatcccactcaagttcaattaattcgtggtaatcctagatatactaaaatgacccccgaggaagttatcgggcattttgtaagttttgagtgcatgatagaaggctcgaggaaaatcaacgagcttggcgacacatccgaagctcaacccgttgcattcaaggcgacggaagaaaagaaggaggagtctacaccaagtcgacaaccaatagacgcctccaagcttgacaatgaggagatggcgctcgtcatcaagagcttccgccaaatcctcaaacaaaggagggggaaagactacaagtcccgctccaagaaggtttgctacaaatgtggtaagcccggtcattttattgctaaatgtcctatgtctagtgacagtgaccgaggcgacgacaagaaggggagaagaaaggagaagaagaggtactacaggaagaagggcggcgatgcccatgtttgtcgcgagtgggactccgacgagagctcaagcgactcctccgacgacgaggacgccgccaacatcgccgtcaccaagggacttctcttccccaacgtcggccacaagtgcctcatggcaaaggacggcaaaaagaagaaggttaaatccaactcctccactaaatatgaatcatctagtgatgataatgctagtgatgaggaggataatttgcgtattctctttgccaatcttaacatggagcaaaaagaaaaactaaatgaattgattagtgctattcatgaaaaggatgaccttttggactcccaagaggattgtctaattaaagaaaacaagaaacatgttaaggttaaaaaggcttttgctctagaaatagaaaaatgtgaaaaattgtctagtgagctaagcgcatgccgtgagatgattgacaaccttagaaatgaaagtgctattttaaatgctaaggttgattcacatgtttgtaatgtttcaattcccaatcttagagatgataatattgacttgcttgctaagattgatgaattgaatgtatctcttgcttgccttagattagagaatgaaaatttaattgctaaggctaaagatcttgatgtttgcaaagttacaatttccaatcttaaagataaaaatgatattcttcatgctaagattgtggaacttgattcttgcaaatcctctacatataccattgagcatgtcactatttgtgctagatgtagagatattgatgttaatgctattcatgatcacatgaccttaattaagcaacaaaatgatcatatagctaaacttgatgctaaaattgccgagcacaacttagaaaatgagaaatttaaatttgctcgtagcatgctctataatgggagacgcccgggcattaaggatggcattggcttccaaaggggagacaatgtcaaaattagtgcccctcctaagagattgtccaactttgttaagggcaaggctcccatgcctcaggataacgagggttacattttataccctgccggttatcccgagagcaagattaggagaattcactctaggaagtctcactctggccctaatcatgcttttatatataagggtgagacatctagttctaggcaaccaacccgtgctaagttgcctaagaaaactcctactgcatcaaatgaacataatctttcatttaaaacttttgatgcatcttatgtgttaactaacaaatccggcaagatagttgccaaatatgttgggggcaagcacaagggttcaaagacttgtgtttgggtacccagagttcttgtgtctaatgccaaaggacccaaaaccatttgggtacctaaagtcaagaactaaacttgttttgtaggtttatgcatccgggggctcaagttggatactcgacagcgggtgcacaaaccacatgataggggagaaaaggatgttctcctcatatgagaaaaaccaagatccccaaagagcaatcacattcggggatggaaatcaaggtttggtcaaaggtttgggtaaaattgctatatctcctgaccattctatttccaatgtttttcttgtagattctttagattacaatttgctttctgtatctcaattatgtcaaatgggctacaactgtctttttactgatataggtgtcactgtctttagaagaagtgatgattcaatagcatttaagggtgtgttagagggtcagctatacttagtagattttgatagagctgagctcgacacatgtttaattgctaagactaacatgggttggctctggcaccgccgactagcccatgttgggatgaagaatcttcataagcttctaaagggagagcacattttaggactaaccaatgttcattttgagaaagacaggatttgtagcgcatgccaagcagggaagcaagttggcactcatcatccacacaagaacataatgacgactgacaggccactggagctcctacacatggatctattcggcccgatcgcttacataagcatcggcgggagtaagtactgtctagttattgtggatgattattctcgcttcacttgggtattctttttacaggaaaaatctcaaacccaagagaccttaaagggattcttgagacgggctcaaaatgagttcgccttaaggatcaagaaaataagaagcgacaacggaacggagttcaagaactctcaaattgaaggcttccttgaggaggagggcatcaagcatgagttctcttctccctacacacctcagcaaaatggtgtagtggagaggaagaatcgaactctattggacatggcaagaaccatgcttgatgagtacaaaacatcggatcggttttgggccgaggcggtcaacaccgcctgctacgccatcaaccggttatatctacaccgaatcctcaagaggacatcatatgaactcctaatcggtaaaaagcccaatatttcatattttagagtttttggtagcaaatgctttatacttgttaaaagaggtaaaaaatctaaatttgctcctaagactgtagaaggctttttacttggttatgactcaaacacaagggcatatagggtctttaacaagtccactggactagttgaagtctcatgtgacgttgtgtttgatgagactaacggctctcaagtagagcaagttgatcttgatgagataggtgaagaagaggctccatgcatcgcgctaaggaacatgtctattggggatgtgtgtcctaaggaatccgaagagcctccaaatgaacaagatcaaccatcctcctccttacaagcatctccaccaacacaaaatgaggatgaagctcaagttgatgaagaagaagatcaatcaaatgagccacctcaagatgaaggcaatgatcaagggggagatgcaaatgatcaagacaaggaggatgaagaacaaaggccgccacacccaagagtccaccaagcaatccaacgagatcaccccgtcgacaccatcctcggcgacattcataagggggtaactactcgatctcgggttgctcatttttgtgaacattactcttttgtttcctctattgagccacacagggtagaggaagctctccaagattcggattgggtggtggcgatgcaagaggagctcaacaatttcacgaggaatgaggtctggcatttagttccacgtcctaaccaaaatgttgtaggaaccaaatgggtcttccgcaacaagcaagatgagcatggtgtggtgacaaggaacaaagctcgactcgtagccaaagggtattcacaagtcgaaggtttggatttcggtgaaacctatgcacccgtagctaggcttgagtcaattcgcatattattggcctatgctacttaccatggctttaagctctatcaaatggacgtgaaaagtgccttcctcaatggaccgatcaaggaagaggtctatgttgagcaacctcccggctttgaagacagtgagtatcctaatcatgtctataggctctctaaggcgctttatgggctcaagcaagccccaagagcatggtatgaatgccttagagatttccttattgctaatggcttcaaagtcggcaaggccgatcctacactctttactaaaactcttgaaaatgacttgtttgtatgccaaatttatgttgatgatattatatttgggtctactaacgagtctacatgtgaagagtttagtaggatcatgacacagaaattcgagatgtcgatgatgggggagttgaagtattttctaggattccaagtcaagcaactccaagagggcaccttcattagccaaacgaagtacactcaagacattcttgctaagtttgggatgaaggatgccaaacccatcaagacacccatgggaactaatgggcatctcgatctcgacacgggaggtaagtccgtggatcaaaaggtataccggtcgatgattggttcattgctttatttatgtgcatctcgaccggacattatgctttccgtttgcatgtgtgcaagattccaatccgaccctaaggaatcccaccttacggccgtaaaacgaatcttgagatatttggcttatacccctaagtttgggctttggtaccctcggggatccacatttgatttacttggttattcggatgccgattgggcggggtgcaaaatcaataggaagagcacatcggggacttgccagttcttgggaagatccttggtgtcttgggcttcaaagaagcaaaagtcggtcgctctttccaccgccgaagccgagtacattgccgcaggacattgttgcgcgcaattgctttggatgaggcaaaccctgcgggactacggttacaaattaaccaaagtccctttgctatgtgataatgagagtgcaattaaaatggccgacaatcccatcgagcatagccgcactaagcacatagccattcggtatcattttcttagggatcaccaacaaaagggggatatcgagatttcttacattaatactaaagatcaattagccgatatctttaccaagccacttgatgaacaatcttttaccagacttaggcatgagctcaatattcttgattctagaaatttcttttgctaagcttgcacacatagctcatttgaatacctttgatcatatctcctttatatgctatgactaatgtgttttcaagtctatttcaaaccaagtcataggtatattgaaagggaattggagtcttcagcgaagacaaaggcttccactccgtaactcatgcttcgccatcactccgagcaactctctattccttggggagaaatgagcatcaaagaaaaggacttcatccttggaggagagagtaaaagctcaaaagcaaaaggaccggatttcgtctttggtataatcttaactcatttacttttgaccaaaggggaagaaattactttaagggctctactgattccgtttttggcgattcatgccaaaaagggggagaaatgagcccaaagcaaaaggaccgcaccaccaccaatttcaaaaacttagtattttcaaagaagtatttatcaattggtatcctattgtgttcaaagggggagcaagtagcatttcaaaatgatatatcaaaaccctcttgaacactaagaggtggatatcttttagggggagttttgtttagtcaaaggaaaagcatttgattcagggggagaaaatttcaaatcctaaaaatgctttgcaaactcttattcatttacctttgactatttgcaaaagatctttgaaatggatttacaaaaggacttgcaaaaacaaaacatgtggtgcaaacgtggtccaaaatgctaaataagaaagaaacattccatgcatatcttgtaagtagttttattggctcaattccaagcaaccttttacaaactagttcaattatgcacttctctatttgctttggtttgtgttggcatcaatcaccaaaaagggggagattgaaagggaattaggcttacacctagttcctaaataattttggtggttgaattgcccaacacaaatctttggactaactagtttgcccaagtgtatagattatacaggtgtaaaaggttcacactcagccaataaaaagaccaagttttggattcaataaaggagcaaaggggcaaccgagggcacccctggtctggcgcaccggactgtccggtgtgccaccggacagtgaacagtacctgtccggtgcaccaggggactcagactcaaactcttcaccctcgggatttctcggaagccggcgcgctataattcaccggactgtccggtgtgcaccggacatgtccggtgctccaaggaagcgcggcctccggaactcgccagcctcggtttcgcgtggcagccgctccgctaaaattcaccggactgtccggtgtgcaccggactgtccggtgtgccagcggagcaacggctctcttcggcgccaacggctctctgcggtgcatttaatgcgcgcgcagcgcacgcagacgtcagacttgcccataccggtgcaccggacatcaaacagtacatgtccggtgtgcaccggacacccaggcgggcccacaagtcagaagctccaacggctagaatccaacggcagtgatgacgtggcaggggcaccggactgtccggtgtgcaccggactgtccggtgcgccatcgagcagacgcctcgagccaacggtcaagtttggtggttggggctataaataccccaaccaccccaccattcattgcatccaagtttttccacttcccaactactacaagagctctagcattcaattctagacacaccaaagagatcaaatcctctccaaattccacatacgccatagtgactagagagagtgatttgcttgtgttctttcgagctcttgcacttggattgcttcttttctttctcacttgttcttgtgatcaaaactccattgtaatcaaggcaagaggcaccaattgtgtggtggcccttgcggggaagttttgttcccggctttgatttgagaagagaagctcactcggtccaagggaccgtttgagagagggaagggttgaaagagacccggcctttgtggcctcctcaacggggagtaggtttgagagaaccgaacctcggtaaaacaaatccgtgtgtcacccttcattatttgctcgcgacttgttttgcaccctctcttgcggactcgtttatatttctaacgctaacccggcttgtagttgtgtttatatttgtaaatttcagtttcgccctattcaccccccctctaggcgactttcagtattcttacccacctttgcttcataatctcctgtgttctcaattttcttctacctcttcgttgctggagtaccgaatgcctgacgcttaatcgaccagtacaaatttcgtgttttttgttggtattgaactatcgatcatttaaactactgctaacagttagggacactattggggaggaggtcctgcgc

SEQ ID NO: 884 - DNA, 23115 bp, Zea mays
  Intron number 3 from transcript GRMZM2G061732_T01 (locus G RMZM2G061732) derived from phytozome v7.0 (chr-ID 3; pos 1 09627319 to 109650433 reverse strand)
cggcatttccaggtctctcccatcgtattgctctatatttttacccttgatgttcaattgtcataatttcgctcttcactgcactaaagtactgatttctttttttcctagaataaatggtattgctgcaggcctctatttagtggacatttaacttacaagagctccaaatctttcatatgctaatgaatctaccaaactttaatgtttcataataactcaatcaaatagctgtaatgaattgcaagagaagcatggattctcatgtgcgaaaaatgttagtggttgtggtgctaatcatactgtattaattctataacatgaaaattaggttgtccaaaaaattcgcacaggtgaaataaactattcaaacttgagcctctgccagagcttccctatgctaagctttagtagattaatgaggcgaactccctatgctaaactattctgtaacaattgtttgctaagctccgcccgacccagggctcggactcgggctaagacccggaagacagcgaactccgctccgcccgacccagggctcggactcgggctaggacccggaagacggcgaactccgctccgtccgacccagggctcggactcgggctaagacccggaagacggcgaactccgctccgtccgacccagggctcggactcaggctcagccccagaagacggcgaactccgcttcgcccgacccagggctcggactccgccctggcctctaccgaacgacctccgcctcgcccgacccaggggctcgggctcgggctcggcaacggaagacagactcgaccccagcttcggaggagcccccacgtcgcccgacctcgggcgtgggcccgccacgtcaacagggagcgccatcatcaccctaccccaagccgactcgggccgcagagaacaagaccggtgtcccatctggctagctccaccagataggcaatgatggcgccccgcgtgccctgtgacgacggcggctctcagctcccttacggaagcagggggacgtcagcaaggactcgaccgctccgacagctgtccctccgccaagctccgttgctcctccgacagccacgacatcacaccagcagggtgccaagatctctccggctgccacattggcatgtacttagggcgctagctccccctccgctagacacgtagcactctgctacacccccatcgtacacctggatcctctccttacgactataaaaggaaggaccagggccttcttagagagggttggccgcgcgggaacgaggacgggacaggcgctctcctggggccgctcgcttccctcacccgcgtggacgcttgtaaccccctactgcaagcgcacccgacctgggcgcgggacgaacacgaaggccgcgggatttccacctctctcacgcccgtttccggccacctcgccttcccccccttcgcgctcgcccacgcgctcgacccatctgggctggggcacgcggcacactcactcgtcggcttagggaccccccggtctcgaaacgccgacagttggcgcgccaggtaggggcctgctgcgtgctgacgaacagcttcccgtcaagctccagatgggcagtctccagcaacctctccggcccgggacgatgctccgtttcgggagttcttgagttcatgtccttcgacggcagctacgacatgatactccttccaccgccacgcgacaacgacaatggcggccgacaacccgcccgccggcggcggaatcgacgacatcttccccgcatggtggaagaacaacattcgagctcgccccgtcctctcccccgccaacggaggaggaggcggggcaaccaaggccaagcgggaggccgcgcttcgtcggctgtcgagcgaatcgacgtccccagcgccccaacggagggcacgcctttgtgaagagaaacggctctgataccaattgagagcacctagaggggggtgaataggtgatcctgtaaaaacttaacttatagccacaaaaacttgttaggggttagcacaataattgccaagtggctaaagaggagatcttgcacaatacgacaatcacagagaattcaacacaaagtagacacggtgatttatcccgtggttcggccaagtacaaaacttgcctactccacgttgtggcgtcccaacggacgagggttgcaatcaacccctctcaagcggtccaaagacccacttgaataccacggtattttgccttgcttatctttatcccacttgcgaggaatctccacagattggagtctctcgcccttacacttaagattcacaaagaagcacggagtaagggagggaagcaacacacacaaatccacagcgaaatgcgcacacacacggccaagattcgagctcaaagactatctcacagtttctcacaagaacggagctcgaatcacttagaatcacaaaacgaatgcgcaaagaattagtgtggatgatcaagaaaagctcaagagttgcttggtgtgcttggtttatccctccaagcgcctaggggtcccttttatagccccaaggcagctaggagccgttgagaacaaatatggaaggccatctttgccttctgtcgtcgggcgcaccggacagtccggtgcacaccggacagtgtccggtgcccgattcctttccttaattggcgaagccgaccgttgcagatgcgggagccgttggcgcaccggacatgtccggtgcacaccggacagtccggtgcccccttccgaccgttggctcggccacgtgtcccgcgctgatcgcgcggccgaccgttggccctggccgaccgttggctcaccggacagtccggtgcacaccggacagtccggtgaattttagccgtacgccgtcagcaaattcctgagagcggcctcttcggccgaggcagcctggcggcacccggacactgtccggtgcaccaccggacagtccggtgcccccagaccgaaaacagcctcttgggctgtacacagccaactttcttcttctcttattcttcctgtttctaatacttagacaagtatattagtacataaaaccaatgtactaagacttagaaacatacctttgctctagatttgcactttgttcatccatgggcattgattcacatttaagcacttgtgttgacactcaatcaccaaaatacttagaaatggcccaagggcacatttccctttcaatctccccctttttggtgatttatgccaacacaacataaagcaactagaacaagtgcaaaatcacttcaaataaagctcaaatttattttgattcaattttgacatatatggatcaatctatgccaccacttggtttgtttttgcaaatcaaaatcaaatctctatctctaagtcaaacacacatgttgaagcataaagagagtcattccaaaaaagattgatcaaagatttcaaaaactccccctatttcccataatcaatacttctccccagaagaagcaataagagacaataaaagagtttgacaaaacaaaaactctattctactattttcaaaatctctcaagtggtagctgatccatttatcgctttggcctttattttctccccctttggcatcaagcaccaaaacgggatcaatcttggccccttaaccccattgcctcaccaaagtcttcaattaagagcaaatggcaataagatttcatgagatgaacttggaataagttaccctctcatcggagtgcagtggaagtctttcatggtccaagtccaccttttccctttcaatcctccttcgagactcctttgttgaggtcggtgtgtccgtcggtccccatcggagtctttgcgggcttggcgtccttcatcccaaaccgctttagcagatcttgcgtgtactttgtttgggagatgaaggtgccgtccttgagttgcttcacttggaacccaaggaagtagttcaactcgcccatcatcgacatctcgaatttctgcgtcatcaccctgctaaactcttcacaagacttttggttagtagaaccaaatattatgtcatcgacataaatttggcacacaaacaaatcaccatcacatgtcttagtgaacagagttggatcggctttcccaaccttgaaagcattagcaagtaaaaagtctctaaggcattcataccatgctcttggggcttgcttaagtccatagagcgccttagagagcttacacacgtggtcggggtaccgttcatcctcgaagccagggggttgctccacgtacacctcctccttgattggcccattgaggaaagcgctcttcacatccatttggtacaacctgaaagaatggtgagcggcatatgctagcaagattcgaattgactctagcctagccacaggagcaaaagtctcctcgaaatccaaacctgcgacttgggcataaccttttgccacaagtcgagccttgtttctcgtcaccaccccgtgctcgtcctgtttgttgcggaacacccacttggttcccacaacattttgctttggacgaggcaccagtgtccaaacttcattgcgcttgaagttgttgagctcctcctgcatggccaatacccaatccggatctagcaaggcctcctctaccctgaaaggctcaatagaagagacaaaggagtaatgctcacaaaaattagctaatcgatatcgagtagttactcccttgctaatgtcacccagaatttgatcgacgggatgatccctttgaatcatcgctcgaacttgggttggaggtgccggttgcgcttcttcctccatcacttgatcatcttgtgctcccccttgatcaaaagcctccacttgaggtacctgttcgtcatcttcggttgggggatgcaccatagttgaggaagaaggttgatctcgttcatcttgttcctgtggccgcacttctccaatcgccatggttcttatagcggctgtcggaacatcttcttcatctacatcatcacaattaacaacttgctctcttggagagccattagtctcatcaaatacaacgtcgctagagacttcaaccaaacccgatgatttgttgaagactctatacgcctttgtatttgagtcataacctaacaaaaacccttctactgctttgggagcaaaatttagaatttctacctttctttactagaatgtagcacttgcttcccaaatacacgaaagtacgatacattgggtttgttaccggtttagaagctcatatgacgtctttcttgagtaggcggagaaggtagaccctgttgatggcgtggcaagccgtgttcacggcttccgaccaaaaacgctcgggggtcttgaattctccaagcatagtcctcgccatgtcgattagcgtcctgttcttcctctctaccacaccattttgctgtggtgtgtagggagcggagaactcgtgcttgatcccttcctcctcaaggaactcctccacttgaaggttcttgaactccgacccgttgtcgctccttatcttcttcaccttgagctcaaactcattttgagctctcctgaggaagcgcttgagggtcccttgggtttcagacttatcctgcaaaaagaacactcaagtgaagcgggaaaagtcatcaacaataactagaccatacttactccctcctatgctcagataggcgacgggtccgaagaggtccatgtgtagcagctccaggggtcttgatgtggtcatcacattcttgctgtgatgtgctcctcccacttgtttacctgcttgacaagctgcacaaggtctatctttttcgaaatgtacgttagtcaaacctatcacgtgttctccctttagaagcttgtgaaggttcttcatccccacatgtgctaagcggcgatgccacagccagcccatgctagtcttagctattaagcatgcatctagaccggcctcctcttttgcaaaatcaactaaataaagtttgccgtctaatacacccttaaatgctagtgaaccatgacttcttctaaagacagacacatctacatttgtaaatagacagttataccccatgttgcataattgactaacagatagcaaattatatccaagagactctactaaaaacacattagagatagagtgctcattagaaattgcaattttacctaacccttttagcttgccttgattcccatcaccgaatataattgaatcttgggaatctttattcttgacgtaggaggtgaacatcttcttctctcccgtcatatggtttgtgcatccgctatcaataatccagcttgaacccccggatgcataaacctgcaaggtaaatttaggcttgggacttaggtacccaactcttgttgggtcctacaaggttagtcacaattgtcttagggacccaaatgcaagttttgtcacccttgcattttgcccctaatttcctagcaatcacctttctatcctttctacaaattgcaaaggaagcattcaaagcatgatatattgtagaaggttcattaactttcctaggaatattaacaacatctcttctaggcatattatgaacaacattccttctaccaacatttctatcatgcacatatgaagaactagaagcaaacatagcatgagaaaaatcatcgcaagcattataactcctataagcatttctagtttgtcttctatcattatacaaaaaggcatggttctttttagcactagtagccataggggccttccctttctccttagcgggaatgggagccttatggcttgttaagttcttgacttccctcttgaagccaagtccatccttaattgagggtgttaaggcccataaggcccatattgcctatatgcctatatatatgctacagtacccgtgggggtgatcatctcgcctaatccaaggttagtcacatggtatcagaggaggtcacgattagggtttcttagatttttttttccagccaccatctctccttccggccgccgtcgcggtcttctccgccgccgtcgcggccctaccgcctgcggcctcatctgcgcggatcccgcccgctgccgtccagatccggccgccgccgccacccagatccgtccgccgccgccgtccagatcagcgccgccgctgcccagatccggccgccgctgcccagatccgtccgccgctgccgtccagatccggccgccgctgccgtccagatccggccgccgccgccacccagatccggccgccgccgccgtccagatccgcgccgccgctgcccagatccggccgccgcccgttcgctggactgcgagctcgtctgcgccgccctcgtccagatctgcgccgctgcccatccgccgtcgcggatctcgtccagttccgcggtcatcctcgcggatcctggctgctgcccattcgcggatctacccttcctggccgccgctgtccactgctgtccgcccctggtcgccgtgcctgctgcgccagggcgcagttcccagcagtgctgtccactgctgtccgctgctgtccgccgtgcctgctgcgccaaggcgcagttcccagcagtgctgcgccaggctgctgttcccagcagtgctgcgccaggctgctcaacaatctgcggatccgtcgccgtcaactgcaccctgcctcgtcgccatctgcgccgtgcgtcggtggctgccattgcgggcagactgatcaactcggcttctgcgaccaagaccttcgtcaactcgtccaactcggactgctgtcagctgcggttactctggtttacttggtttccagtctcctgttcttcctgtttttcattgaattcaacatgacgacaaatgctatcgtggtcaatatcactcttgatggacacaattatccggaatgggctttctgtgttgagactgcactcagaggacatggattactctttcatttgactgatgcggcacccatacttgcggatgatcgtcgcaatgctgctgatatcaaaacatggcagcttaatgatggtaaagtgatggctgctatggtgaacagcgtcaaaccgtctatgattatgagtttgtctaaatttaaaactgccaaagccatctggtctcatttgaaggagcgttttgttcaggacagtggtgctctattacacactctcatgcaacagacacatgttattgagcaaaatgatatgagcattgatgagtactactcagcctttgatcgtctgatgagtgctttgacatctatggtgccagcctgtactgctgatccgtgtcctgctcatcagtttattgagaagttcttcacttacagatttgttatgggcgttcgggccgagtttgattctcttcgtgctcgtttacttcagggttctgacactctcacaatggctaaggcgttgtctgatttacttgctgaagagactcgtcttcattctctgtcctctactggtggtaatcctcactgtgtgttggctgctgcccagaaacctaagaatatttttaagccttgtgatcattgtggcaagaccaatcatcgatctgagctttgctttgtcaagttccctgataagttgactgatttccgtgcacgacgtgctgctcgcggtcgtggtcaaggaccatctaatagaggctcagttgctgttgctgccacttcgtccgcctgtacttcagagtcggcctgggtacttgattcaggagcttcctttcatgtcacatctgatcagtcaaagttggcttctactacaccagtcacagatggtgcttcagtgcagacagctgatggtactgtatgccacattactcataagggttctctttcagatccgcgctttacagtacctaatattttcttcgtccctgagctatctatggatcttctttccgtaggccaaattacggatcataattgctttgtcggatttgatgactcatcttgttttgtacaggaccttcgcacaggggaagtgattgggactggccgtcgccgtagagctgctcctcgcctctacatcttggactctttgcggcttccttccttggctacatctccagcgcatgtgctttcagctacccttgcttctgttgcgtcttttgcccagtggcatcatcgtctaggtcatttgtgtggatctagattgtctactctaataaagtcaggttgcttaggtcatacttcggttgagtctgattttcattgtaagggttgtcatcttggaaaacaaatacaacttccatattttactagtcattctcattctgttcaaccctttgatttggttcactctgatatttggggtcctgcaccttttgtgtcaaaaggtggatataaatactatgttatttttattgatgatcattctcgctacacttggatttattttatgaaacgccgctctgagctgatttctatttataaaacctttgctcgtatgattcacactcaattttccactcacattaaaacctttcgttctgattctggtggtgaatatttatctgataatttccgccagtttttgacttcagagggtactcttgctcagctttcttgccctggtgctcatgcacagaacggtgtggctgaacgcaaacatcgtcacattatagaaactgctcgcactttgttgatatcttcttttgtcccgtcacatttttggggtgaagcagtttctactgcggtttacctcatcaatagacaaccgtcatccaaactctctggcaaaacacctggtgaagttcttttcggaactcctccacgatatgaccaccttcgagtttttggatgtacgtgttatgtactattatcacctcgtgaacgtactaaattgactgctcaatctgttgagtgtgtttttcttggatatagccctgaacataaaggctatcgatgttatgattcatcttctcgtcgcatgcgtatttctcgagatgtgagcttcaatgaaaatcgtcccttcttttacaactcttccactcattcttctttttattccacagagtctacctccttcatgagccttcctcccatttctgaaacttcatcagtatcaccacctactgtttctactccagatgtccttattcccatcacaccaccttccacttccacaacatctccgtcttactcttccaaaccacctgtcactcagacttacattcgtcgtcctcgctctactcccacggccagtcctgatgacgatcctgttgctgatacttgtactaacaatgatgactctcatgttgtttttaatcagggatatcatcttcgtgaccgtggcactattgcagctccagaacgttatgggttttcccgtgctggtgcagtcattgctgaaccatcatcttataaagaggcgtctggtatacctgagtggcagcttgctatgactgatgaattaaatgcccttcatcgcacatgtacatgggatgttgttccgttacctgctggtgttgtacctatcacgtgcaaatgggtattcaaggttaaaaccaaatctgatgggtctattgagcgatataaagctcgtcttgtggccagaggttttcaacagacacagggtattgactatgatgagacttttgcacctgtggcccatctgactactgtccgagctttacttgctgttgcagcctcatcttcttggactatctctcagatggatgtcaaaaatgcttttcttcatggtgatttacatgaggaagtctatatgcatccacctcctgggatagaggttccatcagggcatgtatgtcgtctccgtcgagccttgtatggtctcaaacaagctcctcgtgcttggtttgagagatttgtttctgtcatcaaggcttgtggtttctattctagtgatcatgatcctgcattgttcattcatgtttcttcacgaggacgcacgttgttattactttatgttgatgacatgttgattacaggcgatgatccagaccatattgctcatgtgaaggcgtctctgagtaaggaatttcaaatgtctgacttggggacactcagttatttcttgggcattgaagttttgcagactcaaaatggtatttatctttctcaggccaagtacatacaagatcttcttgatcgttctggtcttagtgatactcgcactgttgccacgcctatggatctacacttatctcttcgtccgactgatgggacacctttggaggatccatctcgatacagacatcttgttggcagcttagtttatcttactgtcaccaggccagatattgctcatgcggttcagatcttgagtcagtttgtctctgctcctacatcagttcattatgggcacttacttcgtgtgcttagatatttacgggggacaaaaacacaatgtttattttatgactcaaattccccacttcagcttcacgcttactctgatgctacctgggccagtgatcctacagatcgtcgctccatcactggttactgtattcttcttggatcatcccctattgcttggaaatccaagaagcaagctgctgtatctagatctagtactgaagcagaacttcgagccctggctactactactgctgagattatctggattcgttggctcttggctgatctaggcgtttcttgtgactcgcctacacttcttcgctgtgacaacactggagctatacaaatttgtcatgatccagtgaagcgtgaactcacaaaacacattggtgttgatgtctcattcactagatctcattgtcatcagaagaccattgatcttcaatatgtgccctcagaattacagcttgcggatttcttcacaaaagcacaaactagggcacaacgtcagtttcatctaatcaaactcaatgcttcaaatcctccacttccgccttgagtttgacagggggtgttaaggcccataaggcccatattgcctatatgcctatatatatgctacagtacccgtgggggtgatcatctcgcctaatccaaggttagtcacagaggggtgtctaccaatcgtgtaggcatccattgcaaattttagcttatcgaactcattcttgctagtcttaagttgagcattaatactagccaattcatcattaagcttggaaattgaaactaggtgtttactacaagcatcaatgtcaatatctttacacctagtacaaattacaacatgttttacacaagaattagatttatttgctacttctaatttagcatttaaatcattgttgacactttctaaagtagagatggttttatgacaagtagataattcaccagagagtatttcattccttttaatttctagagcaagagaattttgtgcactaacaaatttatcatgcttttcatataaaagatcttcttgtttttctagtaatctattcttgtcattcaaagcatcaatcaactcattaatcttatctattttagatctatctaagcccttgaataagcatgaatagtctatgtcatcatcatcactagactcattatcactagaagaagcataagtggagtcttgagtactcaccttcttctcccttgccataaggcatgtgtgacgctcgtttgggaaaagagccgatttgttgaaggcagtggcggcgagtccttcgtcgttggagtcggacgaagagcaatccgaatcccattcctttccaaggtgtgcttcgcctttggccttcttgtaaaccttcttgttctctctcttcccatttttcccttgctcctggtcactatcattttcgggacagttagcaataaaatgaccaagcttaccgcatttgaagcatgatcgctttcccttggtcttggccttgcttggctgtccctttcgaccttttagcgccgtcttgaatctcttgatgatgagagccatctcttcatcattgagcccggccgcctcaacttgcgccaccttgctaggtagcgactccttgctcctcgttgcctttagagcaatgggttgaggctcgtggagtggaccgttcaacgcgtcgtcgacgtatcttgcctccttgatcatcatccgcccgctcacgaattttccaagtacttcctcgggcgtcatcatcgtgtacctgggattctcatgaatattgttcacgagatgaggatcaagaacggtaaaggacctgagcattaggcggacgacgtcgtgatccgtccaacgcgtgcttccgtagctccttattttgttgataagggtcttgagccggttgtaagtttgagttggctcctctccccttatcatggcgaatcgtccaagctcgccctccaccaattccatcttggtgagcatggtgatgtcgttcccctcgtgagagatcttgagggtgtcacatatctgcttgacattgtccaagccgctcaccttattgtactcttccctgcacaaagacgctaagagaacagtagtagcttgtgcatttctatgaatttgttcatttataagcatagggctatccgagctatcaaatttcattccattctccacaatctcccatatgcttggatggagagagaataagtgactacgcattttgtgactccaaaatccgtagtcctccccatcgaagtgtggaggtttgccaagaggaatggaaagcaaatgcgaattcgaactatgttgaatacgagaataatcaaatgaaaagttcgaattgaccgtctttttgtagtcgttgtcatcatccttttgggaagaggtagactcatcactatcgtcgtagtagatgatctccttgatgcgccttgtcttcttcttcttcccttccttccgtctatgccccgagccggagtcgttggatttgtcatcttttgggtcgttgacgaagaactccttttccttgtcgttgatcactattcccttccccttaggatccatctcttcgggcggtaagtccctttgtgaagagaaacggctctgataccaattgagagcacctagaggggggggtgaataggtgatcctgtaaaaacttaacttatagccacaaaaacttgttaggggttagcacaataattgccaagtggctaaagaggagatcttgcacaatacgacaatcacagagaattcaacacaaagtagacacggtgatttatcccgtggttcggccaagtacaaaacttgcctactccacgttgtggcgtcccaacggacgagggttgcaatcaacccctctcaagcggtccaaagacccacttgaataccacggtattttgccttgcttatctttatcccacttgcgaggaatctccacagattggagtctctcgcccttacacttaagattcacaaagaagcacggagtaagggagggaagcaacacacacaaatccacagcgaaatgcgcacacacacggccaagattcgagctcaaagactatctcacagtttctcacaagaacggagctcgaatcacttagaatcacaaacgaatgcgcaaagacttagtgtggatgatcaagaatgctcaagagttgcttggtgtgcttggtgtatccctccatgcgcctaggggtcccttttatagccccaaggcagctaggagccgttgagaacaaatctggaaggccatctttgccttctgtcgtcgggcgcaccggacagtccggtgcacaccggacagtgtccggtgcccgattcctttccttaattggcgaagccgaccgttgcagatgcgggagccgttggcgcaccggacagtccggtgcccccttccgaccgttggctcggccacgtgtcctgcgctgatcgcgcggccgaccgttggccctggccgaccgttggctcaccggacagtccggtgcacaccggacagtccggtgaattttagccgtacgccgtcagcaaattcctgagagcggtctcttcggccgaggcagcctggtgcaccggacactgtccggtgcaccaccggacagtccggtgccccagaccgaaacagcctcttggctgtacacagccaactttcttcttctcttcttcttcctgtttctaatacttagacaagtatattagtacataaaaccaatgtactaagacttagaaacatacctttgctctagatttgcactttgttcatccatgggcattgattcacatttaagcacttgtgttgacactcaatcaccaaaatacttagaaatggcccaagggcacatttccctttcagccattcgtcatcgccaaagttctgaagcccggaacatacaagctggccaacaatcaagacgaggtctacgggcaacgcttggaacatcaaacagctacgtcgcttctacccttaagatgttttcaagttgttcatatacctcgcacccacgcaaagtttagtcatcaaggaagggtcggcctcgcctcggcaaagcccgaccctccctcgggggctaaaagggggggaccccctctgcgtcgaaattttctcgaaaaaagatcccttttagcagaatatctttcgtgctttttgactacttcgaaaagcggatcctggaaacgacggagtacaagtaagcagccaaggctgatcgagccgagggactcctacgcctccgggatacggatacctcactcatcaccttctgcgataagtaactcgcgttcggataaagtgactccgcggaccgaacaagtctttacgttcggaagctcttctgccgaagcggtccttcaagccttctcgactgaatcggtgacagggcttcatggacgggtgaaagtacgcgtaagcggcaaggccgatcgagccgagggactcccacgcctccgggatacggatacctcgctcatcaccttccgcgagaagcaactctcgctcgcacaaacatccctgttaccgacaaaaagtccagatgctcgaaataagaggaaaggagacacagctttacaacgcagcgagggtgtgttctctggcctcagcggccgcagaaggcacacactacaagacaatctgatcctgcaggctcgggtcttcacgctggaagggggctagcaccctcgacatcgacgacaccttcagtgaggtccgacccagcctcggacggcgacgcggtccggggactcctccgggaatccggcccgagcaggcggctcggccggtcacccctgaggcctcggccaaccatcctccaagggcgccagcccgacccgaggcctcggctggtcaacttcggcgtcggtcccgctgacggacaacccggctaggctccggccaaccaggttctcactttcgagccaactccgcctctgttcgtactgatatcgctacccctggcctcggctcatcgaagagcggccaaagggtctctttaactaagctagaggagcctcagacaacaaggccgatcgaaccgagggactcctacgcctccgggatacggatacctcactcgtcaccttgacacggggcgactcatgcttggtgaagcggttcagataatcaacaggcgagacttagtgctcgaaaatgaggaaaaaacacggctccgtgccgaaattacatacatgttcaggcctcgacagccacaatgaacaaaaacactgcattcaaagtgcccttacaaacggaactccggttccccctccgcaggtacgaacaaccccactccatgggggcgggcctgcggagcaacagaagaccgacgaacggcgcgccgtcacctgctccagcagcggcgacgacgacgacttctgctccggggggccgaacagcggcaacgctgacctcagggtggatgctgctgccaggaggcccccgcccatgccaaaactcgtgaggcaggacaggcagaaggccgtagagttggaggtcagtccgtggccggccctggctatcacgccggcggaagaacctcttccagctgccgtggcagacgccggcgccgcgagcggctccgaagccacttgcgcccgaaagccgggcacgctgcagctgccagcgccacggacgacacccgctcctccccccatcactgagtgaaggagcggaccaccgcccacgcaggggccgaccccaactcgacgcactcccctccccagccttggtgataaaaatccttgaggctgagggagggggaggggccgcagcccggctcgctttcccccaccatcaagccgaaggtcaccatgttgggtgaccgccggtggaggggtgcagccgggctgcgtgatgaaaatccttgaagccgaacgatggctgaaaggtaccaactcccacggagttgcgttcctccaacgatgaggcggaaagacggcgggtaccccccatccgggggcttggaagatggaaagacacgacgcataagggaggaagaagacatggtcgccttccgaaaggggtcaccctccttttaaaggcaaccctccctacgtgcgccctcaaacgtcacgggctgagtcttctccaacacgctccaaggccctcccctgcggcgcgggggctgggtcccgcatgtcatgcaaaccggctcagagcagaagaagccaaagcgccgcgcgtggtgcacacaaccgcccagcggttacaagcgaccccccactttggcccagaccaacgggcggaaggggcaggcggccatgcaggcggcatgcaaccgcgccaggtggacgcgcttctccgactcccaacgcgccagcatggaggcccaggcccacgcgtcacgcaaccggcgcgccggatgctgcatgcaggtaactgcaccgccacttgcgccaccaccgcgcctcttcggttgtggaaccaataccgcgactcgaggcggcccagcgcacgacccagcagcgccagcctggcgcgacggtcaatgcggccgaaagtgggccagcagtaatgacggtggcgggcgggcgggagcagcggtcacgtcgtcagccaggctcacgtcccatccaggggcagcaagagagccccctctcacggcgtgaagacggcgtgcccgtgatccgtccctcgaacggctcgcgcacgcgcaacggccgccccgccaaccaatcgccccgtcgcattaactccgcggcgggacaggcggcgcttctggcaggagaagcgggcgacgcttcgccttcgccgcaataaccgcgccaaaaaaggtacgccacgtcgttcgatttcgtatccttttccttttttcctctttctctatctcttgcaacagggaccgagaaagggggataccccgaaaaggatccttccctgtgaaggaaccgggctccgagcccccctactgatcagaggttcgaaggctggccctccgaggggttcaacagtcgcctcagatcgcgtgggccctacacccactactggtcagaggttcgaaggccggccccccgaagggctccacggccgcctcaggctactcgggctccgcgcccattactgatcaggggttcgaaggctggcccccgaagggttcacagtcgccccagatgccgagcgagggatgaccaggggtacgttcgatacataaccaaggctcgggctgcgctcccgaggtaccctaggacatttccgagaacagcgggagcgatcttgtaacggaatcccatcggagggaggcatcgagccctcggaccccgtcgccaggggaccgggtccggcagatcacccgcaggtatttttgggcgtgcctctgggcccctatccgacccccaacgaacggggcacggacgtccactcggattacccgcttgcagctcaccggagacaccatgttcggtgcccatcgagggtaacatggcgcactcccccctcctccttgcggaaaggcgacgtaggggcgtatgtaaaaaagccgagtctgtccctgatcgccctctcgccctgtgcggaggctcgggggctgctctcgcaaacccggctccggccgaaccgttgacaacgtcaacataccagcccgagagcttgggccccgaccgtgcacccgggctacggccagttcgcatgagggaacaaccagacccgccgaagcattacgcaaggcattaagacctcgaaggagtgaaaccactcctccgaggcctcgggggctacacccggcgggtgcgctcgcgcgcacccaccggaacaaaatgcaaccgagaaaggctggtccccttgcaaaaaagtgcgacgaaagcctccaagcgagtgttaacactcccttcgaggctcgggggctactgtcggggaccataattaggggtacccccaagacgcctaattctcagctggtaacccccatcagcataaagctgcagaggcctgatgggtgcgattaagtcagggatcagtccgtacgagcgactcgatcacgcctcgcccgagcctagcctcgggcaagggcagccgacccctagggatctccgtctcgcccgaggcccccctttaacggcggacacatccccggctcgcccgaggccttgccttcgctaagaagcaatcctgactaaatcgccgcaccgaccgaccaagtcgcaggagcatttaacgcaaaggtggcctgacacctttatcctgacgcgcgccccccggcagagccgaagtgaccgccgtcacttcaccgctccactgaccggtctgacagaaggacagcgccgcctgcgccactccgactgcagtgccacttgacagagtgagactgacaggcagtcaggccctgccaaaggcgccataggaaactccgctccgcccgacccagggctcggactcaggctaagccccggaagacggcgatctccgcttcgcccgacccagggctcggactcgggctaagccccggaagacggcgatctccgctccgcccgacccagggctcggactcgggctaagccccggaacacggcgatctccgctccgcccgacccagggctcggactcgggctaagacccggaagacggcgaactccgctccgcccgacccagggctcggactcgggctaagacccggaagacggcgaactccgctccgcccgacccagggctcggactcgggctaagacccggaagacggcgaactccgctccgtccgacccagggctcggactcgggctaagacccggaagacggcgaactccgctccgtccgacccagggctcggactcgggctaagacccggaagacggcgaactccgctccgtccgacccagggctcggactccgccctggcctctaccgaacgacctccgcctcgcccgacccaggggctcgggctcggcctcggcaacggaagacagactcgaccccagcttcggaggagcccccacgtcgcccggcctcgggcgcgggcccgccacgtcaacagggagcgccatcatcaccctaccccaagccgactcgggccgcagagaacaagaccggtgtcccatctggctagctccaccagataggcaatgatggtgccccgcgtgccctgtgacgatggcggctctcagctcccttacggaagcagggggacgtcagcaaggactcgaccgctccgacagctgtccctccgccaagctccgttgctcctccgacagtcacgacatcacaccagcagggtgccaagatctctccggctgccacattggcatgtacttagggcgctagctctccctccgctagacacgtagcactctgctacacccccatcgtacacctggatcctctccttacgactataaaaggaaggaccagggccttcttagagagggttggccgcgcgggaacgaggacgggacaggcgctctcctggggccgctcgcttccctcacccgcgtggacgcttgtaaccccctactgcaagcgcacccgacctgggcgcgggacgaacacgaaggccgcgggatttccacctctctcacgcccgtctccggccacctcgccttccccccttcgcgctcgcccacgcgctcgacccatctgggctggggcacgcggcacactcactcgtcggattagggaccccccggtctcgaaacgccgacagttagggtgaaccaacgaaggcggcgatgaagggggagggcgacggggcgggtccagccgagcaggggcctgcgccggacctggcaaggggtgttgacggcaccgtgacgggagaagttcgaagggtggtgctacaaggtgctgctggtcgaggtgatcgacactagggagagaacgtcggcgcgcgcccgcaggctcacgaatcaagcgacgcagacacaggggggcacggatccagtggcgctgcttgggaggccggggaaggggggcgcccacggccagtgaggcggcatgcgtgcagccagggaagaggaggggctggccggcatgaggggaggggcggccatgacgccgggctgcaggaaaggggcgaccgcggggaggggaggtccagcggctgggagaaaggagggggagctggatggaggaggaaggaggtccctgcgcccatggagttgggaggtcgccggacctgggcgctccctggccaagggctgggaagagcagggggaaggccgacgttgaggggacgcggctccttggacaggtcaaacgcggcgcccttcaagcgcagctcctgcacggcccgcgcgagtgcgcgcgcatcaccgcggtcccggcacagccgcgccgcggcgcgccagtaggcgcccaccaggagctgcacggccgcggcgagcgcgagggacgctgccagggacagggacgacgacgcccaccacctcctgcacgcggcagaaggggaggtggtggccgcggcgaccacggacgcggcgaagaggagcgcgagggaaaggccgtgaaaggcgaggaaggccgcgcagaggtagaaggcgtcccgacgcgccgcgtccatgtgcgcctccagcgcgcacgcgcggcggcccaggcggtcctcctcccgctgccacagcttcagcagcagcaggtgcccctcgctcgccgcgatctccccgaggcggtgaccctcgcccgccgccgtgctcgccatgggctccctccccctcttcgccggtcctgctctgcgctgctgccgctatcctggccgcgggtgtagaagtgtaaagtggattgtattgcatagaggtggactacaatatatagagacacaggaaaccctaaccctaatgggccgacaacccaacagtggtgccagcccacacacacagagtctaacaataatctaaatgtataactgtgcattaaaggtttattcaattcgaatagttggtattgaaacttgatacaaataaatgtagggaaaataattttattgttgccatttgaaaattagattcttttttttactattgtgtgtgactgtgtggtgtttgtgttgtaatggggttctttccccttttcttctcttaaattaatacaaagatgcgcaactcttgtgcgcattccagaattttttttaaggctcatgtcaaactttcactcatttttgagatatgaaatcttaaatgtgtacattctacatataaaagtgcacattcatacctcaatgagaaagtcatctctgatgtcccctctatccacaaatgtatgcgtttatagcataatccacccctcatccccctcgttaaattaatctaattagggtctgctaatgtaatattgctatttaaaaatttaatagggcgtggcctttatggcactacaaaaggtaggcgttaatttcatactgtctagtcttagtgattgattgcaggtcacaatcatttcctttctacgtctacttaatatgtcctaagcatcaaagaaatacttacacctgtggatgtttggaatagtttcttaaaatgattgtaatcttgttcctaggtaatcaataaaccactctctttctcataaagaaaaaagggcttagccaatggtttgccttgagtttgtagctatcccaacaccacacgtgttttaaaccataaaaccaagaaaacgttgtatcagaagatccgatgtttttcgctaggagcgagaaataaatataattgggtcgacaaaaaaagtgaagcaatgccctgtcactttgatctcgacatcatttttaatagcagtactagaaattaaataattctagagcttttatgttcttttatattttccagttccaattatactgtgaactttccatttgcttctttgtgttgtgactttgtgcccatctttcagaaaacaaggaggttacccgacaagcttgttcacca

SEQ ID NO: 885 - DNA, 4203 bp, Zea mays
  Intron number 1 from transcript GRMZM2G160032_T01 (locus G RMZM2G160032) derived from phytozome v7.0 (chr-ID 3; pos 2 16349390 to 216353592 reverse strand)
accttgggaggcgacgagcatcaccaggacaccaggtgctccctcccctttcttccctttcttcccttcgtgatcggacctgaatctaattacaagtgtatatgaatgtatcatgtctaccaactttgtttgctttgcaaaaattattgggtgtatatccatgccctttactgggtccgccccttggtttgaccgtcctcaccttttctttaaggactttcttcacgctgaagttcgcaaacagagaatagacgagaactactgaactagcaaatagagattgctgcagtctcgattgtgttgctttcaacttctctatgcatgcaaagcgcactgcacactcagtgactaaatatagaagagaataaataaaattataaagaagttagtattcaacaaagattaacaacttacagattcttcaacaaggattttataggaatgttagtaagccagtgctgtataacaccaactggatttgatcaaaatgttagcagatctcctacaacaacacctgtctcttggaaccagaagctatcttcaaaagcaagtgaacaaattttgaacactcatagtcagtaaatgttatgtttccttgcataaacatggaagatttggtcagtgaccactatcctcaggaaggctaatgaagtctgctcttagagtattttcatgcaataattcctaatgattttccaacaacctgagcttagacaatgggtattgactttctgagcaatggagtccaacttgacaacatccttctttagtaagagcgcacctgagatatccgaggattaaagctcagaaaacaagttaccaatatcaatcagttaggaaagaaagaaccgtttcatcggctttcaataaaagctggaccaagaattttgttctctaaaaaatcagttaggaaaggaagatactgtccaagctgaagggttttcacattgacaacatcagaaagctcacatgattctgatacaattagcattaatcaagtatctggaagcttattttattagaaatgcatatagtcgcgccattgtatttgaataggtcttgtcgtatttttgtaacctaagcctactcggttctatatatgaaaggtcacaccctctgccccattaagggcgtgagatgtttctccaattttctccgattttgtacacattttttatccatcttgtgccactggctgaatacaagacaacattacatagcgataaaaaacaagaaataacagactctttttgttgcctggataccatcagctgaaaccgacaagtacaccttaagcaaggatttggttccaggatagttatccaccctatcaccaaaattgcaaaaacacacatatgcatatactgtgaagtagtctccaaatttatgacaatgccagcactatgcctgccaagtaagtatagtgtatcatcatactactacctaggagcaagacaaaggtgtctcaactaacaacaaacagatgccagttgccacaacaagaggaacaaggatatgttactactgtattttctattcgtacttttatcaattaattaatcacatgattgaacaatccatagatggatacacattacaggagctgaactgtgctaacatcaatggatgcctagttgatagttcatctagaaattgcataaaaacgaacaagaaagtgtagcattgacgggaagtaaccaaactgactttgcctggctgtcctcctggcaatggtcaccccaaatgaacaaaggttcataacagaaaggaaacctgatcctcagtaaccaggttctcatattgataaggtcgaggaacgagaacatggttcatggtatgatacttaaaagacgattttaacactacagggacgagattgtttccgcgttcctgggacggaacgaacgttctcggaacgaggaacgtggacaagttctatgttcctggtttatgagacctgatctacacttacaatgggtgtcattgtatgcacttgatcaatttggccacttgtttgacaccctgcatatttagtctaagaaaagggcagccagcctagggaagtcgggttgaatatgattaataatagctagataggcggtattggtaaacacaaaggttactcaaacatagcctgctataatgcatgacgatgtgcagtacacactacagaaacacatgctcaggagaaacggacttgcatgccaactagcagaaacaataattcatacatgctacaaatccttcatgaaaccaagtgcaggcctatgatgcgcggatacttttcaaaattcacgtaccggtgtcggataccgtatcagatatggatacttcgcggatacttctgaatacgtatccgagacgtatcggaaatttaaataaataaaaaaagacggatacttctaggacacctctcgaacacatgtgggataccttatatccctaatttccgtgcgcaccgcttctccccacggcgcacacgcgcaacttctctgcgcgacgccagccccgcttctccccacggcgcgccgccatccccgcgcaccttcctgcgcgccgccagccccgcgcttccctgcgcgccgccagccgtcagcccgcacctgcgcgccgccagcccgtcaccgcttggagacgcgcgcagccgcgcttccctgcgcaccgccactccagccgacagccgcgcttccgtggccgcgtccaccgccgccagctctgtggtcgcgccgtcagccaacccatctgccgtcgtgaggtactgaggtacgtgatctgctattctgctgccatctcccatctgctctgtctgacgctgcggttgtccattctctgttcttgttagatcccaatatcccatggcaacgagtgcatctactgatttggtgaactagtgattattttgcgagtctgctggtgtagtgtatctcccatctgttgttgtctcatgtctggtctgtggtctgtggtctgttcgaattaaaacttagaacttgtgtggtgatttggtgaactagtgattattttgcgagtctgctggtgtagcgtatcgttacacatgtttttgggcttttggcatgctggattcattgatttgagtccagataaattctggaagaggaagtagatgtttactttagtcaaagttgttgaacattaacttctaacgtccttaaattgaactgatcggctgtggtccatttcagacatttcagaatttaattttatttataatatatattgcgtatcgccgtatccgtattttttgagaaatggcgtatcgcggtatcggcgtatcgcgtatccgtatcaggtcaacataggtgcaggcgcttcagatattcactacatatgcttaatgtaacctattagaagttttgtccccccccccccccccccaagaagttacagtctgctaatagctgagagcgttaccaaaataaaaattcatggcagcttgctaacatgcctttatacaaacatgacttaccaaaactgaaatcaagaataatccaaccagacatgacacacattgttgttagatgattccaagcaagatattacttgtagagaattttgtttttccctgacaatggtgaagctggtggatccccttcaaagaaagctggtaaaatccaccaagaaatctagaaatgaaaacctagcatctctactaatcctctaatcggaatcaacctggcatctagaaacaaaacgaagcatgttttagatcttcagggtctcagggtatgagagggtggaaaactggaaataggcaccctttggacatgttcggtggtgattcctgtgtttagggtcaccactagtgccagcatctgcatgggcatcggtactgcatctcttctcagaggtcacaagtgaggcagaggtgagtggatggcaccactcatgagcggggcggccctagggtgtcaaaatggttcctaccctttgaaccctcttcctgttaaggtcagcctgctccgaactgtgggctcaatctaggagcaatgtgttttgaatgggcaaacctgttccccttgcatgatagtatttcagtgttccatgcttgctgttctctttcccaagtgctcattcctacttcataatgaaaaattagttcaaaaaacaaactttattgttgtgttctcagtgttatttattttgccttgctaggttgcctatattttcttccccttcttgaaa

SEQ ID NO: 886 - DNA, 3710 bp, Zea mays
  Intron number 2 from transcript GRMZM2G140590_T03 (locus G RMZM2G140590) derived from phytozome v7.0 (chr-ID 8; pos 1 15017208 to 115020917)
agcaaagacaactttgcacaagccatcttccaaaggtcaacctccaacccaactcttctaattgcgtcagcaatactggggctcttactgtcaaatacacagccattgcgctgcttccataaggtccaaactcccagaatgactagagaattgaggccatcccttgcaattccagagtccttagtgcataacgttctccaccattcaaggaaggcactatcctcagattggggggcaagaagctgaaggttcacttgaagaagcagtttgaaccaaaattctcgagcaaaaacacatccaatcaacatatggtccaaggtttcttgatcctggtcacataatggacatctctccggatggtccatgcctcttttctgcagcctataattatatgctgtccaaaccttcctgtgtgcgaccaaccacataaaaaacttggtttttggaggagcccaagttttccatattctatgaaaaggctcaaactcagaagatcccataaagaaacccctatatgcttcctttgaggagaactttccgtttgaagctaggcggaaaaaaaatgcttgtcttcaacttgaggtcttagaacaattgagtcaattaaatcccacaagatgagaaattcattgataattccaacagaaagagctccctgaatgtcagaaatccagctctgattagagatagcatccaccactgttctcttgttaacccttctcttaggaaaagtatccctttatttatcacttaattcttccagtttaaaaaatcagctgtattaggattttaggtagtcaaatttctttaacttagcccatcaatacatgcacagttacataagttgacaacacatgattgattttattagattttttgtagaccaaggcatttagccctgcttattttgaaagcatcacataagttttgctggggataccagtttacaagaactgcggagcccagttaaaactcacctccactaaaagccaacaccaggccctacccaaccagagaaacactaacaaaacaggtaggttgctacaacgaaaaacaaaaaggaggaaaccacagcaagagagaaattctgaatagcaaaatgaaaagaaggaacagctaagccacagatgctttgcctttagcctcctttttcttcatgtcttttggcaaccagacgctcctagttgtttgacaccatctttccgtctaggcacatttcactatcttgaaagtccatcctttatcttcaacaggaattcctccatcttgtctctgtcttccttcttcgtcgtcatctgccactggtttagaaaaccaagacattgaagccacttgtttaggagatttaagcatttttttggagaaaactagaccatttcttgttttccacaacacccaatccacaccaactactatcacccacaaggacttgttcctatctccaccatctttgttcaggcacagctcctggaatttatcaacgatggtggtattttcggccagcccaagctgtcctgacccagcaccaggccaccatcgctataaggcatctgaacagcagatggtccacttgatttttactagatagcatataacttccactatttcgaatgatatatcactacaaaaatcacaagtaaaagtgtcacattggagactgtcactttcttaaatgacttacatttggaatcagaaggagtactatgtttttagattaaagtccatatcagtgggaatgggatggtcaaactttgctctgagagactagatattcacattttaatcacgtgaaaaaacaaaatatatacactgttgcattatttggtgggcttagacactattgtacatcagtgggatatggaatgtgcatattagaattgttatagtttgttagttgcgtagttaatacatgtatgttttcagttatatatattagacctttataagaaacacaactctgtatatttgcaagtatggaacgtggccgacaatattattttacaccaggaggtgccttagcagcacaggtggcgccttagtctggttcctgttctagtaaggctgcatacaatgcattcttctttgtgtccatcaagtttgtgccttggaggagaatttggagatcctcggcaaccctggggtgtaaattttttttgtgtcttgctgtcaaaaagtggtctggatggctaatcaaaattgtacaaacaatattgtacaaacatagtttaacgcatcctgctgctagcttattgtgtgatcaagctgaagagaccatcctgcatattttagtttcttgtattttcgctcggcaggtctggaccttggtattacagaagcttggacttgtggcactagcacctgattctgatgtaacaagtttccccagctggtggtgtggtgctatcaagaagatacctaaggacgtgaggaaatgatttaacacttaaattatcctggtagcttggaaaatatggaagcatcgaaatgcatgtgttagctcaaacgtgcaaatggttttacaggcggtgggtactgagagaatcctttggtgctctccaggagcttctgctctttaggagctgctcccccccccccccttcagattaggtttgagttttcctggttgtggttatttgtattttttttaggtgtgggtgtgtgagtctcaaggttttcctgggagaaggttccatgccctctccccctggtgttctttcttccatcttaatgaaatgacatgcagctcttctgcatggttcgagaaaaaaattactgtaaggtatctctatctaatatcagaagcaatatggtttcttctagaaaccttcttgaactgtgcacatgaacagccatgttgtcccctgtctttccgttatcatccatgacgcttggaactagagttgtttatgtgcaaagttcagaatctatcttttgtatgccttctatgatccagtaagaatcaaaacacaattcacattctatcaatgcttactggtcaaacagtccatgtaccaaacggcaaacctcttactcatacatgcatgcagatgcaggcggcgtgttcgagcccaacacaccacatcattagagcatttgttttacaaaagaggctgccatggcatttttttatgaaagaagagatctgtgaggggaaaggataagctgtgctgtgtgcttgagcacatgagtctcatacgttattaggctgggagtgggagcgctggttgaggttaaagtgtgctggaccaggaagtggtggcccaagttgacctttattcattttattgtattacttttattgttctctttaaaacatgtaatttatgtatagcccaataaagatgtgcatcaaccagttgcttggaccctgggtcatcggcctcataaacttgggttgggtttgcataccaagtcctaaattgtcattaaatgatatattctattttctaaatgttgacagtaagatcgttactcttagcaacacatgggtatgtttgctagtaaagataggtgctaagtgctctagatcaacttattccgaaatacttgatgcaccgaatttcttttagttttcatttactgctttaacttcgcattttcggttgtagttcatcttgattatgttgaaccctttaacccggatgtgacctaactctagactaacttctgctttagataaatcaaaaccacagggtggactagactctaag

SEQ ID NO: 887 - DNA, 962 bp, Zea mays
  Intron number 1 from transcript GRMZM2G125300_T01 (locus G RMZM2G125300) derived from phytozome v7.0 (chr-ID 5; pos 1 566996 to 1567957 reverse strand)
acacgctcgtgctggaatatagtgcgattttatgttcctgctacgttgcgactgctcatagaatatatgccaattttcatcttcctgctatgtccgtgtatcatgttttttgaaaaataatatctccatatccgcatccttctgataccgcccatatccatgcatacatatggtttgcttgctatatgcaagcgcctcgaacccggattgctatattttgatgatttcgtgtctctcatttgatctttttttaaagaataagttggtgccgtgattgtagatctaagatcaacgtggttgcaacctgtgttcaactaagacacatcgttcccagtttacttttttcttagcttttgtgcttgcaatcctgtgaagtgtgacgtaactaatggaatagtgtatcctgacaaataatgcatggtgaaacgttttttatccagattccttgaatcctctaaattgtgtttgtttattgttagaaatgaacttcatctaccaaacaggattcgaacatgcctttctttaccatgtttcgtgcaactatgcactgctaacatatcagtaccatggtttgcacctgctagaatatcagtttattaccgttttggtgcaatcgtgactgaggtggatggggttattgaacaacgtatttgaatatttgatgttttagctgcatggaagtattcattccaatccttctgttgaattgcaaagaattgcttaaatttgagatctgtatagttctgttttagttatgccttttcatttgagcctgaattagacttcagttgtttgcatagttatagttataaatatagaatagcttgcttgtccatcaattttgaattgttacagtactgaatgagtcctcagagtgcatagtgttgttctctttttatgtgcctgatagttggtcctcttgtatttcagttgctcttgcggtagttcccccaactgtcacc

SEQ ID NO: 888 - DNA, 4014 bp, Zea mays
  Intron number 1 from transcript GRMZM2G008683_T01 (locus G RMZM2G008683) derived from phytozome v7.0 (chr-ID 10; pos 146724449 to 146728462 reverse strand)
ttggcaatcttcctcacgaggtattactcttccaatggaacggctgctgtctatgtttactgtgcttgtgtttggctttctatttgctcttaccttttttgttagctttctttttattgtctaataggtatatgcccgtgctttgctacggagctaaccaaaatgtaataaagatacattgaggtacaaaagcactatttatcgctatatgctctcgttagcatcttttaaaagtttaggtttacataccttaaacatctgctagagaatataagaaaatcatatttgccaatgcaattaattttttttgctacaatgattgagtcaataaatagtatataggtgaatgaaatataaacattcagacaacagaggtgttatggccttatgccagtgacagtttaaaccaaccagaagacttagacgatatctctgaaacttatgtccaattatgatatcaggcaatgcaccatttgggtaactgcagaggcacaaataaatattgtttaaataagatatttattcaaacatagatcaatttaatagtgcacttagatactcttatcatagtaatgtcagatatttgtgttggttagcttgattcagatttgctagtgccaccgcccgtggtggctgccgctatcgtcggcgcgacgctagctgtcgaggttcttcgttggagccgtcagcgtagtacaacaaactgctacacgctcctcttacttcgacaagagccgctggcacaagcgacgtctatgactaacacctcggatctcacagctattattggccatcatggatggttctcaaaattgattcagaaaagaaactgaaaaaagtgatcatacaagtccctcggatctcatagctattattggccatcatggatggttctcaaaattagttttagccacaagccacccattaatcgagaatgacatgttagttgacttgaagctaaaaccagtcttccttaagccaatcacatatttcactggaaccgctaattgacagaaacttaaaacaaagaaaatgacaccaatccaaccaaaaagacaatactaccaaaatgaagttttcatataccagaatagaaacaatatcatgtcaattaaagctgcgctatctaagggaagagattgcttcaacttgtttgctttctcagcatcaaagacgtagagggtgtacaagtacttggatcaacataccttgaatttaacaacatccttgatcctcttgaccttcactgatcgggcatccttcctcctcacggtcagaaggaagtccttgatctcggattagacaaagcaaagagataggttgatacttgataatgaactacaaaatactaacaggatggcaaaaaaaagaataaaccattgccactactaagaaaacaaacacccacacacatgctatgctaacttacatataggaattattcaagaaggattatcgttatcagaacaacttcatgtgtttgtgttccactgacattaaactgtagttacaagaacatagtatgatccacaaatatacaagtaaagcatgaaaattcgccaggcaatgttttgcacatgaagtatgtttttttctaaaaatagttataaacaaaaaattgcatgcagtttattgattaacagaataagcaacataaataatagaaaatatgagtctacattatatctttctctgtagctatatgtagaacggtgaacctgtcatgaccttccaggctgccttcttcatggagatcatcaccatgatcaagaagaaacctcaagatagggaggtttccactaaacacaacatgccatattagtaccatgctcttacctgcaaatataagcacacaattttgtcgatcgaagctaactcataatatataaatggatcaaacttactaaagtcgttcttttgctgtaatatggtcgttttgcaacttgttgtacgtctctgcaataccaagaaccattatagttaaagacaattatagcgtggattcattgataatgtcgacagaccgtcagtgcaaagctgaactgaccaacaccctcaagaagaaccttctgcttggcgaggttctacacgggggccttcgtcggtgacataggcttagatgaagaaggcgaacatggagaacatggccagtcggccgttcttgatctccttcaccttgaggatggcagtttggtaggggtcgttggccaggcctaggatgttaaagggcccactggggcaccgatgacgaggatgatcttcgcgatgacagccagacatagatccgttgatgggaatgttgttgccgaagtagtttagtattgtcatccaggagtagagtatcagtctgcatgcgttcaggtgacagacaccatccatgagcttttagttcatactttcagattacagtactgctacactatctctaccaattaaaaaatatgaaacctttggtgtcttctattttgcttttaaataaacgcaatgacatatatatctgagaaagggaaaaaggctactgaagtggtatgataattctgagaggtggtggttaggaccttgaacgaaacggcctaagggtcgcagttagcgccaaacttgttgcaggcctctgggatgacagcgccagcggcaccaagcatggcctatatggcatggatcagctcataggcttggtacctgtatggcgttgatgataggataagtttgctgagtagtgacacttgtatcaacaataggttcatcaccaagcaaatcatcaactgaagaaacatatgcactattcccagtattttggcatgaggtccataactaatttctcaaactaagacaggtattgttgtacgagcggcaaaccagcttatgccaagggtaaaaacatattagtagaagtttatagtatgtaagtttacttaagaaagaagaaattttataattccataatgtctcggttaactgtttgcctgagaaaacaactgaccaagattgattactgctttatttttagttgttactggaatggatgatctccgtggctccttccccgtgagccttgtgaccattgaccagttggctaaattgctatttaatgtagctagatgcaattcagtgctatgctaatttctagtttggtatggcgatcaggtttagattttggcgaaacaaaaaaagtggagtggagtggagtacaagcggccagaaaagtgagagagctataagtctggagctaggaacggtgtgagcacggatcgaccaaaaaaactatgcaataatacaattcaactttgtagtggaatgtggagaaatttcaccatttctggaaatgcataaaagaacagaaaaggtcacctcgaactggatctaggtctgctaaagcaatgttgaaaccctccacatcagagtccacgactcccctttcttcctattcggtgacctccatgtcctcctccacgacacacctttccctctctctcgcctactgctcccgcgtacgccaatcccgcctcaccaccgtgtccgagggaggtggggcgagagcgaaggttgggcggcggctggtgtgaagccatcgcacggggcgagagcgaaggttgggcggcggctggtgcgaagccatcgcacggggcgagagcgaaggatgcggacgcccgcgtccgggtgaggcgggaggttcggtcgtcgcaagcaaggcaggtgggttttgttgacatagatctaggcaagcacgctgggtaagcggaggatgcggacgcccgcgtccggcgatggcgggacatcatgagagggcgggggaaccgcggcgtgcgtcgcggggatagggcggacgcaggggcgggcatcacgagcggccgggggcatcgtggcgtgcgtcgcgggggcgaggcaagcgcaggggcgagcatcgcgccgagcgggggcaggcgggggcatggtgcctggtggacgccctcgttggagtcttataggagtagtatagatttgtcttctctttttttattttattttcaggctacc

SEQ ID NO: 889 - DNA, 14490 bp, Zea mays
  Intron number 2 from transcript GRMZM2G149665_T01 (locus G RMZM2G149665) derived from phytozome v7.0 (chr-ID 10; pos 96251967 to 96266456)
cctcctcctttgtcgcccggctctgtagacggacggttcgggccgcggatggtccgctctagtcacggacggtcagcgaggtgattagatcaggcgagattaacctctttttcgtatgtgtttatccatctaaactcctaaattttgttgggagacatctagaaacgggtatagacctcctttatatgtatgggtacgactgattgtaggcactaacagtcgaaccaaatcaatatatattccgttcctttacgttttgccctaggagtactcaataaggtagctttctgttgaacacaaaaagtgacatgcggactgtccgccctgggaccggacggtgtgtggtccggactgtccgcggtggtgacgcagacggtacgagcgtgcgtagaatcagttcgggtttcggatttctagtgggatttattagcaaaacctacgagattaactcgagaaccaacttgtaatgggtccaaacgtccacccttttatatagatgaaggggtactgccgattgaacccccacaatcaatccaatcaaatatacttatcaattttaccttattcgcatcgttcttccaattcctaggggtaggagtaatttagccttaagtttagatctagtttagtcttccacaacaatctctcttcgactctacgccgattaaaggagcaccgggcgacctgctgacctggagcaacgccttgaaactctccccctcgacgagatctctctcggggtgagataagaatgaggaaaagagaaaggagtatattactaatactgaaaaatgggagcgatctaaccgcatgtccgtaatgataatgaaaaacatctataatgctgttaggggagcactcatttctgatgagaatgctaagaaatactaggtttctattgagaaacactttaagggttcctctaagatttatgctaccaccctcatggatgagctcattaacataaggtatgatgtgaacggaaacgttcgtgaccatattatggagatcgttaatattgctgccaaacttaaggatttgaagatgggtgtgttcaatggtttcgttgcccattttattataaggtctcttcctcaagattatgaaacttttaatgttaactacaacattcttaaggagaagtgccccttgagcgatttgatcaccatgtgtgtccaagagcaggagagacttaaggcctaaagaaaacatgttgttaattatgtaggccatgggatgaacaatgggcaagggaactataagagcaagaagaaagagtatggccacaacaacctcaatacaagggtcctagggatggatcttcttcctctagaggccctctgaaccaagctaatggtgatgtgtgccacttctgcaggaagaaggggcactttaaggaagattgtgttgattggcttaagtggcttgtgaggaaaagtaatgataatgaaattacttttgttgatgaattactttatgttgatttttctatgagttcatggtggattgatttaagtgccactgtacatgttatgaattccttgcagggattccttatgtctcaaaatctcaaagaaaagggaagaagcctttagactggctgatggcaaggaggttgatgttgaagctataggatcagttcgattagctttagacattcattttgttattcaacttaataatgttctttatgtaccctctttaaggacaaaattggtttttgtttcgatgttggatgtgagagcacctagaggggggtgaataggtgatcctgtaaaaatttaaaacttaaagccacaaaacttgattaagagttagcacaatgaaatcaagtggctaaaggagagctcttgtgaaacacaatagacatagtgagaacaagcacaagagacacgaggatttatcccgtagttcggccaagtataacacttgcctattccacgttgtggcgtcccaatggacgtgagttgcactcaactcctctcaagtgatccaatgatcaatttgaataccacggtgttcttctttctttcactatatcccgtttgcgaggaatctccacaacttggagcctctcgcccttacaaatgatgttcacaaagacgcacggatgtaagagagggaaaagcaacacacacaagtatcaaaagcaacagctcaaacacgaacactagtcacaacttgagctctaagttcacacacgaagttctcaactcaagaggagctcaaattgctatcacaaagaatcaaacgcgctagaatgaagacttggtgcttagagatgatcaaagaatgcttggtgtactcctccatgcgcctaggggtcccttttatagccccaaggcagctaggagccattgagagcaatccaggaagggcaattcttgccttatgtcggggtggcgcaccggacagtccggtgtgccacctgacaggcactgttcactgtccggtgctgatttctttcctaatttggcgcagccgaccgttgaagatttggagccgttggcgcaccggacagtccggtgcccccttctgaccgttggctcatccacgcgtcacgtgcggattgcgcgttcgactgttggctcaccggacagtccggtgcaccaccggacagtccggtgatttttagcagtacgccgccgacgagacccgagagcggccagttgaccagactctagcctggcgcaccggacactgtccggtgcacccagactgcgcagagtcttagctgttccagccaagtctttttccttttgtcttttctgtgattctagcacttagacaaatatgttagtacacaaaatacaatgtactaagtctagaatcataccttcttgatgttttgcacttcatccaccattctgcacactttgcacttaaaccatttgtgttgggcacttaatcaccaaaatacttagaaatggcccaagggcacatttccctttcagtctccccctttttggtgatttatgccaacacaataaaaagcaactaaaagaagtgcaacatcaatgcaatatagaacaagaattgttttttattcaaatttggcatatttgggtcattctttgccaccacttggtttgtttttgcaaatcaaactcaatttcctatctctaagtcaaattcacttgttgaggcatagagagaggtattccaaaagaaattgatcaaagattcaaaaactcccccttttcctataatcaaacattctcgccacaagagaccaacttttgacaaaaagagacacttagagtattttgacaaatcaaaagttctaactctactttttcaaaattttcaagtggtagctgatccatttcttgcttcggcccttaatttctccccctttggcatcaagcaccaaaactggatcatttttggccctttaacctcattgcctcaccaaaatcgtcaattaagagcaaaaggcaataagagcaaagagatgaacttggagttaattactctctcatcggagtgcagtggaagtctttcatggtccaagtctacctttccctttcaatccacttttgagactaaaacatgtaaactcaaccacaaggttagtctcaaagcgtcaagttgtagcatgtctccccctaaataagtgcatcacttgcacatggacttgtgaggtccagggatcatgtgtaaaactcgagcaccatacataaacaacaaatctcataaatgcataaggtaacttgatcaaatgcataaaacacatgtatgctatagatcaatccaagttacgcgaatctaagacatttagcttactacgcagcctacaaaaggttgactcatctagaggcttggtaaagatatcggctagctggttctcggtgctaacataaaacacttcgatatctaccttttgctggtggtctctcaaaaagtgatgtcggatgtctatgtgcttagtgcggctgtgttcaacaggattatccgccatgcggattgcactctcattgtcacataggagtgggactttgctcagattgtagccaaagtccccgagggtttgcctcatccaaagtagttgtgcgcaacactgtcctgcgacaacatactcggcctcagcggtggatagggcaacgaaagtttgtttcttataactccacgacaccagggaccttcctaagaattggcacgtccctgatgtactcttcctatcaaccttacatccagcataatcggagtctgagtatccaatcaagtcaaaggtagacccctttggataccagatcccgaggcaaggcgtagcaactaaatatctaagtattcgcttaacggccacaagatgacactcccttggattggattgaaatctagcacacatgcatacgctaagcataatatctggtctactagcacataagtaaagcaaggaacctatcatagaccggtatgctttttgatcaacggacttacctcctttgttgaggtcgacgtgtccgtcagttcccattggagtctttgtgggcttggcgtccttcatcccaaatcgcttgatcaaatcttgcgtgtacttcgtttgggagatgaaagtgtcgtccttgagttgcttcacttggaacccaaggaagtagttcaactcgtccatcatcgacatctcaaacttttgagtcatcaccctgctaaactcttcacaagacttttggttagtagaaccaaatattatgtcatcgacataaatttggcacacaaataagtcaccatcacaagtcttagtaaataaagttggatcgactttcccaaccttgaaagcattagcacttaaaaagtctctaaggcattcataccatgctcttagggcttgcttaagtccatagagcgccttagagagcttacatacgtggtcggggtaccgttcatcctcaaagccagggggttgctctacgtacacctcctccttgattggcccattgaggaaagcgctcttcacatccatttggaacaacctgaaagaatggtgagcgacataggctcacaatatgcgaatggactctagcctagccacaggagcaaaagtctcctcaaagtccaaacctgcgacttgggcataaccttttgccactagtctagccttgttccttgtcaccaccccgtgctcgtcctgtttgttgcggaacacccacttggttcccacaacgttttgcttgggatgtggcaccagtgtccaaacttcatttctcttgaagttattgagctcttcctgcatggccaacacccagtccggatctagcaaggcctcttctaccctgaaaggctcaatagaagagacaaaagagtagtgttcacaaaaattaactaatctagagcgagtagttactcccttgcttatatcacccaaaatctggtcgacgggatgattcctttgaatcgtcgctcggacttgagttggaggagcttgaggtgcttcttcctccataacatgatcatcttgtgctcccccttgatcacacgcctcttgatgaacctgttcatcagtttgagttgggggatgcaccattgttgaggaagaaggttgatcttgctccttttgttcctgtggtcgcacatctccaatcaccatggtgcgtatggcggccgttggaacatcttcttcatctacatcatcaagatcaacttgctctcttagagagccattagtctcatcaaatacaacgtcgctagagacttcaaccaaacccgatgatttgttgaagactctatacgcctttgtatttgagtcataacctaacaaaaacccttctacagctttgggagcaaatttagaattcctacctttcttcactagaatgtagcatttactcccaaatacacgaaaatatgaaacgttgggtttgttaccggttaggagttcgtacgacattttcttgaggaggcgatgaaggtagacccggtttatggcatggcaagccgtgttcaccgcttccgaccaaagccgctcgggcgtcttgaactctccaagcatcgtcctagccatgtctatgagcgtcctgttcttcctctctaccacaccattttgctgaggtgtgtaggtagcggagaactcgtgcttgattccttcctcctcaaggtactcctccacttgaaggttcttgaactcggacccgttgttgctccttatcttcttcaccttgagctcaaattcattttgagctctccttagaaagcgtttaagggtcccttgggtttctgttttatcctgcaagaagaatacccaagtgaagagggaaaaatcatcaactataacaagaccatacttacttcccccgatgctgaggtaggcgacgggtccgaataggtcccatatgcagcaactccaggggtcttgatgtggtcatcacgttcttgctgtgatgagcatttcccacttgtttacctgcttgacaagctgcagagggtctatctttttcgaaagtcacatttgttagacctaacacatgttctccctttagaagtttgtgaaggttcttcatccctacatgtgctagacggcgatgccacagccagcccatgctagtcttagcaattaagcatgcatctagaccggcctcctcttttgcaaaatcaactaaataaagtttgccgtctagtacacccttaaaagctaatgaaccatcactccttctaaagacagacacatctacatttgtgaataagcaattataactcatattacaaagttgactcacggacaacaagttatacccgagcgattcaactaaaaacacattagagatggaatgctcggatgaaatagctatttttcctagtcctttaaccttgccttgattcccgtcaccgaatatgattgaatcttgggaatctttgttcttgacgtaggaggtgaacatcttcttctcccccgtcatgtggtttgtgcatccgctgtcgataatccagcttgagcccccggatgcataaacctacaaggcaatttaagcttgggttttaggtacccaactcttgttgggtcctacaaggttagtaacaatacccttagggacccaaatgcaagttttatctcctttgcattttgcccctaatttcttagcaattactttcttattcttcctataaattgtaaacgaagcattgcaagcatggtaaattgtggaaggttcattacttgctttcctagatacatgaacaacatttctcctaggtatatctctaccatacacagaggaagaacttgaagcaaacatggcatttgaatcataagcattacaactcctatcatgatgaacatttctagaaaatttcctatcataaataaatgcatgattcttttgagcactattagccataggggccttccctttctcctttgtgaaagtgggagccctttggcttgttaagttcttggcttcccttttaaagccaagcccatccttaattgaggggtgtctaccaatagtgtaggcatcccttgcaaattttagtttgtcaaattcattcttgctagtcttaagttgggcattaagactagccacttcatcatttaatttggaaatggaaattaagtgttcactacaatcatcaacattaaaatccttacacctattgtaaatcacaacatgttctatacaagagcttgatttataagttatttctaacttagtatttaaatcatcattaatactctttaagctagaaatagattcatggcatgtagataattcacatgaaagcatttcatttcttttaacctctaaagcaagagaattttgcgcactaacaaatttatcatgctcttcatatagaagatcctcttgcttatctaacaatatattcttctcattcaaagcatcaattaattcattgatcttatcaattttagttctatctaaacctttgaataagcttgcgtagtctacttcatcatcactagactcatcatcacttgaagaagcatatgtaacagtacttcgagtatttaccttcttctcctttgccatgaggcatttgtgatgctcgttggggaagagagacgatttgttgaaggctgtggcggcgagtccttcgtcgtcggagtcggacgaagaacaatccgagtcccattcttttccaaggtgtgcctcgcccttaaccttcttgtaaaccttcttgttctctctcttcctattctttccttgttcctggtcactatcattgtcgggacagttagcaataaagtgaccaatcttaccacacttgaagcaggagcgctttcccttcgtcttgctcttgttgggatgctccttgcgacctttgagcgccgtcttgaagcgcttgatgatgagggccatttcattctcatttagcccgaccgcctcaacttgcgccaccttgctaggtagcttctacctgttacttgttgctttgagagcaacggtttgaggctcgtggatcggtattgggccattcaacgcctcatcaacatatcttgcctccttgatcatcattcgcccacttacgaactttctgagtatttcctcgggcgtcatcttgatgtacctaggattctcacgaatagagtttacaagatgaggatcaaggacagtgaaggaccttagcataagtcggacgacgtcgtggtccgtccatctcgtgctcccatagctccttatcttgttgactagagtcttgagcctattgtgcgtttgagttggctcctgtcccctgatcatcgcgaaccttcctagttcgccttccaccaactccatcttggtgagcatggtggcgtcattcccctcatgcgagatcttgagggtgtcccaaatctgcttggcgttgtccaagccgctcaccttattgtactcttccctgcacaaggatgctaaaagaacagtagtagcttgcacatttttatggatttgttcattgataaacatggagttatccgaactatcaaatcgcattccattttctactatctcccatatacttggatgaagagagaacaagtggttacgcattttgtgactccaaaatccgtagtcctctctatcaaattgtggaggtttaccaagtggaatggaaagcaaatgagcattggaattatgcggaatacgagaataattgaaagaaaagttcgaattaatcgttttctttttctcctcgtattcgtcgtccttttgagaagaggaagattcgtcgctgtcgtagtagacaatcttcttgatgcgcctcttcttctttccatccttcttcttttgactcgagccggagtcattggctttgtcgtcccttggctcgttgaagatggactccttctcattgtcgttgaccaccatcccctttcccttaggatccatctcttcgggcgattagtccctttcttgaagagaacggctctgataccaattgagagcacctagagggggggtgaataggtgatcctataaaaacttaaaacttaaagccacaaaacttgattaagagttagcacaatgaaatcaagtggctaaaggagagctcttgtgaaacacaatagacacagtgagaacaagcacaagagacacgaggatttatcccgtggtttggccaagtataacacttgcctattccatgttgcggcgtcccaatggacgagagttgcactcaactcctctcaagtgatccaatgatcaacttgaataccacggtgttcttctttctttcactatatcccgtttgtgaggaatctccacaacttggagcctctcgcccttacaaatgatgatcacaaagaagcacggatgtaagagagggaaaagcaacacacacaagtatcaaaagcaacagctcaaacacgcacactagtcacaacttgagctctaagttcacacacggagttctcaactcaagaggagctcaaattgctatcacaaagaatcaaacgcgctagaatgaagacttggtgcttagagatgatcaaagaatgcttggtgtactcctccatgcgcctaggggtcccttttatagccccaaggcagctaggagccattgagagcaatctaggaaggcaattcttgccttctgtcgggtggcgcaccggacagtccggtgtgccaccggacaggcactgttcactgtccggtgctgattgctttcctaatttggcgcagccgaccgttgaagatttggagccgttggcgcaccggacagtccggtgcccccttctgaccgttggctcggccacgcgtcacgtgccgattgcgcggccgaccgttggctcaccggacagtccggtgcaccaccggacagtccggtgatttttagcagtacgccgccgacgagacccgagagcggccagttgaccagacccaagtctttttccttttgtcttttctgtgattctagcacttagacaaatatgttagtacacaaaatacaatgtactaagtctagaatcataccttcttgatgttttgcacttcatccaccattctgcacactttgcacttaaaccatttgtgttgggcacttaatcaccaaaatacttagaaatggcccaagggcacatttccctttcaggatgatgatggttatcattgtgattttggagttggcaaatatttaattaagtttaaatgtaataattggtcatgccttctgacatgacaagctttatatgatatctctacatgattctattatggctatgaatgtatgtgatgtgacccccttccgacatgacttctcatttctttacacatttagatttcttgcattccatggccaagcatcttgttgtcatcaagtttaccatctcttggtttagtttccatcttgcttactctagaatgtatggaactagattgtgtaggatggtgtatttcattacatagtatgtttcttaagtgagcttatcatatatttgataggttaaggatttcaatttcaatttttttgttaagcccaattcaccccctacttggcgtacgatccttacaacccaaaaactatttgtacaccaacacaattaaaagagtagcattttttaactccaaagcacccaactactcacattgaagatgcaatggtgatttcaagtctaaggattaagtaggcataccactcaagatctctttgaagacacatgttaatgtaataaccctaataacgtctcatagtaggtcaaccaacaccatgttctctaacatttgtgtatgcattgttgactatatatctccatatttactatccatgaaacataatcattaccggttcatgagttagtccatgaatcattagtttcccacataatgatataatactagggatctttagaataatattatctataaaaatagagagctccatgaccatgttaggtatgtcctaagaaatgtgtatagcaatgattcatggaaccgaacaacacattttctaaataagacacattatacaattatctctagctcaaacatgagtcaattatgcaagtatatacaccctccgattttatttagatgacgtttcagacaagattcttagtgtaatttagcttagttttccacccccaccgccaaatatataaatacggaggtagtatataataaccactacactcatgtgcattaatgttttagttgtgggagaggcttgatcaatggctcaacaacattcagatacatatgcactatgaaaatattgacatcacctctatcaatgatctcacatataaggtcgtaatgtcaaagtatgtgtttagatttttgtacaaccaagggaccttctcttgtgtaatggaaccattattatcacaataaaggtccaaaggacatcacacactaggaaacacacccttcttataaacatacttaacttttgatcaaaataacctccttttgtggcttccaaagtttcagtatactcaggctctaaagtggaattggccacacccacttgcttagaacattttcaacttatctctcccccaatgaggcataacacaaaattggattgttttagccctttactatggtcttcctcatctttagaaaactaagaacatttccttagtcattctcatgtactttagaatatcgtttgcagcctgctacttggccattcgtagggcttgattcatacttccatgtaacacttaagagtatgtgagccgaatgggcatatacaaagcatgtcatacatgacagatttgataagaaaggcatatggaatcacacttatcctttgtttctcatcagataccgatagacactgaatctcactgttattgataggctggtgtcatatgcatgtctcgagaaagagggaggtaggttggtacacttaccgtgtgtttggttgggtgcatgcgcccgtgcaaaactctagagatgcaaaaatcagacagctccgtgtgtttggttgcttggacgtgtgtctgggccaggccacgctcgtgcaaaacattggcctcagccaggcccgtgggatacggccaaaaggcgcgttccacgcgagccaggctgcgctcggccactcgcgctctcctcgcgctcgcgctcgcctcgcgctctcctcgcgctcgcgctcgcctcgcgctagggtttcgccgccgcctcctctcccctcccatctctccctctcacgtctcttctccccctcgagctcccccgcgagcaagctctcgcgtctcctctccccctcgagctctccgtcgaggtccccctccccccccgcgagcaagctttcgcgtctcgtctcccccgcggcgagctctcgcgtcttctctccctcgcgttcgagctctcgcgtctcctccctctcgctgttgtgacactccttccaggtaatctgttcttttgatttgtagtagtattggtagttcttggctgagatctgatatttatgcataaaaatagttcttgggtgagatctgttcttcgtctgatctggtatagttgttcgctgagatctggtagttgttggctgagatatggtagttgttggctaatttctctcctctgagatctggtagttgttggctgagatctgttcttcgtctgatttgagctctccctcttgcatgcacccatttcacccctctcagatctggtatagtttgctaatttgttatataaaaatagcttctggtgtaggattttgctgcaaagtaccatgttgttagtgttcctcggatgattttagggttttgctacaaagtaccatgcttgtggtgtcgcatgcacccatttcgcttccatgtctgggatcagataatttgtagactaccaaaatcatgtctgggatcatgtttactgtctaaacaaatcatgtttgggatcatgtttactgtctaaatcatgtttagatagcaaatcatgtttagacagtaaaatcattgcaactgagcacatcatgtctgggatcagatgatttgtttagacagtaaaacatatttgtagatcaatgtttagacatgtaagtaccatgtttagacagtaaatcatgtttagatagtaaaatcattgcaactgagcacatcatgtctgggatcagatgatttgtaggatcattgttttactatctaaacaatgattatgttttactgtgtaaacatgtttctggtgtttttacaatgattatgcctgggaacagaacaagttttactgtctaaacatgatttgttattgtattgatctattttgaacattcatatgtatgatctggtattgtttttactgtctaaacaatgaatatgttttactgtttaaacatggttttggtgtttttacaatgattatgttctgttggatcatattattatgttctggtatatatttgctactttaatttgtataaagaaataattttgagctggtgtgtgatccttcaatacctctgggtggcgcatctcttctatgtcgcagtcgtggttttaatttcaatgatgttgagctgagttctatggttacttttgattatattcatacttaatctctgagctatcgatcaatggtatgtgatgttttaatgcctctgggtggcgcatctcttgtatgtcgcagccgtggctcgtgtaagaatttgttatcatatatttgcaactagcacatcactatgttaaaactgttatgttctgagctatagatcaatgttctatgatgctaatatgcctctgagctatatatcaatgttctatgaatttcctttttagcaactagcacaacacatctgagccaacttagacctctaatcttattttttctattttattactctagcaatgaatactgctattgcacgtcgtcggctaattgcaaaggcagtggtccttgtagcagttatgtcagcctggttggatgcatggttgagacaccgactgcatgctaggaggtgtatcacttatggcccaatgcaccaaagagaccaagagaggcaaaacaacctgagattcatttatgaatccactgatgttgagtgtattgacttactcaggatgagaagagccccttttatgcagttgtgtgacctttttcgcactaggcaactattgag

SEQ ID NO: 890 - DNA, 12007 bp, Zea mays
  Intron number 4 from transcript GRMZM2G036902_T01 (locus G RMZM2G036902) derived from phytozome v7.0 (chr-ID 2; pos 1 65668276 to 165680282)
gcttaaggtatgctgccattttcagagggctctgttcccatcaacattttcaagtatttatggattgttgaatgtgaagtttacttaaatatttgcaaggatgtttaagttcacttcaatacaaaatcaaacacatatcaacattttcaactatttatggattgttgactgaggtttacttcaatatttgctaacatgtttagttaaatacaaaatcaaatacatctacaatggacaggaagtaaagcaatgctgatgttaagcaaactatgttgatggacaagttaaacgaggctaaatatcaaacacggactgtgctagctgtagttccttagtgtccattttgtcttgtgttaattttcagttgttctcttgcaacctatgttgtataaaaggttgactgagttaaaaccattttgttcatttatataattatatgtatcaagttcatagctacggactgcagcaattcattgattactcaaaattatacttctgatattttaatacattaaagacaagatttgattagtgtgctctgatagctggtactactagtacttatgataactagtaactggctcgcgccctgctctattctttgatccgtttacaatgttaaaaagtgttgctttagatatgtaggaacattagtatgtatagatgtatacatatagaagtggtagaattatctaaacagataattgtctttagtagtagaacgtttcagtctacaaatgtagcagcaatgcagcatgagcagtctaaatgctatactttgtgccgactgccgaagcaatataatactctgtaccaaaataaaattcgttttgcctttttatgacttatgagattcatacaatacttagtgtatatgttctatatatgtgtctacattcatcatcatctagttgaagataggcataaaaaataagggctaaaacgaatactattttggaacggagggggtattggtcttaatggccacaaattaacgatacgatgaaagaaagtttgaagtgagtttttgcaggtatgcactaactattttattccaaaaaagaatgcagtcatgtctaaataaagtgagtatttatgccttataaacccatgattaaaattttaaacaacacttagtgtatatgaactgagattgcaccataccttccttatctgatttccatttcgaggagtacaccacaccaaattcagtcagagccaagaacgtgtaaaatacaataaataaataaataaataaataagtaattagagaccatccactcatctctatgtagctttaaagggcaaactattccctgcgtaaagcagcactgtgcagaataatccaagatcgatgatagtacaaccctaaatcaaatgtacttagtgatggttgtctggcaccaagaaaataagttgtaacccactattcactaaaaaaagaaagggaaataaaacctggacgtcctagaactgcttctgcattctcacccagaacttgctctataagcacctaggaaatcagaattaaactttagagatctgaaaaaaacagaattatactttagaaataatatgtgcaacaatacacttttataaataaatggatcctttagagataatactgcaaacaatgtcgtagagctgctgttgtaccaagctctacaaaaaattgatctacatgtagttgggggcatcagaattatactttagagacaacacttcaaataacacaattttatgaaggcagcctttagagataatgattggaacaatagacaggcaagtgagaaaaatgaccatttgtatctgaaggaggaagtacttatatatgtctaaataaattgaacatctatgcttggtaagttcatggcaaaatttttagataacaacattcagagtaaatgtatacctaagtagctagaacaaatatatagctaagtacatcgatatcatcacttttaagcaaaccgtatagactaagcttgaataataatgttttttattttattcagaagataaacagcaagatgcatatggtgtatgtgtcaatccgaaatgatcatatgggtaataattagaatgtggagagcataatgcacatctgtttctttcctcccttttatctctgcacctataagagaagcaaagcacacatataattgccatgtcgtgaaaacatacttattgcttcaatgtcttagttccccaaatccagattgcactcaaacagaatgcagcagcatgccaaatgttttttttttcaaataagttagcattgttgctgtcatttcctcggacataaatgaagagtattgtcatttcctcaaaacagattgcactcagaataactgattcttcccgtgtgatgtgaaatgtcccccaaacaaaaaaactataatgaccagaaactctagtaaaacccagtgattttatttgatattatatagtatttacagcataaaccgcacaccggtttttattactaagtagaagaggacaagcataatttgcataggtgcaacattaatattaccacataccataaaaacagcttcaaattaccatgctgcataaaattcaaatggtacacctggttggtggacgagctgatttagccagtctcatgatcagggcttgggttgacacaatttatcaaggcagcctgtctgcaaatattcatctcatccactcgacggctcaatctacagcacagtacactagtacaacttgtctgcagcatgcttaccttgttggttgttgccggcttgctgcagtagtcctgggagtgggcgctggttgcgctgccctcgaagggggcaccgccggctggaaaggggtgaccaccaggcgccgggcgctagtcgagccgccggggctggggcgagtgcgccgggcgcctgcgcgactgtgtggctgcgccggaagtagacggggcaggggcaccgccgtgccgctgcgccagccgccttgggtccgcccctgctcattggcgttgtttgcacttcaaacttactaggcattatttgatcagagaattttctgttcctaccatgttcctcctatggagaaatacttcagttattgtataaaagaaaaactacattgaaatttccaaaatcacaatgcagttttttatgttcagaaactgtagtgtacaacattggtagtgaagacccatgtggctcgcaatatgttgcgagtgcttctagagggatgagagaaatacaaaataaaatctgaaaattgtaaagatatctggtcattccttggaggctttgacatcctagaatctattcataggaaggcaccaaggactatcattttggcctagactctaatcagtcagtgtcgctctaataaatcgggtgcccgcgaaaataaggcggcgcagatctgtccaagcagccttaacagccaatggatgggtgcatgatatctctggaagccttacgacgcaggtgctgtttgagtttttgttggtctgggatttactccaagaggtgcagctgtatcctaatgttgaggatcagcatcggtggttgccatcctcctcggggctgtattccgccagctctgcttatttgcgcttccatggtggtgcaacaacctttgagcctgctaaaagaatctggaagacttgggccccccgtgctgcgagtatttcatttggcttgcatctctcaaccgatgttggacggctgatcgactggcacgtcatggaatggatcatcaagatagttgtcccttgtgtgatcagcaggatgagacagtgcatcacatgctggtggcttgtgtttttacgagggaagtttggtttagaacactaagcaggctgggtttgcaacatcttgcgcctacgtctgatgctacagggtttcaagattggtggagtgaggcagaaagactggtgtctaagcataagaaaaaaggtttcaactctattgtaattttagtagcttggcagatttggaagcatagaaatgcgtgtgtgtttgacaatgcttccccaaacattcacgcaattttgctgtccatccatgatgaggccttgttatggggtcttggcggggctgctgctcttaggcaggtttagctgtagtttgatttttggttttttatttccgtgggtgctttcttggcacctttgtactgggtcttttctagaccttttttcttatcttcttaatatattgatacgtggttctcccacgtgttcgagaaaaaaaaatcagtaagtgtgtttatatgataacatgacaatggttaaggcagcagcaaccgtaaatagtagaatagaaccgactacaaatggtgaaaagaaaatttgtgaaaggaaatgcataagactgtcacttgtggcttgccactttcggccatttcctctgacacaaattaagagtgatgtgctataacatgaacaacaaaataatcagatatgactctgagttttataaggacctagaatactgttgtgctgtgatcatttgtcatgtacggtcaaccgtatttccgtagggggaggcgcgcgcgggacattcgccgcgctgaggaacgcgccgaccgcgcagcaggagatcgcgcagatcagggggatcacgcagaacaggaaagggcgccagtgattggcggctaggaaggaaagggctagaaaggaaaggcctaggagtgattggcggctaggaaggaaagggctaggaaggaaaggtctaggaaggaaactaagttttgggcaggttctataatcaaggagagcttccccatttggcgctggccgctggccttataaattgattgtaaccagacctttgaaggaaagcaataatcagttatatctcacctttctacctctgttaagcctgcggttgggaggcataatccccaccagagaagacgaccgacggctacgagctgcgtagccgcggtccggcgagtcaagggtacacagtccttgacaacttggtatcccgagtcaggcgctcctcgcccgaccactcctagcccaccgtgccctccaccaccaatgctcacccgccagtagccgctccaccatcgcccacttcgccacccacagccaccaccatgtccgagcccaccctcgccgatgtgatccagatgatgaaggacatgcaggccgacatagccgggctgaaggagaagtccgacacatcgtcgtccagcggcggccgcaccgacgctcaccgcgaccttgatcgtccaccgaagttccagaaattggacttcccacggtacgatggcaagtcagatcctctcctcttcgtcaaccggtgcgaatcatactttcgccagcaacgtaccatgggggaagaaagggtttggatggcctcgtataatctcgagggcatcgcacaacattggttcatccaactccaggacgacgaagggatgcctccatggggtcgcttcaaggagttgctccaactacggttcggccctgctcttcggtcggcgccgttgttcgaactcgccgagtgccgccgcaccggatccgttgaggactactccaaccggttccaggagctgctctcacgagcgggaaggctggacaagtcccagcgtgtccaactcttcaccggggggctcctgccgccgctcagccacgcggtgcggatccacaacccggagacactggcggccgccatgagtttggcgcggcaggttgagataatggaactcgatcgacagcctccaactccggcccgaccagcatcgcgaggcctactaccggcatcaaagcatgcgcttccggcgccccagcagcagcttgccctcctcgcgccgccgatgggcgcacctcagggccgcgacgaaggcaacaacagacggttgtcgatggaggaaatggtggatcggcgccgccagggcctctgctttaactgtaatgagaagtatacccgtggccacaaccgtttctgcaggcggattttcttcatcgacggcgtggaggtcgatgacgcaatagacacgacagagacagccgggatagatgcgccctgtttctccttgcaggcggtggccggggtcgcaacagccgacacgatgcagatcaccgtcacccttggcccagtgtctctggtcgcactgctagactcaggcagtacccacaacttcatctccgcaacagcggcgcatcgctccggcctccccatccaacggcgaccacgcctcacggcaatggtggccaatggcgagcggatcacctgcgccggcgtcctccgcaacgcgccgctccatgtcgacggggaagccttcccgaccgatctcttcgtgatgcccttggccgggtacgatgtcgtccttggcacccgctggctcgatgcattgggaccaattgtgtgggacctcgccgttcgccgcatggcgttccaacaaaggggtcgctccaccacctgggcaggcgctccaggcaacaaagggccggcagtgcgcaccacgaccgcgggcgacacactactggaggctctcctggacgcgtttgaggggtcttcgcggctcctacgggcttgccccccaagcgggcccacgatcatcgcattctccttaaaccggacacgcaaccggtggccgttcgcccctaccggtacccgacgacccacaaggatgagctggagcggcagtgcgcggccatgattgatcaggggattgtgcgtcgcagcgactccccattctcgtcgcctgtcctcttggtcaagaagcccgatgggtcatggcgcttctgcatcgactaccgagccttgaacgccctcaccgtcaaggacgcgtttccgaatccggtggtggaggaactcctcgacgagctccacagcgccaagttcttcaccaagcttgatctcaggtcgggatatcaccaggtgcgcatgcggccgaaagatgtacacaagaccgcgttccgcacccacgacggcttgtacgagttcctggtgatggcgttcgggctctgcaacgccccgccacgtgccaagctctgatgaacgacgtgctccggccgttcctacgccgtttcgtgctggtattttttgatgatattctaatttacagcaagacatgggaagatcatcttcgccacctccgggcggtcctcaacgagctgcgccgccaccagctcttcgtcaagcgctctaagtgctcttttggcgcatcctccgtcacctacctcggccacatcatctcagcggcaggcgtggccatggacctggccaaggtagcggccatttacgactggccaccgcctcgctccgtccaggccgtgcggggcttcctaggcctcgcaggatactaccgccgattcgtgaacaactacgacacgatggctgccccccctcacgaccctcctcaagaaggacgacttcgtctgggatgacgcgacgaaggtcgccttcacggcgctcaaggcggccgtcacgtctaccctccgtcctcgccatgtcggacttcgccaagctattcgttgtcgagtgcgacgcgtcatcgtccgggtttggcgcggtacttgtccaggaaggacacccagtgccttcttcagccgaccggtcgcgcccagacatcgggcgctcgcagcctacgagcgcgagctcatcggcttggtccaggcggtcaggaactgacagccctatctgtgggggcgccgcttcatcgtcaagactgaccacttcagcctcaagtacctcttcgaccagcggctcgccacgatacctcaacatcactgggttggcaagctcttgggcttcgactttgaggttgagtaccgctccggcgccacgaacgctgtcgtcgatgccctgtccagacgggacaccgaggagggcgagctgctggctgtaacagcacccgcttcgacttcatagagcgtctacggcaggcccaagccaccgacccggccctcgtcaccatctacgatgagatccgcgcaggcacgctcaaggcgccctagtccattgtaggtggcatggtcgccatggagggtcgcctctacataccagccgattcaccccttctgcaggagatcgtggccgcggtacacaatgatggtcacgagggcgtccatcgcaccctgcatcgaattcggcgcgacttccatttttcggccatgcgtcgtattgtgcaggagttcgtccaggtctgtagcacgtgccagagatacaaagtcggaccacctacgtccagccggcctcctccagcctctcccgattccctccggcgtgtggtcagacatcgacatcgacttcatcgaggcgttgcctcgggtgcacggcaaaacggtcatcctcaccgtcgtcgaccgcttcagcaaatacgaccacttcatcccgctagcgcacccctacacggcggaatcggtggcgcaagctttcttcgctgaggtggttcgccttcatggcgtgccacagtccatcgtctcggaccgcgacccggtcttcacttcgtcattctggaaagagctgatgacactcaccggctcgaagctgtacatgtcctccgccttccacccacagacagacggccagtcagaggccgccaaccgcgtcatcaccatgtaccttcgatgcttcaccagcgaccggccccgacagtggcttccctgggcggagtacatttacaacaccgcctaccaaccttcactccacgcgacgccgttcagggtggtgtacggacgtgaccctccttccattcgctcctacgaacccggcgagacgcgggtggcagcagtggcgcaagagatggaggaacgcgccgccttcctcgacgacgtccgctatcggctacagcaggcccaggagtcctagaaacgtgcctacgaccagcaccatcgaaaggtggtctacgaagtgggcgactgggcgttcctccgtctccgtcaacggtcggcagcgtcgctgccacgaacgcctactgggaagctaaagcctcgctatgtcggcccctaccgtgtccaggaagtcatcaacgaggcagcggtgcaactacagcttccggcgggcgccaagctccatgacgtcttccacgtgggtgtcctcaagaaattcgtgggcacaccgcctgcagagccaccagtgctgccagcgactctcaatggcgcggtagtgtccgcccctggtcgcatccttgctggtcggttggcccgcggcgtccgtcaggtgctggtccagtggcaagatgagcaggctgcgtccgcgacgtgggaggacctcgacgacttccgcgcccgctttcccgactttcagctcgaggacgagctggccttcgaggccgggagagatgtcatgtacggtcaaccgtatatccgtagggggaggcgcgcgcgggacattcgccgcgctgaggaacgtgccgaccgcgcagcaggagatcgcgcagaacaggaaatggcgccagtgattggcggctaggaaggaaagggctagaaaggaaaggcataggagtgattggcggctaggaaggaaaggcctaggaaggaaactaagtattgggcaggttctataatcaaggagagcttccccatttgcgctggccgctggccttataaattgattgtaaccggacctttgaaggaaagcaataatcagttatctctcaccttcctacctctgttaaacctgcggttgggaggcataatccccaccggagaagacggccgacggctacgagctgcgtagccgcggtccggcgagtcaagggtacacagtccttgacatcatttctgcacaaaaaccagtcgcttgctgttttgttgggggctgaagcttgaacggacaagagatctaaagtacttaccatcttcatttaatttcttcaacagttgtgactttgagggaagggcgtacatccagcagcaactgctttccttattgcccattcagggtgaggagcaacgacctgagcataagccactgttgccacatcaattagtgagttgcccctggaaaacaatgttaaagacctgagcataagccactgttgtcgcatcccatagtgagttgcccctgaaaaacaatgttgattgatcaaattgattgagaaggcattgtaaggaaatatggagcttaacagttcacaaggcaaaattataagcaactatgagttgaaagaagtattcagtgtgcagctcgtccttactctgtgtcaagaatttgctcaaacatgacgtcaaccatttcaatcttgcgcttcactctaagcagattccttgtatggctccctagtttattgacgattagtaagaactaagaactgtacattttgatatccaaaatcaccagtgttagtccaacatgaaatactgatggatgactgttgttgttcttgacgttgtgcctaggtggaaaagtaagcagatagagtggcaaacaatgcatatggaactgccatgtcaacttaaatgcagattttagtgttcagaatttgtagactttaccatgtccaacagtacacgaaataagaggactattgtgctgcataactcatggtctctgaactatggcttgacagggcaattatgaaacaatttcatcagatgaagcacgattgcccagacacagtgctatccagagatcagaagccctaacttatcctcacctagctcatggaaccattaaaatatttggcggatgtcaggttcggagcgataagagaccaggaaggaggacagtacgtacctgaacctctttgttgggcgctagcggctcccaatggctgtcgcagtcgctttcgttgatggccacgatgtagaactgcgaacgagcgagaaaagggtagatccttctctcccaactcgtcgattcccctcccctcacctcgacttcgtaaaacagaacaacgataacacccgggtgtggcgtccgagaggccacgacaagagcaggcgacccgtcgcgtcaaggctggtgcagcggtaggtgccacgagatccagacgtgcgatagcagcgtcgccacggggatggtctcctttggtgttgggtatggcggccagctggttgggtcgttcgtggtctgttggagctcgccctagagatgtggtgttgtttccttgttgcgccggcgacataggagatggggcggcggcggtctgtggggagggggaaccgggaaggagctcgagctcctggaagcttcacggaatggagagggtggggggtttgcgtcggtggcataggagatggtgggggagggaggtggaacgacacgatggggtccgaggagagggaggaatggtgggcgcctgatgcgtcagtggcataggagatggtgggggtgggggaagcttcacgacgatgtttagccgggggtggaacggcaccgcgaggtccgcggagagggaggaaaggtgggacgcaggcgccggcgttgcaggtcgccaccacgaccgctagccgcggctcgggacgtaagccagaggatggagcacctggaaggttcacgtcgcgttgcgtcacaaattgcggattggagaggctgtgcagggccgtgaaggcacggtcggatgactggaaaaccgaaagacaccattttcatatggcgatcttcggaggcttccagcaaaatgtcgacgccgtagacaaacgcttcatgtgcagcgttgatgtgggatcgaacgataggtatgtttcgagaatacgtggcctaaccacgttacagccttgctcccgcgcttaatatagtaataaatggaagctccttagatttagattgtcattttgcattgaaattattaggcagatttagtctacttgcctaattttttactgggtttgtgctactaagtttgctacgcgcatcactatgctttattgaatgctgctttgcaatgaaacttgtttgtggtgactattaggttatcagatcttttttatattgtttgtaaagggtaaagagttattggctgagctcgtactggcccaacataactttatgggttaatatagcttttcttttttctttttatttgttaagtaaggctgatgatgttgtataactactgacaggtcggc

SEQ ID NO: 891 - DNA, 9756 bp, Zea mays
  Intron number 3 from transcript AF466202.2_FGT010 (locus A F466202.2_FG010) derived from phytozome v7.0 (chr-ID 10; p os 138614068 to 138623823)
aagaagagcagttcagctaccagctttcaggtcttgaggatctctgaaagtcgcctagagggggggtgaatagggcaaaactgaagttctcaaaaataatcacaactacaagccgagttagcgttagaaatataatagagtccgcgagagagggtgcaaaacaaatcgcaagcgaataatgaagtgagacacgcggatttgttttaccgaggttcggttctctcaaacctactccccgttgaggaggccacaaaggccgggtctctttcaacccttaccctctctcaaacggtccctcggaccgagtgagctttctcttctcaatcacttggaacacaaagtcccacaaggaccaccacaagattggtgtctcttgcctcaattacaagtgagtttgatcgcaagaaagaatcaagaaagaagaaagcaatccaagcgcaagagctcgaaagaacacaagcaaatctctctctctaatcactagggcgttgtgtggaagtggagaggatttgatctctttggtgtgtctagaattgaatgctagagctcttgtaagtagttgggatgttgaaaacttggatacaatgaatggtgggtggttgggggtatttatagccccaaccaccaaactagccgtttggtgaggctatctgttcgatggcgcaccggacagtccggtgcacaccgaacatgtccggtgcgatagccacgtcaccaaagccgttgggattcgaccattggagctctgtctctgggcccgccttgatgtccggtggcgcaccggacatgaactgtagattgtccggtgcgcctgctcccgcgtgcctgacgactgcgcgcttctagcgcgcattaaatgtgtcgcaggtagccattggcgccgaaatagccgttgccccgctgttacaccggacagtccggtgtacaccggacagtccggtgaattatagcggagggccgaagtgaattcccgaggctggcgagttccggaggccgctcttccttggagcaccggacatgtccggtgtacaccggacagtccggtgaattatagcggagttgcctctggaatttcccgaaggtgagcagttcggagttggagtcctctggtgcaccggacatgtccggtggcacaccggacagtccggtgcgccagaccagaggtgccttcggttgacccttgctcctttatttgaacccaatacttggtctttttattggctaagtgtgaaccttttgcacctgtataacttatacactagagcaaactagttagtccaatatttgtgttgggcaattcaaccaccaaaattatttaggaactaggtgtaagcctaattccctttcaatctcctcctttttggtgattgatgccaacacaaaccaaagcaaatgtaaaaagtgcataatttgaactagtttgcataatgtaagtgcaaaggttgcttggaattgagccaatataaatacttacatgatgtgcatggattgtttctttgtttttaacatattggaccacatttgcaccacatgttttgtttttgcaaatctttttgtaaattcttcttaaaatctttttgcaagatagtcaaaggtaaatgaataagatttttgcaaagcattttcaagatttgaaattttctccccttgttccaaatgctttttctttgactaaacaaaactccccctcaaataaattctcctcttagtgttcaagagggttttaagatatcaagttttgaaaatactacttgctccccctttagaacacaaagagatactaatttgaaattttccaattgaaaaacattaaattttaaaattagggcggtggtgcggtccttttgctttgggctcatactttctccccctttggcatgaatcgccaaaagcggataccttgagtgagatataagcccttagaagtactttctccccctttggtcataaataaaacatatgagtaaagattataccaaagatggagagatgctcggagtgacggcgaaggatgagtagtagagtggagtggaagcctttgtcttcgccgaagactccaattccctttcaatatacctatgacttggtttcaaatacacttgaaaacacattagtcatagcatatataaaagagatatgatcaaaggtatacttgtgtgctatgtgtgcaaatcagcaaaagaaattcctagaatcaagaatattgagctcatgcctaagtctggtaaaagattgttcatcaagtggcttggtaaaaatatcggctaattgatctttagtgttaatgtatgaaatctcgatatcccccttttgttggtgatcccgaagaaaatgataccgaatggctatgtgtttagtgcggctatgctcaacgggattatccgccatgcggattgcactctcattatcacatagaagatgaactttggttagtttgtaaccgtagtcccgcagggtttgcctcatccaaagcaattgcgcgcaacaatggcctgcggcaatatactcggcttcggcggtagaaagagcgaccgaattttgcttctttgaagcccaagacaccaaggatcttcccaagaactggcaagtccccgatgtgctctttctattaatcttacaccccgcccaatcggcatccgaataaccaatcaaataaaatgtggatccccgagggtaccaaagcccaaacttaggtgtataagccaaatatctcaagattcgttttacggccgtaaggtgtgattccttagggtcggcttgaaatcttgcacacatgcaaacggaaagcatagtgtccggtcgagatgcacataaataaagcaatgaaccaatcatcgaccggtataccttttgatccacggacttacctcccgtgttgaggtcgagatgcccatttgttcccatgggagtcttgatgggcttgacatccttcattccaaacttgcttagaatgtcttgagtatacttcgtttggctaatgaaagtgccctcttggagttgtttgacttggaatcctagaaaatatttcaactcccccatcatagacatctcgaatttttgtgtcatgatcctactaaattctttacatgtagattcgttagtagacccaaatatgatatcatcaacataaatttggcatacaaacaaatcattgtcaagagttttagtgaataaagtaggatcggccttaccgactttgaagccatttgcaataaggaaatctctaaggcattcataccacgctcttggggcttgcttgagcccataaagcgccttagagagcctataaacatggttagggtactcactatcttcaaagctgggaggttgctcaacatagacctcctccttgatcggtccgttgaggaaggcactcttcacgtccatttggtaaagcttgaagccatggtaagtagcataggccaataatatacgaattgactcaagcctagctacgggtgcataggtttcaccaaaatccaaaccttcgacttgtgaataccccttggccacgagtcgagctttgttccttgtcaccacaccatgctcgtcttgcttgttgcggaagacccacttggttcctacaacattttgattaggacgtggaactaaatgccatacctcgttcctcgtgaaattgttgagctcctcttgcatcgccatcacccaatccgaatcttgtagtgcttcctctaccctgtgtggctcaatagaggaaacaaaagagtaatgctcacaaaaatgtgcaacacgagatcgagtggttacccccttatgaatgtcgcctaggatggtgtcgacggggtgatctcgttgtattgcttggtggactcttgggtgtggcggccttggttgttcatcctccttgtcttgatcatttgcatctcccccttgatcgttgtcgtcatcttgagggggctcatctctttggtcttctccttcatcaacttgagcctcgtcctcattttgggttggtggagatgcttgcgtggaggaggatggttgatcttgtgcatgtggaggctcttcgggttccttaggacacacatccccaatggacatgttccttagcgcgatgcacggagcctgttcttcacctatctcatcaagatcaacttgctctacttgagagccgttagcctcatcaaacacaacgtcacaagatacttcaactagtcctgaggacttgttaaagactctatatgcccttgtgtttgagtcatatcctagtaaaaagccttctacagttttaggagcaaatttagattttctacctctcttgacaagaataaagcatttgctaccaaaaactctaaaatatgaaatgtttggctttttaccggttaggagttcataggatgtcttcttgaggattcggtgtagatataaccggttgatggcgtagcaggcggtgttgaccgcctcggcccaaaaccgatccggtgtcttgtactcatcaagcatggttcttgccatgtccaatagagttcgattcttcctctccactacaccattttgttgaggggtgtagggagaagagaactcatgcttgatgccctcctcctcaaggaagccttcaatttgagagttcttgaactccgtcccattgtcgcttctaattttcttgatccttaagcagaactcattttgagctcgtctcaagaatccctttaaggtttcttgggtatgagatttttcctgcaaaaagaacacccaagtgaagcgagaataatcatccacaataactagacagtacttactcccgccgatgcttatgtaagcaatcggaccgaataaatccatgtgtaggagctccagtggcctgtcacttgtcatgatgttcttgtgtggatgatgagtgccaacttgcttccctgcttggcatacgctacaaatcctgtctttctcaaaatgaacattggttagtcccaaaatgtgttctccctttagaagcttatgaagattcttcattccaacatgggctagtcggcggtgccagagccaacccaagttagtcttagcaaccaagcaagtgtcgagttcagctctatcaaagtctaccaagtatagctgaccctctagcactcccttaaatgctattgaatcatcacttcttctaaagacagtaacacctatatcagtaaatagacagttgtagcccatttgacataattgggatacggaaagcaaattgtaatctaaagaatctacaagaaaaacattggaaatagtatggtcaggtgatatagcaattttacccaatcctttgaccaaaccttgatttccatccccgaatgtgatggctcgttgtggatcttggtttttctcatatgaggagaacatcttcttctcccctgtcatgtggtttgtgcatccgctgtcgagtatccaacttgagcccccggatgcataaacctacaaaacaattttagttcttgactttaggtacccaaacggttttgggtcctttggcattagaaacaagaactttgggtacccaaacacaagtcttggagcccttgtgtttgcccccaacaaacttggcaactaccttgccggatttgttagtaagcacataagatgcatcaaaagtcttaaatgaaatgtcatgctcatttgatgcattaggagttttccttttaggcaacttagcacgggttggttgcctagaactagatgtctcacccttatacataaaagcatgattagggccagagtgagacttcctagaatgaatttttctaattttgctctcaggataaccggcagggtataaaatgtaaccctcgttatcttgaggcatgggagccttgcccttaacaaagttagataaattctttggaggggcattaagtttgacattgtctcccctttggaagccaatgccatccttgatgctagggcgtctcccattgtagagcatacttctagcaaatttaaacttttcattttctaagttatgctcggcaattttagcatctaatattgctatatgatcattttgttgtttaattaaagccatgtgatcatgaatagcattgatattacatctctacatctagtacaaatagaagtgtgctcaacggtagatgtagagggtttgcaagattttaattctacaaccttagcatgcaacatatcattcttagttctaaggtcggaaattgtaacattgcaaacatctaattctttagccttagcaattgatttctcattctcatttctaaggctagcaatagagacattcaactcatcaatcctagcaagtaaatcaatattattatttctaggattggaagttgaatcaatacaaacatgagaatcaaccttagcaattagtttagcattttcatttctaaggttgttaatggtctcatggcaagtgcttagctcactagacaatttttcacatttttcaacttctagagcataagcatttttaaccttaacatgccttttattttccttgattaggaagtcctcttgggagtccaagagatcatccttctcatggatggaactaatcaattcatttaatttttctttttgttgcatgtttaggtcggcaaaaagggtaagattattttcctcatcactatcattatcatcactagaggattcatatttagtggaggatttagatttaaccttcttccttttgccgtcctttgccatgaggcacttgtggccgacgttggggaagaggagtcccttggtgacggcgatgttggcggcgtcctcgtcggaagaggactcgctggagctctcgtcggagtcccactcccggcaaacatgggcatcgccgcccttcttcttgtagtacttcttcttttctctcctctttcccttcttgtcgtcgcccctgtcactgtcactagacataggacattttgcaatgaaatgaccgggcttaccacatttgtagcacactttcttggagcggggtttgtagtccttccccctccgttgcttgaggatttggcgaaagcttttgatgattaaagccatctcctcattgtcgagcttggaggcgtcaattggttgtctacttggtgtagactcctccttcttctcctccgtcgccttaaaagccaccggttgtgcttcggacgtggagggttcgtcaagctcgttgatcttctttgatcctttaatcatgcattcaaagctcacaaaattcccgattacttcctcgggagtcattagtgtgtatctaggattaccacgaattaattgaacttgagtggggttaaggaaaataagtgatctcaaaataaccttaaccacctcgtggtcatcccacttcttgctcccgaggttgcgcacttggttcaccaaggttttgagccggttgtacatatcttgtggctcctccccttggcaaatacggaagcgaccgagctccccctcgatcgtttcccgcttggtgatcttggtgagttcatcaccctcgtgcgcggtcttgagaaggtcccaaatctcctttgcattcttcaacccttgcaccttgttgtattcctccttgcttagagaggcgaggagtatggttgtagcttgagagttgaagtgctcgatttgggccacttcgtccgtatcatagtcttcatcccctacggatggtacctgtgctccaaactcaacaacattccatatacttttgtggagtgaggttagatgaaatttcattaaatcactccacctagcataatcttcgccatcaaaagttggcggtttgcctaatggaacggaaagtaatggagtatgtctaggtgtacgaggatagtgtaaggggatcttactaaacttcttgcgctcttggcgcttagaagttacggacgacgcatcggagtcggaggttgatgttgatgaagtgtcggtctcgtagtagaccaccttcctcatcctcttgtgcttgtcgcctttccgatgcgacttgtgggaagaagatttttccttcttctctttgtggtgtgaggaagaagatcttttctccttccgtttggaggagtccttcttcttctccttcctcttggtgcgggattcttccgatgaagtgctcccttggctcgtagtgggcttgtcgccggtctccatctccctcttggtgtgatcttccgacatcactttgagcggttaggctctaatgaagcaccgggctccgataccaattgaaagtcgcctagaggggggtgaataggacgaaactgaaattctcaaaaataatcacaactacaagtcgggttagcgttagaaatataatagagtccgcgagagagggtgcaaaacaaatcgcaagcgaataatgaagtgagacacgcggatttgttttaccgaggttcggttctctcaaacctactccccgttgaggaggccacaaaggccgggtctctttcaacccttaccctctctcaaacggtccctcggaccgagtgagctttctcttctcaatcacttggaacacaaagttcccacaaggaccaccacaagattggtgtctcttgcctcaattacaagtgagtttgatcgcaagaaagaatcaagaaagaagaaagcaatccaagcgcaagagctcgaaagaacacaagcaaatctctctctctaatcactagggcgttgtgtggaatttggagaggatttgatctctttggtgtgtctagaattgaatgctagagctcttgtaagtagttgggatgttgaaaacttggatacaatgaatggtgggtggttgggggtatttatagccccaaccaccaaactagccgtttggtgaggctgtctgttcgatggcgcaccggacagtccggtgcacaccggacatgtccggtgcgacagccacgtcaccaaagccgttgggattcgaccgttggagctctgtctctgggcccgccttgatgtccggtggcgcaccggacatgaactgtagattgtccggtgcgcctgctcccgcatgcctgacgactgcgcgcttctggcgcgcattaaatgcgtcgcaggtagccgttggcgccgaaatagccgttgccccgctgttacaccggacagtccagtgtacaccggacagtccggtgaattatagcggagggccgaagtgaattcctaaggctgacgagttccggaggccgctcttccttggagcaccggacatgtccggtgtacaccaaacagtccggtgaattatagcggagttgcctctggaatttcccgaaggtgagcagttcggagttggagtcctgtggtgcaccggacatgtccagtggcacaccggacagtccggtgcgccagaccagaggtgccttcggttgacccttgctcctttatttgaacccaatacttggtctttttattggctaagtgtgaacctttttgcacctgtataacttatacactagagcaaactagttagtccaatatttgtgttgggcaattcaaccaccaaaattatttaggaactaggtgtaagcctaattccctttcaatctcccttctgacaattcggtgggctattttaacgacatcattatccctcagggagtttagctccagcaggaggaagccccggcgccggttgaagcggttcttgccttgcctgctttcccttctgacaacataaatttggagggaaacaatgtcgagggacaggacaacatgcaaattgaagataacatcaatgtgggcctcatgttgcacttggatcgaaccatccttgatcctgcttttgaagatttcttggccagaaagcgttcctcctcttgggct

SEQ ID NO: 892 - DNA, 28516 bp, Zea mays
  Intron number 2 from transcript GRMZM2G354579_T02 (locus G RMZM2G354579) derived from phytozome v7.0 (chr-ID 3; pos 2 29389731 to 229418246)
gctacacacaagtgagtaccctttgtggcatttagtacttttacaacttaagttgcttcttcttgtactatattgattcattggcttgtaaaaatttacaattttacatgaaaatcaagcatgtgtttctattagggatgattgtcgataggtaactttgataatactatatatttatctaagtttcaccaaattctctctatgtgcattaaaatatcaatgtcgatctcatttttgacaaaatcattatgtcctagatgatttcattaaatttagtgattagatattatactctagccaaatagaatgcaagtatgcacatgtaggtctagttatgcatatttgaagttacgcacctaccattgaaaagagtgaagtggaatatgaaagtgtggaagaatataaaaccaaacatttatagcacaattagttgtttcgtcatatttttctagtgaaacaaatgttattgattatgttgttgatttgtaccataactcgttgacatgcatcaacgatgatatttgtgttgcatgtgtatttgtgaaaggaaacattgttctttgaagtgcattgcttagatagtggaatagcatattaaacttgaatgtgttttggttgtagttagaatgtcatcgtaaaaaaactataatatcatatttttactatgtatgataaccaaataaattatattatatagatatataaataaccttatgaacaaggtaaattattgttctattattatatcaaacaatatattccatatctaaattgtttgttcatagacaaacatacacatttagtgaacgattaaaagctaagcttaagctcattgttattgttgtgccatatgactaagaagaaatgatgggatgactaaaattcgcctagagggggtggataggcgaaacctaaaattttaactcaaaacacaaaacttgatctaaaatatttaattctaagtgattacaacaagagagtttagtctggaataagtataagcacaatacttgcaatatgttgctaatagatggaagtgcagaatagaacttagaaacaatatgatatcaaatttatggcaagtataaactgggggagaaaaggtggcaaataaatcaaaaaggcaaaagcacaaagatatagcaatttgtttaccgaagtttggtttccaacgaaacctacgtctctgttgaggagtctcgatgacccgaatctctgttgactctttcctcactaaagtgatcaccaagatcaaacttgagttccctttcactttgcttaattgtgaggctgggtctctataaggttctccacaacttggaggctcttgctcgcattacaatctcaatgggagcttagcttatatcacctgtatctcagctctttgatatcatactaaccgattggggtcatatttatagttcccaagtgccctcctaattgttggaagtcaactacaaaatttgttctaatacttggtgcaccagacatctcactatagactagtctggtgcacccttgttgtcaaagtccatttacatattctctatgtgctgagactggtaggtggttcgatggcaaaacgaacctggttcgatgtcccaagctatcaaagtccatttatatcttatttgtgtgccaagtctggtgggtggtccagtggcacatcagacctggtttggtgtgccaggcttcttgagccaaaaacatgttctctgagtgtcgagtttggtgcacactagaccagtctggtgcacactggatcggtctggtgcacttagagtagccagacttgatccattttggaaacatctttcttggctttaattggctagtgtcttgggcacttctatgacttagacaaatgcttctaaagtcaatacaactactctaagtataggtcttgaccttttctgatcccctaagccttctgctccgtttctctcaaactttaattcaaatggtccctggaactccaaatcctaaatatggtctctccaagtgttccagtaggattcaaaatgtttctagagcattttagaacttatccaaatgttgaaatgacccaaagttcatttcctacttgacatgtcctttttctctaagtttgagttgtttctctacatttgaacttctaaatctaatattaaatttttgcattcaaaaacttatcaaactagttagtccatcaggttttgatggttatcaaacaccaaaaccaatataaatatggctcaaacccatttctctttcaatcttccttttttggtgattcatgccaacacaaccaaagaatatgaaaacctacaactttataacttatttgctaagttagcatactcataagcatgatccagaatatgctaattgaaagttccatcattttaaacattttggactatattgcaaccactttgaatttttcttttgttttacaaagaaagttttctcccgatttggaaaacttttctcagaaccattgttctcattttgaaataaaatacctcccccattgttagaagagtctgttgcctataatctcaaaaaggatatttctccccctttgtaaaagcaatgtcaattgaataagttttctcaaaaattgcattacgccaacttttctgtcttgaaatgagatttcccaaagtgaacttcccttactcttgaagaggggttttagcggtttgtgatacttttgctttggccagattatttctccccctttggtatcaaacaccaaaaaggaaacacaatatgtggtccttttatatgaatgtggaagggcttatctttctcaaaggattctatttctctttcaatctgagactacacacatgatagacttgaaaatgatgttagtctcaaagttttaaaccgtagaatatcctcccctaaatatgtgtatacaagtggtgaatacttgtaaaatatgtgcacttagacttttgatgtcctgagatttaataaaaaatttgaaacttggcagaagtaaaatataacaatgtgaaattgtaccaattgaaatccatattcatgatcaaaggcgtattaatagacataatatgaaacattttaatccacgttcgagaaccaataatatttagctcatttctaagctcatagaattgtctatcatctagtggttttatgaagatatcgagtaaatgtttgtttgagctcacatggtctatgacaatatctcccttctatgaatgatctctcaaaaagtgataccaggtgtttatgtgtttttgtggccgtgatctatagggttatcggccattctaattgcgctctcattgtcccataggagagggactttgctcagattgtagccaaagtcctttatgggttgtctatccaaagtaattatgcacaacaatgtcctacagcatatacttggcctcagtagtggatagagccataaaatttgcttctttgaggacaatggaaccatggatctttcaaaaaattagcaagtccctaatgtgctcttcctatctaccttacatccagcataatccgcttcaaattattcaatgagatcaaaattttaacctttaggataccaatgccctagttaggtgtatgaacttaatatctcatgattatgcagttctaagatgacatttcttagggtcggcttgaactcttgcacaaatgcatacattacgcataatatccggtctagatacacataagtaaagcaatgaacctatcatagattggtaaaccgtttgatcaacagatgtacctcccgtgttgaggtcaagatgtccatttgtgcccatggatgtcttgatgagttttgcatccttcatgacaattttattgagtatgtcccgaatgtattttgtttggctgatgaaggtgccttccttgagttgctttatctgaaatcgtaagaaaaacaccaactcccccatcatggacatttcaaacttcttgaccatgatcttgctaaactcctcacaagaggagtagttagtagagccaaaaataatatcatcaacataaatctggcatatgaataagtcattatccattctctttgtaagatcaacataaatctctaaggcaatcacaccatgctctaagtgcttgcttaagtcgatcttgttatcatggtctggatacttattatcttcgaagtcgggaggttgcttaaaatagatctcttccttgattagcccattaaggaatgtgcttttgacatctatttggtaaagcttgaaatcatggtagtggcatatgttaatattatgtgaattgactcaagcctagctataggtgcaaaggtttcatcaaaatccatacttttgacttgtgaataacctttggtcaaaagttatgtcttgttccttgtcaccacaccatgttcatcttttttattgtagaagacccaaatggttcctgcaacattctgagttggatgcttgaccaaattctaaacttcattcctcttgaaattgttgagctcttcttgcatggccaccaccaaatctagatcctttaatgcatcttcaaacttgaaaggctcaagagaagacacaaaagagtaattttcatagaaattagcaattctagagtgagtcgttagcgtcttttggatgtcaccaagtttcatgtttacggggtgatctctctgaatgctttggtggactcttagttgtggcacttgaggtcttgtaacttcattatccttcagatcctccttttcttgattttcttcatccccctttggtttgtgttgtcttgagttggggcgatgctcttatagaggacggtcaatcttgttcttgagttgactcatgtagacatgcatctccaatggacatgttcttcaatgtggtgcatggatccccttcatcatctagttcaccaagatcaacttgctctacttgagatccattagtctcgtcaaacacaatatcacatgatacttcaacacaaccagtggatttgttgaggactcgacatgcttttatgattgaaacataaccaagtaaaaaacccttctatatctttaggagcaaatttggaaaatttatctcttttaccaaaataaagcatttgcacccaaagactttaaaatatgaaatattgggtttgttactagttaggagctcgtatggagtctttttgagaagccagtgaagacacaatcgattgatggtatgacatgtggaagtcttgtattcatcaagcatggtccttgtcatgtcagttagagtttagtttttcctttccatcgctctgttttgttgtggtgaatagagagccgagaactcatgattgttaccttcttcaagatactcctcaacttgtgtgttcttgaattccatctcgttgtcactccttatcttttttattctcaaactgaactcattttaagcccttttcaagaatttctttaatgttctttgggtctcagatttttacccaaatgatacacgtatagtcatcaacaacaactaaaccatacttactcccgccaatgctaatgtaggccactagaccaaataggtccatatgcaacaactccaatggacttgatgttgtcacgatgttctttgcgggatgtcttgctccaacatatttccttgcttgacaagcactacaaggtctatatttttcaaaggaaacattggttagtccaagtacatgttcaccttttaaaagtttatgaagattcttcatcccaagatgagctagttggcgattccacaaacatcccatgttggttttagcaattaaacatggatcaagtttagttttatctttttaaaatctactagataaagtttgacatttaatacacccttaaatgcaattgaatcatcagttcttctaaaaactgtaacacccttatcactgaatagacaattatagaccatttcacataattgagatactgaaggtagattataatctaatgagtcaactagaaacacatttgaaattgaatgctcagtggtgatcacgatcttacagaaaccttttacatttccttggcttccatcaccaaatgtaatggcatcatttggatcatcattctttacatatgaagtgaacattttcttctctccggacatatggttggagcatccactgtctaggactcaacttgatcctccagaggcgtacacctacaaaacaagtttatgccttgtttttagttacccaaataggtttgggtcctctcacattagtcacaaggcacttttccacccaaacacaagtcttggtgttattgtgctagagcccaacaaattttgccactacattatcatattttcttgtaagcacacatgactcatcaaaagtatggtaagacatgtaaagcacatttgatgcaatattatggcaagatctagtgttagcatgtaaagaatgagcatgtggaacattacaactagcataagaaactctagcatgtgaagtactagcatgagcatgaataagagtggaaattctagaaacaggcttctttccatttccccttacaaatttgggaaacttttgcccattgaccttgactatagtgtttttctttccatcactccgaaatccaacaccatccttaattctagagcgtctcccatttaagtatgtatctctagcatacttgagcttttcattctcaagctatttcttacctttttgtgattgctcctccaattttatgacttggtatttcaatctcttaatcataccaatgctatcaacacaagcatcaatgtcaacatccttgcatctagtacatatgcgtacatgttcaacagaggatatggatgcatgagagtcattcaagcacttgatctcattcgttaaatcaattttctcagatttgagactagtaatatcatcattgcaaacatttagccccttagtcaaaattttatatcttcctttctcaaaagttaaactcttttcaagttttatattcttttgcttttcagcaacaagcaaatcttcttgtttttcaaggagaacatttttctcattattgtataacatgagcttcttaaatttagcaattgcattcttatctagaccatttacattttagccatttcttcctcatcatcactagaactagcataatcataatcactttcattacttgaggaagtatatttgggagaagagcttacagtcgattttaccttccttttgtgttgttttgtcatgaggcatgtgtggtcaagcttggggtagagcaaagatttattaaaggccaataaatggcgctttcatcattggagtcccactccttcttgatgtgtgtcacgcctcccttcttgtcggagaacttcttgtacttggtgaagttcttttctttcttctccttcttatccctgtcgttattctcgttgtatgtataatagcaataaaatgaccacccttaccacatttgaagcaaatcttcttaggtcatggcttgtaggtattatatcccttgtccttctggtccttaatcttattgaaactttagatgaagagtgttatctcctcatcaaggcttgactcctcttcatccttaattggtggctcctcatttaccttttgcttcttgcttcctttcaaggcaatttcttatggcatggtggtggtggtggtggtgatccctttggagaggttcttcacatacttggcctcctcctccatgatatcgtgattgatgatcttgccaagaacttcctctgaagtgaccttccagtagtagttggggcttcatatattacactctacataatgtagggttccttatcgagaaggcccacaacatccttttcaccactttgtggttattccacttcttgctccttttgactcctagagttttgatccaacggccacatgctccacatgaagttgcttcgcctcaatgcaccctctgttgtgaggccatgtgttgccacagattccctctagaaccaccaccatcgagttttgaggccaaactaagtccaaaactggtcgttcgcaactcagggcggtttttcgaggatcatccaccaaaccgccgtgagttgcgcaccgcgtgcgcatccgccacgacctagacacgtgtcccgccagtcctcaaccgcgccagcaacatggcccgctcctccacatgctcgtacgagtgcatgtcccaggtgtcaaccaccatggctagtcacctggcaactctggtccctcggtcaagtcttagtgcttgtacttcgccgcttctggtccattggcacgaacccgcatgaccttcaccttcaccgtcaaccactgtccctgtgctccacacctgcacaccacatgctgatcgacatggttaaacaaacacataactcatgtcttggtcaatccacaactcgacccgagacactacatgttggctatcactcatcatcactcatcatcgacccgagacgctaccttgtgttcacaacccccccttgatgagtgcattgtcaacaccaccacatgaacatatatagcaaaaagaaggaagaagaagagaagctcactcaaatgaccaaaggctagataaaagccaaacaagtcatccaaagcgagcaaatcttggttccaaaagaaatgggcaacgactcaatgcgaccaagcagatcgaaaaggctagacctcaagaagaggcaaaagcagggctcaacaccactagccagtagacaaaactaaatcagagcacaaaagctagttcctctagaaagaggcaaatggctcaaacacaactagcaaaagctcgaaacatatcaaatctctcccctgtcaaaccactctccctcaaagggaactcagcattctcaaagcctctcccaaagcaaaaatctcccccttgtaaggagtccaagctgaaaatctcaaattctctcccccttcgataggagcagatgcctaaatggcacaaaatttctccccttgttgacaaatgaactcatcaagcacaagcaagggtagaaacagaaaactcccccttgataagagacctccccctgaaacaatgcagaaaagcaaaagagagtagaaaatagagaaaatgcccgaacttcagaagtataccagttagggtgtaaaaatgctctaagtggtgttgtgctatgtgtgcaacatataatgcacgtgctagcaaatgctcaaactgatcatatgcacaaggtatgtgaagtgtaagcattttgattcaattttaagcaattcaaaagagaactttaccactaaaacaacactaggcatatagtaagcaggaaattaactaagtgccagtcaaggtaaaccagttgaactaccccaaacaacgatcactcatcatgctacaaccaaatctaaaattgatacagttaaaattctcaagatttattgaattttgcagcggattacaaatttcaatgaaaaagcatgtgagtgttgaaaagcatgtgagaggttgtaagcattttcattgtctaatttttcaactggatgtagcctatgaagcaaagcaatcaaaaggtaaagacaccgatttcgatcaaccactaccctgctcaagttcataaaaagtgcaaatgaaagcagaattgatacagagacgttgtgacaaatgcaaacccatcttgatctttatgaatttttaacttatcttgattttgattttgagcacaaaatttacgaatcaagacagtgaatgactcaaagcatgagacatagccacttagcattctagtgatagcacaaaggatttcaacacatcctacacattctaggtgtcaatctcaatggtgaacatatttggattcaacaagtaatagtcaagttcacaattatgaaaacaaggttagctttaacaatattgtatcaatatgagcaaaaagagcttaaacatgccatagcatcatcatgtacacacaaaacatactactaggagcatagttacaatctatcagttatacaagtgaagctcaaaattctaaatgagatgtagatataatacaagagtcaagaatgaacaattaaaatcaacatgaaaagcagaagaaaaggagaaaaacaaaaaggagccctcgatcaaaaagggaagcaaacacccaattccccttgcaaatgtgtaaaaagtagactgattaaggggtttggtcaaaatgacagtaagctacatgtgggtaacaacgtggcacaaatcgatgttgcctttctcatactgatcacaaagaaagtgaaagtgaacatcaatgtgcttagtcttcgaatgcaacattggattcttggcaacacttatggcactcgtgctatcacaaagcagaggcacataatgaaattatatgccaaaatcccgtaaagtagccatcatccaaagcagctgcgaaaaatagctagcggcagcgacatagtcagcctcagtggtcggttgttcaacgttagactgtttgcgggaagaccagaaaaccaacaaagtcctcaaaaactgacaagtcccagaagtcgacttatgctccaagcggcatcccgcaaaatcagcatctgaataaccgcacaaagacataacggaagaagagtaccacaaaccaaactcaggagtgaagcgcaggtaccgcataatctgtttcacaatgtgtctgtgagaagtgcgtggggaagcctagaaatgagcgcatatacacactgcaaagtgtatgtctggcctcgtcgtagtcaagtacaggacgaagccgatcatgctccaatactccttctggtccacgggttcgccaccctcatcagctcaagcgccgtcatggtggacatgggcgtcgtaagaggcttggcctcgccctcgtcgaacttctttaggacatcctttgtatacttgcattgatgtacaaatgccccatcttgggtcagcttgatttacagcctaagaaaaaaagttcagctcgcccatcatgctcatctcaaactcactactcatagtatatgaaaatttggaaacaagagcatgagaagagccacaaaaggtaatatcatccatgtatatctggagtaaaaaggtatcattatcatgcttgaggagaaagagagttttgtccagagaacccattttaaaaccctttgaaagcaaaaaaaatttcggacactcaacgaggctctaggggcttgtttcaaaccatacaaagatttttggagtttaaaacatggtttggaaacttggaagtcccaaaactagggggttgcctcacatagacctcttcctctatatacccattcaaaaaggcacttttgagatctatttgaaaaggcttaaaaccctttgaaactgcaaaggctaaaaggatcctaatggcctgtaaatgggcaaaaggggcaaaggtctcctcataatcaataccctctttttggcaaaacccttgggcaaccaacgttgccttgtttctcagtaccaacccatcctcacttttgtttttaaaaagccattttgtacctatgagatggtagtttgaaggaggtggcactaaaacccaaacccaaacctgatttctctataaaaatcaagctcatcatgcatagcattgacctagttaggatcagacaaagcgtgtccaacatctcaaggctcaaaagaagcaacaaaagttgagtgagcaaagtgggacatctgatgatacctggagcgagtgactcgctcatcaatctcaccaaccatttgttgaggagggtgatccgctagatatgtcgtggtgccatcctcgaagacgtggcctcccctcaatagtagcttgaccacctctaggcgcaaaagacactgtctcaagcggtacccaagtgatggaagaagtggggtcgggtccgtcagccgaagtagtggaagcaggctcaactagggcagctggtggagtcgactcgggatcaccccagtcggcatcgtcatgatcctcctctacaaagatggtatgtcccatctgatctaaacctgcaggctcaaataaaggggatggacaaggcgaagtctcatcgaaagttcctcacaggtctccatgatgcggttactctcaaggtggaaaacacgataaggacgagagtgtaatgcgtaaccaagaaaaacaccatcagaagatcgtgactcaaatatgtccaaatttctgtgtttcaatacaaaccacctgcagccaaacaccctaaaatggcaaacctcgggtggtcgtccaaaccgcaactcatatgaagttttgttcaagaaagctcgaagaaagatgtggttcgacacatgacaggcagtgttgatcgatgcgtcccaaaaacgcctaggagtcctatgctcatcgagcatcgtcctggccatctcaacacgggtccaattcttgcgctcaataatgccattctgttgaggcacatacggagaagaaaactaatactcaagtcccaaagaagtacaaaaggtctcaaaatgagtattttttttaattctatgccattgtcccagggtatagcgctcatggcattcttgggaaactcattttgcaaccgaagaatcaaatctcgagcatgagcaaaagcctcatcctttgccttcatgaagaacacccaagaatagcgagaaaagttgccaacgaccacaagcacataccatccccctcgaaagagcaaacccgagatggaccaacagtgtccatatgaagcaattcgccgggttgcgaggtcatcaccttggtgaccggagaatgggaagcagcaaccatcttgtcgtgatgacaagggtgacagacaagatcattctcaaattttaacttgggcaatccttggatgaggccaagtgagctcactctacacaaaagatcaaagctcaagtgacctagcctcttatgtcatttccaaatcaaagaagaagatcctatcaagagacatcgagaagggctagaagagtgtgtaaaatcagtttgaaaaactcaaccaaaagtaaggggaaatccgacaaacaagatcatcatgagtgtccaaaactcgagaaaggccctttttaaaacgcacttcatagtcgtcctcaaggagttgcgaaatagaaagtagattgaaatgcaaattcgaaaccaaagcagcatccttgaggacaaaactctcgttcactcgaatggagccacgagagacaaccttagctcttgactaatcctcgaatgtgatgtattccttaccaatcacggggtcaaggctagagaaccatttgttgcttccgatcatgtggcacgaacagccaaaatccatgagccatatgttctccaggcccctgtacaacatcaatagaaaggcatgggatgagcaaatgtcatagtattggggttaatatactgggaataataccagtgttgtagcatttgcccctgaaaagtgttggggaaaacatcaaacatccccggtcccaaaggcaagcgatcaccacaagaaggaaattgcggtccgctggggaagtaagaactaaagccactaccacgggggccttggccatatggcacatgaccagcaccacgcgggcatgaccaccacgtgatctcactgcctgaggcctagcagcaagaagcaaagcacctctaggcctcgtaggacgtctttgaataggaagaccatgaacaccatgagaaaggcggttcatgtcctttctactcggcttagaaacccaccgatcatctgtcttcttactaaagcaaaaggcagccagatacccatccctctcacaatagtcataatggaacctcacctctcacttgggtggaatctgtttgctggagtgggagtttttggttggttgtggtgctctaagaaggggatcactagagatgtcaggaagggtgtcaagggtgttcctgaggtggttaggatttggaactcacacttgtttctgagaaggggctctcataggctcctcaatcacaccatctctcacaggggtgatagacttaggtggggtgattttgataatcttgggagtggtggaagttttctctgagggtttcaatccactccactcaccaaccttgccaagctgagtgtcactcctagacctaaaagaaaagcctattcctggtacgccagtttccctcttgaattgactggccaccatgcccaactggggctcactgcacgacacctagctcaaggccgatcaaaggtatgtgttttcttcctcaattttggtcttgtcgtgtttgccggactcgagagcaaactacagaccctcatagagtgcacactacgcaggtgtagggcacttactaagctagccttctcaagcaaatctatcctatcatttctctccgctagctcagtttgcaaggcatgacaagtggtacatgcacctaacaagctagatatagatctcaactcgtcgcactcatctagcaaggtggcatacttggtctgcaaagttgtgatgttcgacatgtgtagagcgcagtcatcacattatgtctcatcagacaccacaactagagctctagcatacttaagcttcttaagtgtgctctcatacttggatctaaactctctcctctcatgagcagactgccaaagcaacttgtcctaactagccgtcgtcagctcctctacctcaacggtgggagcatcggtggaaggtagtacctcagatgtggatcatactgcacgaagactagagggcaccaataatgttgtattcacgagggcgttacaatttttggataagtccaaagcatccagactcaagtacaaaagtcgtgagtacataataatcgaaggcaacctttacaagaaagtcaatagctagcccctcttaaatgcaaaactcgtgtcgaaggtagggacctcctccttgacgtccataggggattctatggctaccacataggccctagggctttcgcataaaaaattatacgttaagagttcttctagccaggaatcgtcatggatgcacttcatgtggtgcgttcatgtgaagcatgaaaaatattctctccaagaagtggggcactatcctaacaaataaaattaattgcccacacatggctcctatagtggtgagacatagacatcattggccctttgtcaatgatgcaagccaacctcaaacatgccttagtcaccatcgagtatttcacagtggactaaggcaaagacagtatccactatcatattgaggatgacacagaagtttttctggtaaaacatagtatgttgtttctgattcccctacaaaattgtagtggacaatggcaaacagattgataatcatgaattctgagacttctctgcatctatcagaaccaaagttaacttctcctccgtttaccatccccaatcaaatagagtcatcaagagggtcaatggaaaaatcttcatagctgtaataagagactgcttgaagacaaaaagggcaagtgggccgatcaactactcgaagtattatgggggataaacacaacagaatcacggacaatgggtttcacacccttcaaactcatttacgaagccaaagcaatgactccgcaagagttcacgcatgcctcacctcgaaccagattagattacacccaagatgttgatgaagcaacaacaaaatacctcctcaaggcctaccaagtggaagccctcaacaccctaaataaataccaagtagcaacgaagacctaaagggacaagcagatcatccccaaagagtttgaggtaggtgacttcaacctcatctgcacagcaaggacagaatctagaggcaagctcaaactgaagtggaaaggccccttcatcgtcaccaagaagacctcactaaactcctacatgctagaaagctagacgggggtcaagctcgagcatagctagaatgtagacaatctaagaaaattctactcataggctggcccagactagcagggtctttgaagcacagctgcaattttccatttcctttcatgtaattgggcccatactctttttcccatgaaagtggtgaggtttttaatgacgcaaagccttgtaattataattttatatccccccacaaattgtctcaatggttgaaagactcaaacttaagcccaatattcgactataaatcagtcaccacaacagctgaaacataaggcctcgccgactgcatgcgacaaaaagacacctaagggtgcgaagacgcctaagggcgcaaccgaatcaaaataagattcaagcgaagacacctaagggtgcgaagacacataagggccaagctgaatcaaaataaggttcgagcgaagacaactaaatgatgcgaatatgcctaagggtgcagtcgaatcaaaataagattcgagcaaagacacctaaggtgtgaagatgtctaagggcatagctaaatcaaaataagattcgtgcaaagacacctaagggtgtgaagatgtttaagggcgtagccgaatcaaagcaagattcgagcgaagacacctaagggcatgaaaatgcctatgggcgtagctggatcaacacaaagatccccacaagggcacctaagggtgtaaaatgaatcatggcacaattcaaagttgctcaggggcgcagtcagattatgacaaagcttaagtgaagacacatacgtgcaaaatccaagcaaggacaatcaatacgaaaacacacaaggctacccccattcaatgcaataatagcaaaaacacatttgcattggacactaaccatgaaggggtagggcagtgtttcgctagaacaaaatgatgatcggcgtgccccacgaagaaatgcaacacattttattacaactatgtcttcgtttgcaaacaaacaaaaaatatattgaatcatccagatcccctcggctctggctttataaagagactgatatctagataattctatacatgatatcaaactcctttgtgcaaaaaccaatcactctaaaatcaaccatactaacaagggtcgtccataacatggcagtcaaagtccccatcgtaacaatgtccttcgatgtcccctcctcaccactatatactacagccgaaaggcccttacgagttcacctccgcatcctcagttgtttgtttcgcacatcaagtgacagcgacccctctcacaataagagggttgagcaaaactcatccaagcgcgtgaacttgggcaaacacttttcaaggtctgaagactcgtcgagcccaaacaaatgcatatgttccttggagtccacagatgaactttgatggtctaacaaactgatgcacaccataaagtccaaaggctccatcttggcatagatgacatcaacttcttcaccttgtgcaggccacataacaggaacctgcacaaagcattaatgtcaagttacacataagggttatttttacagcaaaaactcaagaaaagccctgataaactaaaacctaagataccttgccctcgacaagctggccatccccatcacagtcagtcactgggtcgtcccctgaactatggtctcgggagtcgtcgatatcaaagcgggggctagaacctatgaagtccaaaaaaggagagataaaaaaagagaggaacctagcacaagcatatcagcctcagacatcaatccaaaactacatacttcatagtctaagatgcctagctcctcagtcatagctgggacttcatgtgttggcccaatgccccccatgattggagagctcagattaactgacgtggcatccccaacgctatatgctgacacctagcagtcttcacgcatgtgatagccttcattgtgtcaccgcctgcatcagccttccacttctttggctttagcatgttcaccacacccaaacacttctagctttatccccttcggtgcttgcatggatgctcatacaacattagggatgttaagagagtaaggaaaaatatttaaacttctcaccgatcaggctagttcaacatcttcacacccacatgctggagtgtccctcaccacccactgtttcggtccaaccaaaataactttcctgaatttcaaaaccctcccaaacttaccgccagtcacttatttggcaaaggcagtcgcggaagcgctatcaccaagagaagacctcggagactcataggttgtgcctaactcttcagcgaagaccacatccacggcctcagtattgaagttgttagtgctagtagatgaagtacccatgggcacttggatttggacccgtgtcttcttggccttcaaagatgaggtttctttcttccttttcgtatctcgagctaatgcctcgctacccccttgacctgctgcaacgccttttcctttccatctccccttgcaacaattgccaaagacattatcattgaaatctcgttcctccaccacaaatcgagggaaggttgtgtaatcaaatgaagtcatctcactagctaatgaccatccctcaccatcatccaccttcatgtagaaccagaattatgtccaattacccccaacgattcttagcacatggcattagctcagtcacagtacccttcattttttctgttttggcataaaagtacaagtaccaaattaacagttgcaccaacttattcaccatcttctttctccctaatgtgatgctcgaagagcttggactgtttgagctcaaaagtctccccatccctgacctcctgagtcccagtacgccacccactaatgatgaagtggcataatccaagcccaaagaagatgattttgcccactagggctaactcgactgccgaaggtggcggcgtatcagaactggccaggtcaaccaaacaaagaggaatagtgtccatggcatactgagggcgaaggcatcaggctgtcttgtattcttactcctcactagtccaatcaatgggcggcggtggtcgctggtagtaatggtggcggtggaaggcgagaaggaaaaaaggcgagcagctatcataagtgaaaaagtaaagaaaccctattccagagcacaacagttttatagccactgtaaattcgaaaagcaacaatgatatagtaacaattacctttttcatgtccacatgcgcacaatgaaggcctaatgggtccaccacatgcagaatggggccatctgttagtctctgatgtggtacagtgactagtgtaatttatcatgaggcaatattccataattactcattgtatagtatatgataggaatgtactaggaaaccaggggtacaaatttactttaagccctagcccccctagttaccctataaataaccatgtccagcttgaggactagacatgcttgacatgacacccaagctacccaacttcccattttgtcgtgcactgttgccttacctgctcttgagtgtttgggcccacgtgtcaggatcaaagttgcctagatgggggtgaataggcaagcggaaactttttcaacaaaaactagaaacaaactgggtaaaattcaactggtctgcacgagctcaactaaatgatgagatataaaacttaattgacctcgaaattcacctaattatcttcggaaatgagatgttctagatgatccacagggttcaaattagtagatctgagaaggacacttctcaaaatccacataccaaaaagatatgaacatttctttcacggaatggtaagagaacgaggaacacaaacaaacacaatgaacaagaacacaaaagacacaaggtttatcccgaggttcagtcacaccacaaaaggtgccctacttcctcgttgaggcgcccacaaagagtcgggtctctttcaaccctaatcctcccttcgccgatcgcaaaggtcaagcccacacactaatcttcgctcaaacgagcgagtaatacaaactttcttgtgatcttccacaagattcagagactcacaagagacacctagtcgtctaggagctagaagctccaagagtaatgaatccacaaagaactcgatgtagtaccaaagctcgaatgaagaagagcaagagggatttagagatgaagcacaaatccgcagttctcaaactcactcaaagatttctctccaaagatttgaaatgagagagacaagagatgtgtgagagagagagagtgggaggtgtttctcaggttagaaatggagttcaaatcgtgctctcatgttcgaagagaggtaggagtgagtatatataggtggggcttcaaaactagccgttgggctgatttttccggggagaaccggttgaaccgccctagggggcggttgaaccgcctctggtctgactgttagcctgtctgctagtctgactggcagactgctgcacagtctggtcaagttgaccaaaaccggttgaacctctctggggagggcggttgaacatctttgggcggttgaaactctctgggggcggttgaaccccccctggtagacctgtcagccagtctgactggcagactgctgtgcagtctggtcaagttgaccaaaaccggttgaacctctctagggagggtggttgaacctctctggggagggtggttgaaccacccctggcaaacctatcagtctgactggcagactgttggacagtctgaccagaggggtcagagaccggttgaaccgcccctagggaccagttcaactggtcttgtccagaaagtttaggagagaaaaccccagttcaactggcttggaggtaggttcaactggtgtatggtcaaagaggttcacagttgaagttgaagttcaactgcagttaaagaagttcaacttagctaaagttcaactcagctgaaaaagctcaactgcatctaaagaagctcaactgcatctgaagaagctcaactgcatcagtttgtaggtttccaaaatttagagaatatggatcactaattacacattttacagtttaaaaatcatatccatgttagtgcatatgcatgtgatgaataccaacaaaaaggattattatgcacttggtatacgacaaaggaaatttttaaactacatcaagagtagttatttagaaaacgaggattgcaatccataaaatgagatacaattctatcatcatggattgagttaataaagcatactcaagagaaacttattctctaatgcacaatatatataatgtgctccaccaagttatgtgcaccaagtatttgaatgacttgccaaatgcactttcaatttagttaagagtctcatgaggagtacattacatatcttagtcaaggcatgataaatttgcaatgaattaacttatgcctaagaatacttagcaccatataggacgtaccatttgttatatcaattgaaatatcttactatatgagatggtgtcatttaagtattcttcttttcttcatttacggagacttccttttttagcttgttatctcttttccttttattactagttaaaaaactttgaaaagagatattagtagtccaaggaagttttcaatgaatggtgatctttagatatgaattgcaaacaaatcatcatttgtgaggcatgaaggcataaattaaattccttttaagttagtgcacatggaggagtgaattaacaatatgcaccaatttacaaatttaaggcaaaaggaatttaaccttcatattgacatttctttccacagaatagatcattaccaattaaaataatgccacttgaaaggaactattattgatcacatactaaatgaaacaactagttccatacctttgccttgagcattcctaatctttcttttaggtgatgattaacctttaatgattgttattttaccaattgaaagatcacaatatctacttatgaatttccatgaaaaagcttaaaagagattgcattagaaatacaagcaatagtttcctatttagtaacctttagtatatgaatgacaagaagcttactaaaataaagaaacctcatgatatgaactaaattacccttacaagcatcatgcataacactaatttaaacaaggtgaaaatagcatgattatttaattaagtttacatggcaagtttaattcataacatggtgagtgattaatgtagaagacttaaaaccaattcaaccaagaaggaatacatcacatagtattggtttgatcttctttgaatattgaatggcacaatccatgtgagaaacacattctcatgtcgtgagactacataaacacttagatagaaacattagtctcacaactctagtcatatagagaattattaccatcctttggatatcccttagttgtaggccttttgcttgattcccacaaaggttaatccttattccctacaccacaagctcttgctagagatgaatatgaagttagagatataacaactcaatttttctttgggacaatcttaaaagaatagtcaatgtaatattgatagcttgagataagaattgagttaaaccatcaagcactccaaagcttcatatcatctttgggtacatgcaaaacttattaagtacattttggtacccatctcatgatgggtccatcaaggttagctaataaggacttagacacccaaatagccttggtcctagaatatggtgaactcaccgcctttctagcacaagagtcaaacttgggtctcctaagcatatttgaatgtattgccaaattaggcttaggagttttacccattggacaaaccttgaatagatgaccttttcacggcaattgtagcaaatgtggtgcctatccttgcaatgcatttgccttttgctttcatccttttttatggtcatctttcttgattgtgcaaggtcttggttcttcatgtgggggcatgaaccaatttccatgttgaagcacataggtacattgttagagcaaatagtatgaacattaattttctcaccttgaattttgctcatgcccttcttggaaagcttggtattcttttgaaggggttttgtgcatactacggttgtccccttctcaagctttttcaccaaattatcacagttaccttgagaaggttgagcgttgagcataacactttcccttcaattgagtcaagctccttcttagcctctcattttctttcttgagctcattattttcttttgcataggaaacattacttattcctggaaattctagctcaatggaagattggctttcttgagagcaacatttgttagcacatgataatatagttttatttgagtacatgtgcataagtgaggttggtataatttcaaattagttaacataacctcatgagccatttctaacatgatatgtgattccataaatttattatgagagcatacaagcatatcatgtttttcttgcaaagctagatttttaatatttaacttttctatcgtgttcttgagcataacatttttattttctaattgagcaatatatgatgaatgattaacaactctaatttgcttaattgaaatgtcttcatacctttggaccaaatcatcatgagagcacattagcttctcatgctctttggtcaacttctctaagtcttcgatttttctgatgagtaagtcttcttgcttatgaagcatttccttttgttcttccgctcttttcatgagtttgagcaagctcatccggttcttcttgcttagttgagcgaagaatttttgaagatcattctcatcttcactatcactttcatgttcatcctcatcctcacttttacttccactatcactcccattaacgacaaggcacatatgagaagtggatttgaaagacgaaccttgtcaagagatggattcgtcgtttggtctccattgatcattttcttcttcttcaatcttgttcttcgcctcatcttccttcattttgaggaacattctttcggcgattctcatggcaagatctattgccctaggatcaacatctgcaccaaaagatgaagtcgaggcaacctcaactttttcaagcttagaagcacttttgttgcttagtctccctgacatgatcttttactcactcgattaagcgttagaacgaggattaggctttgataccaattgaaagttgcctagagggggtgaataggcaagcgaaaacttttttaataaaaactagaaacaaactggtaaaactggttcaaccagtgtcaaaaccggttcaactgatttgcatgagctcaactaaatgatgagatataaaactgaattgatcttgaaattcacccagttatctttggaaatgagatgttctagatgatccatagggttcaaattagtagatttgagaagggcacttctcaaaatccacacaccaaaaagatatgaacaattctttcacggaatggtgagagaacgaaaaacacgaacaaacacaactaacaagaaccaagagacacaagatttaccctgaggttcagtcacaccataaaaggtgccctacttccttgttgaggcgcccacaaagagtcgggtctctttcaaccctaattctcccttcgtcgaccacaaaggtcaatcccacacactaatctttgctcaaacgagaaggtaatacaaactttcttgtggtcttccacaagattcgaagactcacaagagacacctagtcgtctaggagctagaagctccaagagtaatgaatccacaaagaactcaatgtagtaccaaagctcgaatgaagaagagcaagagggatttagagatgaagcacaaatctgcagttctcaaactcactcaaagatttatctccaaagatttgaaataggagagacaagagatgtgtgagagagagtgggaggtgtttctcatgttagaaatggagttcaaatcgtgctctcatttggggagagaggtaggagtgagtatatataggtggggcttcaaaactagccattgggctaatttttctgaggagaaccagttgaaccaccctaggtggcggttgaactgccattggtctgactgtcagcttgtctgccagtctgactggcagactgctgcacagtctggtcaagttgaccaaaaccgattgaacctctctagggaggacggttgaacctctttgggggacggttaaactgcccctggcaaacctgtcagcctgactgctagtctgactggcagattgctgtgcagtttggtcaagttgaccaaaaccggttgaacctctctagggagggcggttgaacctctttgggggcggttaaacctctctggtggtggttgcaccgcccctggaagacctgttagtctgactagcaaactgctggacagtttgaccagaggggtcagagactggttgaatcgcccctgggaccagtttaactggtcttgaccataaagtttaggagagaaaccccagttcaactggcctggaggcaggttcaactagtgtatggtcaaagaggttcacaggtgaagttgaagttcaactgcagttaaagaagttcaactcagctgaagttcaactcagctaaaaaagctcaactgcagctgaagaagctcaactcagctgaagttcaactctgctgaacaagctcaactatagctgaagaagctcaactcagctgaagttcaactctgctaaaaaatctcaactgcttttcaacaggaacactctcagtttctcaatcctaacaacagtcaacagtcatacatagagtgcccaagggattttggttttttgaaatagcttttgaatatagaggcttgagctttggcaaacaccaaccttctttttggatcccccttgatagtacgacgatttattttgaagcaaacacaaatcaaaccctatgatttgtaccatttcaccatataggagttcaaatcatggcttcaagtcaccttactgatgcatcaacatattataactcttcatacctgattagttcatcgacttagtgcaagtactctcttcttcaccttagatatggtacttcggtccacaagccgtcccttggccttcaccttcgcttagtttctcgaagccctttccttgctatcttcaccctatcaagccattcttgagtcacatcatattgagcattcattgagagaatcatttcttcaatattgtgaaccttgcttgaatgtcttcttgatataactgttaagatcaatcaagctctagtttgattctaatagaagcatatatggattgatagtaatatggtcaagccaattcacgattcctcatatcttattcactttgtcttgaccaatcctcttaatcacttcatcctctattctgatcatatgtatgtagtgatttctcaggtcttgtccatatattcaaaccaatatagagatcatattatattcatttgcattgtctcactggttatttaaccttgtgttgaatctttgttcattgatcagtatacactattcaagtaagttcatcatactgaatttcctgttcaacatttagcaaacttgttagacctttaaatgtgttgttatccaaatcacaaaaactcacaaaagggatgaatgcactttcacaggacccaataaagttagtatagaataagtagaagcacaatgtttgtaattattgctaatagatggaagtgcagagttgaacttagcaacaatatgatatgaattgtatggcaagtataaatttggggataaaaggtgaaaaacaaatcacaaaggcaaaagcacaaagacacgataattgtttaccagagtttgatttccaatcatacatctccgttgaggagtcccgatgggatcaagtctctctcgactctttcctcactcaagtgatcaccaagattaaactaaagttcccttccacattgatcaattgtgagactgagtttcttcaagtctttccacaacttcgaggctcttgcctattttacaatctcaatggaagcttagctccaaggctcagtgatcacaacacactctacaatgcagctcaacacgcaagtgcagtcctggcaaacactcaaaggattactatcgctacgtaagatttgtggcacttgaatcacttgggtgcttggaggtgcttctctaacttacatgacttgtatctcagctcttagatatcataccaactggttggggtcatatttgttggccccaagtgccctcctatccattagaagtacactataaaatctgctctgatatcgggtgcaccgaacctctcaatgtagccaggtttgatgcaatgaacctctatctattgcatgtctcgttagtgactgttttgaaaagatgttagttgtcaccatgcactgaacccatctagtgcacatcgggcctcgcactattcactaccacatctacaggctgttgaaatttcccttctgactgttggatacactgtaagtccagtggcgcatcaaaccagttcggtgtgcccctgctaccaatgtccatttacatcttctctacatgctaagtctggtaggtggtccagtgtgccaagctgtcgaagtccatttacatcttccctatgtgccgagtttggtgggtggtcggatggaacactagacctggtctgttgtgccaagctacttgagcccaaaaacatgttctctgagtggcgagtttggtgcactcagagcaaccaaactagatccattttgggcacatttttcttggctttaattggctagtgcctttggaacttctatgaattagacaaatgtttataaagtcaatccaactactctaagtcataggtattgacctttttttaatcctctaagccttcaactcttttctctaactttgcttcaaatgccccctaaaactccaaatcctaaatctggtctctcttactgttccaataggatccaaaatgtttctatgaccttttagttcttatccaatttttttaaatggcccaaagtccatttccttctcaatttgaccttttcctctaagtcttagttgtttgtctgcatttgaatttctaaacctaatctataaattctgcaatcaaacacttagtccatgaggttgtgatggtcatcaaacaccaaaaccaatatagaaatgtctcaaagctcatttcttttttaataataaattatagaataaagaggaatctaccttcatatatatgttccctaatttgatatggaaaataatcaacacattatttagtaatgttgtggcgtttatgtagtgtatttacgaaattaattgtatccgagcaagtctatttagtctatgcttttgtattagtatatgttatatacataacgaagcacactcatatgcactcctcacaatccatctttcatgtgaaactcattcttatacacttaaatgactacataataaacccataatttgtcactgagttttctaagccttgaaatagaattctaattcactacattacaaatctagaagtttttgttgatttgtctagttgttcattgactttgtcttgatagtttttacttcctaatgagagaaatgtatataatgttaatgattatttgcattcgaatagtgtcctatccaactataagctttgtacctttagcatgatggtataatactaagagtcattgagagtgggttaacaaacatatatattaatatgaagtatgcaacctcaatactacatatattaaggatttatcttactatttttactgcagggaata

SEQ ID NO: 893 - DNA, 5823 bp, Zea mays
  Intron number 2 from transcript GRMZM2G026855_T05 (locus G RMZM2G026855) derived from phytozome v7.0 (chr-ID 3; pos 1 69073852 to 169079674 reverse strand)
gagcgcgtcgcctgcggccccggccacggcatcaggtacgtgcgccgtcgtctcggtggtggatcagtgcgtgatgcgcggtgattttgtctgcatgaatgagggcggaaatgcccccacgttaggaattaaatcgaggaaaatcaaagcgtaggaatggaagttcgagctggttttatggaaatcaatccataaactggtttgactgaaacagcctcgaaagtcgaaagttgaaagatcttcaagtcagatcagacgagtggaaactagagatggccaaacgggccggcccggcccggcccggcccgggcccggtgaagcccggccaaaaccgggccgggcctgctgagccagcgggcttaagtttctgtccaagcccggcccgcagcgggcctaaacgggccgggccggcccgtttagcacgaaaaacgggccaaaaagcgggctaaacgggccggtaagcacgttttagtgtaaaaaaaacgggcttaacgggcttagaggtaaacgggccgtgccgggctagcccgccgtgcctagtttcctgtccaagcccgcccgcttattctaccgtgccgggctcggaccgggcccaaaaagcgggcttcgtgccggggctcacgggcctcgtgctttttggccatctatagtggaaacggacctgacctgggcccgctttccatactctagttcgcatagtatccactaacgaaatcgatctttcaactagcatcgggagcctgggcaagcagcagggcacggaggtggaggcggtgcagaacgtgacggtgaagacgacgtggttcaccggcaccatgaacgggctgcggatcaagacgtggggcggctccaagcgcggcttcgtcacgggcgtcaccttcgccgactccaccatgtccggcgtggacaaccccatcatcatcgaccagaactactgccccaccagcagcggctgccccggcgccggccggagctccagcatcaggatcagcgacgtgcggtacgtgggcatccggggctcgtcggccacgccggtggccgtcaacttcgactgcagccggagctacccctgcagtggcatcagcctgcaggacgtggcgctgacgtaccagaaccgggccgccgccaagtcctactgccggaacgtgcaggggaccgcgctcggcctcgtgctgccgccgagctgcctctgatcagacgatcgaccttgcaacttacattgccggccggacgcagcagttagctgcatgcgttgtcacgtgtatatagatgcatatgtcgagtgtattatgtacggagtatgtggggagtgcttactgcttagactaggagaacattacgagcttcttctgacagtagatggttatatagtcgatatctgttggttcttttctttaacccttcgcctttttcgcagcacgattattgtatgagcaagttttttaaataatttttattttattctggtctaggtacaagttatgcacataataccgtaatctggctctttgacgagtgctcgacgctttatcaagtgctttttgtcgggtacttggcacagttagacattcggcaaagaccgctttcccgagtgtcaaacacttacgaacgtcgacgttcggcaaaggaccgtcagcgaccatctatagccctaggaacacaatgtaagccctaggagcacaacgtaatactaacaccaaactaagttgaaaacatcgtaaaagatagcaaacctattttttcaagatcctttagaaacatgtgtaatttcaactaatttatatggtcaaaataaggtacttagtactagttatattctttttgtctagtgttccgtccatcacccacaaataaaggtgactttacatacttctgatttctattgatacatacatacatctgatctctactgctagttgactgtgcactactacgatttctatatattacataagtagaccttgtttgaatgtaatggttgttcaaacacgctctaaacttctacaatgatttgtgctctatttaaattggtttgttaacttcgatctcaacaggtctaccatgtaacttatataaatgcatttcatataccaagtgagaaaccacaatttcaatactcatgtcgtctcccgtgaggtggcttgaacgacaccaaaccctagtcgtcgttgtcccttacccctccactctccgccttgccgccaccacagtaagcagacaaaagttccgagcgacttgcgagtacggtggtgaaatcctcgtgtgacctagcaaggtttagcccgacacgagcatgtcctggcctgttgtccaccgggtctgtgctggcccgacccgaccaccgtgtcgtgcatatgccttaggcacgacatggtgggttagtcttcatacgatctgttttaattttttccatattttcataaaattatctatattatactttcatatagaatataaaacacaaaaaatatgagttctcttggctctagaagtgtaggaatgtggttttggagcaacaaccatgatttcaaccccccatttgtgcataagtttagaaactcttgcattatattataggaggagaaattgcataattttataaattattgaacatacgtcttatcgtggaacatatatttgctttctatttgaaaacgacattattatattctgttattttaaaaccgtttcattgaacttacattccggctcataatatgattgttcgccttggaatataagaaggcccaacactatccttgccaaggccaactctatccagcgggccaacaccgagccacaccgtgcactttgggcctacaacatcgttccataccgggaaagggaaaaaggaaagtgcatacgatatcctcaactatcggacaaagtttaatctgtgtcgtttaaagacttaattctttgagaaaatcccttcaatgccatccaaacttatactaatctcttcaatgtcatccaaacttatagctttccttcaatgccattaaatttaaattttaatcccttaaataccattaccgttagtttgagctaacgtcgttagttcaatttaaagtcaatctctccaatgccattaaaatctatattgatcctttcaatgccactagaagttgatcgatctatttggaatttaaaaattccagaataaaaaaatatagatcaaaattttaaaattccacgatttttaaaaattttagtccatactttttaaaactccaaaattacttcgatatactaattcgatctatttgcttcctaataattttgaaaaaaatatgaaaatatatgatagaatttttaaaaattatttaaatatttgtagaacttcaatccacatttttagaacccatttttttgaaacgcgaatatatcacattgatttttaaaatttagctcccttgttatcattagtgtttgttgttagtttgaaaaaatatttggaatcaaataaaccgaagtgatatagcagagtaatttttggggtttacaaaaaacatgtacttaagtttttaaaaatcgtggaattttaaaattctgatccatatttttttattctgaaatttttaaaccccaaatagatcgaaccaatttcgagtggcattgaagggatcaatatagattttaatggtattagagagactgactttaaattgaactaacggcgttagctccaaactaacagtaatggcattcaagggattaaaatttaaatttgatggcattgaaggaaagttataaattttgatggcattgaagggattggtataattttggatggtattgaagggattttctctaattcgttttgctttcaaaagtttgtggagtctaaaagttcggttttctaatttagtaaggtatgtttcataatttagaaagataaactgagagatcgtagtaataatagctgaaatagatgagatcaggggcggatttgggctccgggccacctaggccgtggctcggggcgtagcccaaaaatactcttgtatataggtctttttcaaccaaaaaatcttacctaaaatacatttcagctaaaaaatatggtctaaaagacctcctgcttacactgattgagccatgcgctagcagcctccctcagtcgcatcttccaattattttgtaaacctgcacggctgcgtttcctatgtttccagcggcgcgccgcctccattcaaccctctatcgctctccacgccttcagactctacgaatccggcaagggcacaaggcagcaacttccgagtcggtcgggcgggctctgactcaggcatccgccaccgccagtccgacctccacctccgccagcctgcctccggcgtccctgcgaccctattcacccaaatccgcccctggcattacatcttctcataaactatacaacttgctcaatccgattcacttccttttcttattcatagttgagggtggagcgcctcccaggccaatgggcagcgaccacctgagcggcgagcgatgtgtgctgagtgttgactgcctgctgccatgtgtccgtgattctcctctactatgagtaattgtttccgaatgtctgattctcttttcctatctgtcacagttccactgaattgttttaaatgtttctacccctaaagtgcgaaaaattaaaagataagtagtacatcgttatatttgtagaatggctcagggtgttatttttatggagctccgccactagatgagatggactaagattatccgcactcattctactctaaatttttactctaaaaggaatattctattctagtcatcaatattttaaaatacagtagccaaacttccgcatccacaactactctatatctcaaccctatacaaactaccatatttttttataaaaaatacccactgtgggcccaccacccatctcctttgcgtctgcagcaaacccaccgtgggcctcaccacccatgctctacacagcgtcacagtgagttgcgggcagcaaacgctaagactatctgcaccgcctcccgcttcacctccccctcccctcggttagcggcgccaatgttactctatgtgctgcatcggtagcctctatatacacccctaccagctacagtactagaggagtctacaggtacccaccagatatagcgtgaggacgccggcccccttctctgcatgcacagcgacgtgacagtgcaagttgaagtttggtagttagaaaaaaatgatgttggataataaataggtgtaaaaaataatattttatagttgtagtgggttatagggggagtatttagggggaaccgctgcgagagatgaaaaaataggggatgaaatgttgatgatgtgacgcaaaaaagtgatatagggggaaaaatttagagagaatcgctgcggatagcctaaaatagaatatgccatccagtcaatcgctgcagccatccacttcactgtaaatttttagagttggcttcacagtccgcgactgcgggcagcctaatcgtggtagaaagaaggcaacacacatggtgacatggacaacaacaagcagcctgcctgacaatcagcctagagcagagcctacggggtcccctcagctcacagtcgcaccgcagccgtcctgcacgaacgtgccgtgggacgtgggtggcctccaaggctccaactggaatccaaggcgcgggccgtctctcccgcagtcccgctgtccgcctgttccaacgcgctccgcgcacgcgcgcacacctacctaccccctgcgcttgcacaaaatccttcttgatccgcacaggaaggtcccggcagaagaacttggcgggcgaaagg

SEQ ID NO: 894 - DNA, 11270 bp, Zea mays
  Intron number 3 from transcript GRMZM2G060067_T01 (locus G RMZM2G060067) derived from phytozome v7.0 (chr-ID 2; pos 1 11558564 to 111569833 reverse strand)
ctccaacattggaaaggtttgcactacagcttagtttctgatggagttgtaccagatttttttgttcaaactagaagttgacacattgttggaactttagcagtctataaaggatttttttcttaaagtaagttcacagttacctagggtacattgtggttgttgttgcatgagtaatcctacatatcatttcatatatggattaaccggatggtctcactcttgaaactgtgggagtgttggtgcaattcttatactagtttcacttaacttaatagtgccatgtgtggggacctattaatcttgaacatttactcgctagattatatgacatttaaaccatgtactcgtgaataagcagcaagggacaccttgaaccacatagaatatcatttatccttgctacccaattgcttacatggctacatgcttcttggattgtattctctcttctctaatatcagtatgatcatcaaaacacctaaaatgtgttgctgtatgtatatagccagtgtaatgttgtttcttaggatgcattgcactaataaaacaacaatttcatcaatgatatgctctcctagtctgtagttataggaatagctcttgaacatcccttgtgatagcagtgctctatttgaagacactgctatatatggaatattctttttgttgaatatcccctgaaatctgcttcagttatatgtgtatattatttaattcaccagaatttttcttcacgcatttctggttgtgttacaaatattcatgcagtatggattacaattgtttaccatgttaagtagttatgattgcatcatatatgatcttttgaggatcagaattaacccttctatttttcttttatacagtgccgctggaccacatacgattgttgatggtaaagaagttgtgaactttgcatcagcaaactacctcggtttaattggcaacgaaaagattattgtaagagacaattctattgcttgacaatatttcaatgtatgtattttttggaatatctaaacaaagcgaatgactttcaggattcttgcattagttcattggagaaatatggtgttggttcttgtggtccacgtggcttttatggaacaattggtctatattatcatccttagacaatgactttggctgaaagtatagaggaggaacttaactttccaatgtattcttgcagctgtccatcttgactgtgagtcaaagatagctaaatttttggggactccagactccattctttattcatatgggatttctacaatattcagtgtgatacctgccttctgtaagaaaggagatatcataatcgcataagttgactgttggggacttgttctcaaatgctatgaattaagaacaagtcaacataaaatgttaaatattaatgtccttcgtccactgaagcattatctccccaaggatttaatgaacttcggacgaaggccatgagcaagatatcatgaaggtcataccttcgtgattagagttatagaacaatgtaggatgaaatataaaaaatatgaaacataagggaatgatatatcaaaaacacataagattattcacatatgttattatacaaacctaaatattaaaacataatatttaggtacatttataccttcgccttgggcagaaagcaataattccagcgtaatatgccagcaattacaggattgcgtgaacagtacaggggtactgttcacctatttataggcacagggcgcagtctgtgtacaattacatttatgccctttacaatcaactataataatgacacaaaatatcatgggtctttaggtcatttcatctttaagtcagttcaccccttcgtcttgagacatgtcactgtgccgaagctttataggcgatagcttcggcactactttttagaggatctgctgaaggtgtttctttatttaggatcttcggctataaagcatacccccaacagtagccccttcgtggtgctagatcgtttttcgtaacgagcttgatccgtgaaaaaattttttaggcttcgggatgacaaagatctgaaaaacaccttccctgagctcgttggcgagaaacgattaaaataatccgtgcgcgaggtggccccatcttgcagcagttacgcgcgccctggtgattcaccttctcggactctgtggcccaccgttcagtgagtgcgggtggctgtttgtccggtgcggaagaccttgatgattcaccttcccacctgcggcactatataaatagacgggtaggtgtgaagttaccacaacattcattgctattgcgctattttgctgccaaaatattgaccaaagtcgaagcttgcttactgcatcctcatccgaagctatttgttttactcaagcttcgtaacaggaaagagcttcggcaaagttaaaaattttcaacttaattcgaaaaataagaaattcaatcatcagatggccagagtacgttcaacagctagggttactcacgatggagaggaaccccaaggtgccgaaactgctctaatctctaaagtgatgaagcgttcagggctggtagtatcggaggatgcacctgcctctgaagctgagcaggctgatgctgaggaagttgagtcaaaagatgattacagtgcagtgccaactaaacccagccacctggagtttgggaaatccaccatttccgaaggtgacatgccgaagctgatgaatttgggctatttcagtgaagcgaagaaggagctggttcgtttcggcggggaggagattactccgaagccaggaaaggatgaagtagtggtcttcaaaagcttctttaaagctggtttaagatttcctttaaacaagatgattgctgatgttctgaagaagtttgggatctatcttcatcaactaactcctaacgctatcgttaggcttagcgtttatatctgggctctccgaagccaaggggtggaaccattttgccgaaggcttctgccaagtgcacgagcttcattatcagaccaaggctagaggagatgggctgcacgaaaactttggctgctacaattttgcctatcgcaagagtacaaaatttccagtgatcagctatcgtagcaagtggccagctggctggaagtctgagtggttttacgtcaaagttgacgaagaaaaggagaagttggtccaaagtcggctagaattaatcttcagagagaccagaccccagtgcaacatgacaccagggagtccaagccaaattgctctggctgaatttagagttattgtggagcatatcggcactagggacttagtgcaagaattcttggccttcagagtgttcccaactttgaaagagtgggacatgccgaagcttaagggagaaaagaagaagggggaacttattcggttgccttatcattataaattcaagaaacatttcaatgtgccttgccaagagtggttggacacgattgaagtaatgtgcaacgaaattctcagcaattactctaaaaaagaagatcaactaatgaccgcagccttcggcacctgtccgaagcgaaggttgaaccgagtaatggatgctctggactttgagtatcccgactacgagcggctagacaaagatgccgaagggcagaagagaaagagagtggctggtgctttgaataaagaagctactaaatcgatgaaagatgatgaagaacaattgaaaaagaaaaagctgaagcctgagccgaaaacagatgcttcgaagaagagaaaagctacagctctgaagcagaaggtaattgatgaagaagaagaaactgctgcaacaccctctgccaccgacggggaggaaatcttaaaggtaatgactaaatctttgcctgtcaagctaagtccactggggccacatctgacgaagctttttcagaaggaaaaggagcccgcaaaaacgaagaaggcagctaggccgaaaaaacaaagaatcattacagtgacggaagtcattgaagggacaccaccacaagcttcagctctgaaggcaccagatgttgagagcacaacagctaccgaagctgcaccttcggaagctacaactgccgaagctgccacagccgaagatattcacttagaaagcacaattgctaatattgataaaatactgctagacatggccgcagaagaaattactgcagccaccgaagagactatggcccgttgagcccgaaaaggagaaagaaatagccgaagacacttcggaagatgaaattttcaactttcaaaacctagctatacaggagttgacgaaggctgaaaaataagagctaaaagaatatgacatatcttgtggatatcagccgggggcacttctctttggtggcgtcgatgacgaaaagttgggttgtgtctgggatcataccggagcaaaggttgttggtactctatcaaagagtattggtttcccgaagctcgagacggacattagccgctaccgacgacagcacatcgtcggtggtttattctattctaatttcaaggtaaacaacttttctttaacttttattgtttttaacaatgaagatgttctctaacgaaggttgtttgtatgcagagtatgctgttgagtaaagctttgaaaatgcagcaagattttgaagataaaaacacgaagttataattgagagtttagaaagtaaaataaaagaccaatcaactgctcttgaaaagaaggacttcgagcttcagacaaccgaaggcttattggcagaagctgaagctacaatagcagaattgaatacgaagcttctcttccagtcagaaagcttcgaacaagaaaaacagaagcttaatgcaaaatttgagaccgaggtccagaaaagttcagatttgcaaaaatcattgacagggcttcaaaacaaatgtctggagtttagtaatcgatgtgtacaacggctgaagcaggtcttcaattcggttggagccagctgcgaaaaatttaatccttcgactgaagacctgccgggggccttggaacatatcgagggtgaaattgatgacctcgacgaaattatagctggacatggtgacttctgtgccttggtagcttctcagggcacagctgttgccttcttgaaatctggttgcaaacatggaaaggttgtcaatagacccaatttcagtttatcaccagcagatttggataatattcccaaccttgtccgaagcatagcaaatagatttataaaactggtatggacaaagggtggacgaagcatagctggtgatgaagctcagagtcatcttaagccagtaacaaaatcataccttgtgcttacctcttccttcaaacttgaatcttccttacaatactttaatatgtacaggatgacgaagccgacgaagctgaagagtaagaagacgaagccgaagcttaacagacgacgaagacgaagtttaatggatactaatgaagcttgaatagataactgtagaaaaaactttaagaactcttgtaataacctttgtaaagaataatgtaactaaattttactctgtgaactttgtccataccttgtaatatattcttacccttccatcaatgtataaagtgcttcggtgtgaacgaaattagcatttttgagccgaaggcgaaaaacacctttccttcttttcgtacacagtgaagcataaaaactgcttctttttctttttgtcgaagccttgtctttagagccgaagcaactgcctgtgttatgatgatgatcctatgtatgtctaaatgaatgtttatgaatgcaaatgtatgatgtaatgtgtcgtgcaaatgaatgtccaaacacacgcatatgaagccacaaccatagccttcatccccttaggaataaccaaagtctctttgccgtttattttttggcttcaccgcttatttttcggtgtatcagcgctgacttttcgctgtaagttctgcattcccttaggaacgtcttttgaatttcttcgccttctatttcggcggtatcgtgttgacttttcgcgcttcgccttatatttcggcggaatcagcgttgacttctcgctgtaagctctgcattcccttaggaacgacttttgagcagaaaacttacactgagctgccttaggaatggcttttttgtagcttcgtcgtgctctgcatccccttagcgacatctttcgagcttctccctgttttttcttttctctttgcactcgatggtgcatgctcaacttttacatttacatttttgggggatattgctcttgtagagctgaaataagaaaaagagaaattacatgctatggccccattaaaaacctttctccccctttagaaaggaaaagggtgccataggaaaaaataaaaagattacatcaagctatatgtaatatcgccgaagctcatccgcattccaagatctaagaatgtcgttgccgtccatatccttcaatctataagaactgggtaatgacgaagatactacaagaaaaggtccttcccacttcaactgtagcttgcctactgtatctgggttggcaactctccgaagtaccaagtgccctggcttgatgttttttaaccgaacttttctgtcacaccattttattgtttcggcttgatatttattgatgttctccatagtctaaagcctgatcccttctatagcatcttttgccatagaataatcagcttcgtcctctgccgaagccactgttcttattgatcctgctttagcttcttctggggttattgcttcgtcaccaaacaataatttgaatggtgtaaagcctgttgaccttgatattgtagtgttgtggctccacaccactttgatcaattcatctggccactttcctttgggctgattgaagattaacttcattattcccgtcattataatgtcattagctctttcaacaagtccatttgactctggatgtctgaccgatgcaaaatgaatcttcgtgtcaatttgttcacaaaactctttgaaagcttcagcatcgaactgtgttccgttgtccacagtaatagccttcggcactccgaagcgacaaacaatatttttccagaaaaatttctggacagtgatcgaagttattgtggctaaaggcttcgcctcaatccacttggaaaaatattctaccgccactacaacatattttagatttccttgagctggtggaagtgggcctagcaaatcgaggccccacctttgcaacggccaagtgggctgtattaactgagttagagatgaagtttgtttctgatctcttgcacatttttgacagccttcacatttttgaactaactctattgcatccgaagctgccttcggccaataaaatccttgacgaaaattttttcccagcaagggcctagatccgatgtgagatccacacagacctgtgtgtatctccttcatcaattcgataccttcggttcttgataaacatttgaggagtggtgaacaaactccatgtttatacaattccccttctatcatgacatatggtcttgttcttgcctccattcttttgttataagcttcgtcacttgaatgacaatttccttgaaggaaagatattatttcagttctccaatcttcactgtgcactggagaaatagtgagcactgctctttccatgagctcaaccgaaggtgcttttattgtttcaaaaaaatacttcggagggtaaagggagcccctgagccgctgatttggctagcaaatccgcatgctcattttcacctcttggaatatttttgacggaaaacccttcgaaggaagcttccaaccttcggactgtatccagatatttttctagcttcgggtctcgtgccctgctgctcttatgcacatggccagcaataacttgagaatcagcctttaggatggcccttcttattcccattgcccttagttttcgaagccccaaaagaagtgcttcgtactcagcaatattatttgtgcaactgaagtccagtttgactgcaaaacatgttttgacttttgaaggtgctactaggactgcagctgctcctgcaccaaaggttccccaagaaccatcacagaacaccgtccaagcttcggtatccttgtttctcccttcttcgtgagcccctggcgtccaataggcaatgaagtttgctagcgcctaggattgaattgaagatctgtgcacgtaatcaatggtaaattcattgagctccgtagcccactttccaacccttccagtagcttctcagttcctcataatatccttcagaggctgtgacgagggaacaattatatgataagcttggaaataatgccgaagcttcctggaagccattaatacagcatacaacactttctccaactctgtgtaatttttctttgataagcttaacacttcagagacaaaatatattgggacttgttgtttattttgtccttcaagcttctcttgtacaagtgccgcactcactgcagagtgcgaagctgccacatacaatagcagaggagcacctagcgcgggtggagttaacgttgttagatctatcaggtattgcttcagctcttcgaaggctttctgctgagctaatccccattgaaagacttcggctgacttcagcacttcaaagaatggtaaatttctctctgctgatctagatatgaatcgattcaaagatgccagtcttcctgtcagccgttgagcccccttctttgtacttggcggctccatccgaaggatagcttcgattttatttggattagcttcgatcccttttgttgaaactagacaatcaaggaattttcttttttttactccgaagacgcagttttctggattcaacttcaggccagcttgcctaaaattagcaaatgtttcctgcagatcagcaatgtgattttcttgcttcgtgctttttactatgatatcatcaacatatgttagcacatttctgcctatctaagagtgaaggactttcgctgtcattctactgaagcttcctccagcattcttgagcccctcaggcatccaaagataacaatatgtgctgctgggggttataaagctggtttttggctcatcttccttcttcatccagatttgatggtagcctgaataacaatctagtagactcatgagctctgacgaagctgttgcatctactagagaatctattcttggtaatgggaactcatcctttggacaagctttgttgagatcagtaaaatcaatgcacattctccatttaccattggccttcttcaccataacagtattggctaaccattatgggtattttacttctctgatgactccagcactaagaagtctttttacttcattccgagcaccttcggctttgtcatcagtcattttccgaagcctttgctttctaggtctgaaggatggatcgacattgagcgaatgttcaatgacatccctgttaacatcacagagatcgttggatgaccatgcgaagacatctttgttgttgaacaaaaaccttgttagagttttctcctattcctgagtcaattgagatcccagcaataccttctgctttgctatatcttcacataagagcatgggcttcggctgatcggccgaagcagccttctcccttctgtacttgtactgctcacaagcttcggctccatctatattatgaattgcttttgaatctgtccagtttccttcagcctttctggcagcttcttgaattccatgaatagcaataggcccttgatctgaaggtatcttcatgcatagatatgctggatgaagaattgcttcgaaagcattgagtgtcccacgaccaatgattgcattgtaggggtactccatgtcgacaatatcaaacacaacttgctcagtccttatattgttgacaaatctgaaggtcactggcatcgtgatcttgccaagcgctagaatctgccttcctccgaagccataaagagggtgtgtagcatcatgaatcttatcctctaactcttgcatctgtctgaaggccttagcaaatataatatccgctgcactgcctgtatcaactagaacattgtggaccagaaatcctttaataatgcaagaaataaccatagcatcattgtgagggtaatccttgagttgaaggtcctcttgggagaaggtaattgggatgtgggaccatctcgacttgatgaagggtccctgcaccccgacatgttgtacccttctctgtgcctccttcttctgcttcttgttggccggctctgagcatgaaccgcctgttatcgggagtaccagcttcgtggccgaagcagctctagcttggttgttgaacgaagccatcaactcaaaaagtggaagtgagttcaccagaggtgggcgccaatgttggggtcttattctcaaaaactatgaattaagaacaaggcaacataaaatgttaaatattaatgtccttcatccactgaagcattatctccccaaggatttaatgaacttcggacgaaggccatgagcaagatatcacgaaggtcataccttcgtgattagagttatagaacaatgtaggatgaactataaaaaatatgaaacataagggaatgatatatcaaaaacacataagattattcacatattttattatacaaacctaaatattaaaacataatatttaggtacatttataccttcgccttggcaaaaagtaataattccagcgtaatatgccagcaattacaggattgcgtgaacagtacaggggtactgttcacctatttataggcacagggcgcaacctatgtataattacatttatgccctttacaatcaactataataatgacacagaatatcatgggtctttaggtcatttcatctttaagtcggttcaccccttcgtcttgagacatgtcactgtgccgaagctttataggcgatagcttcggcactgctttttagagaatctgctgaaggtgtttctttctttaggatctcagctacgaagcatacccccaacattgaccgtattaaaaaaattatgaaattcacaagtattattggaaccttgactcgtttggtgtatcgaggtctgcatgcttggccttttagacataatatggatttatccagctcagctttaggctttagcacaacattgtcatctctttcttgtgtctattgatgagttgttattcctctgtcagttaattgtgcatgggtagttttttccaatattattcttctcttgactgttcccttgctaaatttgtactaatatttgatgtgattgcagtg

SEQ ID NO: 895 - DNA, 8691 bp, Zea mays
  Intron number 5 from transcript GRMZM2G173416_T01 (locus G RMZM2G173416) derived from phytozome v7.0 (chr-ID 2; pos 2 00915070 to 200923760 reverse strand)
ctgcaattgcttttttggtttaagcaatcattcaggtcactgaaacactccgatgccttctttctcagtcattacttcaacaaattttgattgtgtgcatgtgtctaatattgcccatatttcagtgaatccttacttctacgtaaccattattttaagaaataagtctactttgcattcctcattcacacaccttagctatcaaaatctgtacgcatagctgcctgatttcaggtgattatggcatccaagtttgaaaagatgttcagcgggcttgccatgtcactgtaactagttaggaacttaaaaaggctgtcttacacatttcattgtcccgtcctaacccccggccaacaccacacacactcttgtgatcgagcaaccacagttttcctccagcaattgagtgaagttgtctttgtccatgctttgattgtgctcactggtttatatctaaagtccacatcttttttgataggataaagtccacatctttcactacacctctacgcacttcactctttttttttcgaaaacgcaggagagctgcgtatcaatatattaagaagaaagggtgaggcaaggaaacctcgtacaactccactcgaacccacaaacactaggctatagggagaaggagagaattaacatcaacaacaacaaaagacatctactcccgtgaccatggagactcaaattaaagaatacccactgaaattactggagcataaggatgttagataaatccctggctccagccctataccagagatgagcctcctccttgacccaattgatgaccatgctttgactaggctgcacaccattaaaaacacagctattgcggtgattccagatggcccaagcaccaataatgatcaaagagttcaagcccttgtgcagccctgtgtttactagaccagcagaaaatgcagcaaccccttcccaccaatcttcaaaggaggagcacgcagggttaggagcaagatgctgcaacccaacagatttcatcatctgaaaccagacagcccgagagaaaacacaggaaaccagcaagtggtttatcgtttcttcctcttgatcacaaagtatacaaaattgagggtgaggcagtcctctttttgctagtcgatctgctgtccagtagcgatcgtgggccacgagccacatgaagaacttgcatttatttggagcccatgatttccaaatccttttccagggtttaaaagttgttgctccaagaaagaaaccggtatatgccgatttggccgaatataaacctgagcttgaaagcctccagctatgcttatcctcctgatctggtgttaagacccagtctgtagcgaggtcccaaaccttgaggaagtcagacaaaacatttacagtgatagctcctctaatatcatggacccaactccttgagatgagggcatcgtggacattcctcattctagccctagaagagaccatctggaccaaatgaggggccagctgacatagactttggccatcaatccaattatctgtccaaaacaaagtgtttctgccgtcgcccaccaccgaggagattgctaccgagaagaaggccttaactgaaggatgagcatttattttaaaggatgcccaaggtctgccagtatcggttttttccagccagagccagcgtaatctaagagcccaattcatcaaacgcagatttaatatacccaatcctccaaattcttttggccttgtaaccttgttccaagctaccaagcaatgtcctcccaaagcttctttcctccctctccacaggaaattccttctgatcttgtcaattgctttgaaaacccaagaaggaaggtccatggccatcattaagtagatattcattgaagacaggacagtctggacaataatcagtcttccagctctagtcaacagatcagctttccagcagggaagacgatctgcaattttatcaatgaatggctgaaagtgttgtctgccgagcttctttaaggatagaggcacctccaaatatttgcaggggaagttggcaacaacgcatggcagcagattatgaatggtatccagattttcagcagtacagtggatggggaaaacgctgctctttgccatattcactttgagcccagctgcctccccaaaaatcctgataatgtccatggtgattactaaatcaagagccaccgggtggaggaaaatcaccacatcatcagcataaatagaaatacggttatgaactgaactttctattagaggcaccatcaaaccatcattagcagcctccttaattaaatagcctagcacatccataaccagtatgaacaacatgggggagagagggtccccctgccgaagacctcgtctatgaataattctcctacctggtttaccattaagcattacttgggaagaggcagaagcaagaagaatgctaacaatatcacaccaaatttgcccgaaacccaaatgctttaagacctccaggaggaagggccacgagacggagtcaaaagctttggtgatatccaacttaaggaggatccttgcacactttttctggtgaaacaactttgctgtctgttgcacaagcatgaaattatccagaatggatctgcctttaataaacgcactttgattctgcgaaaccatattatccaggtgttgggccagcctatttgccaaaagatttgtaataagcttagcaaaggagtggaccaagcttataggccgaaaatctttgacatgacatacatcatcttttttgggtagaagaataatgtatgctgaattgagaagttccagatttccccgatttccgttccaaacagccatagcagctgccataatatctcctttaataatatgccagcacgacttataaaacttcccagtaaaaccatccgggccaggagccctgtttgaaggtagagaaaggactgttttccagacttcatcttccgtgaaagggctgtccagcgaagagagatcatgggaaggaatttggagatgatccaaatcaatagtatgagctcgatcagacgaacaacccagcaacttgtggaaaaaatcacttatagtttcctccttgtcctcatgccttgactttattaaaccatcgtcggataacagattaccaataaaattcttgcccttgcggtatttagcgtggaggtggaagaaggcagtgttagcatccccctcagctaaccaggtaatcctagaacagcttcgagccatagaacgttgcaaggttgaaagggccacaacatgaccatcaagctgcttcaacagccaattttctagcactgacaagggtctgatatcttgagcagactgcagcttgtgcataatttctcgtgccatcccaagctgagaggagatatggcccacccttttttgagaccagctttggagacgcctgacggtggctccaaacttcttggaaagggtttcaaaagggcaaggggaggaaggaacagaattccaagcagcctccactgttgtaataaaatcaggcaattttgtccagtgagattcaaagtgaaatctgttgcgaccatgtgttaaaacctggagcccaaggagcaaagggcaatgatccgaaccgtcggtgctagcactttgcagaaggcaattaggaaacgactgctcccaatctgatgagcaaaacattctgtcaagcttgacgagagtaggcgtatcttggcgattagaccaagtgaatttccgaccatgcagaaccaattcttttaaacccagatcattaataaaccttctgaatctccccataagctgcctgttaaaattgccagagctcttgtcttcatctctgtagatgagattaaaatcccccataagaatccaggggccaggacacacagatctcacatcccgaagttcttgcataaactgaattttgttactgtcgccttgaggtccatacacgcaagtcaaccaccaaggaggatcacttggactaaactgaattgacacgctgtgctgatccacccgagaagcgctggctggaccaatttcattcctccaggccacaagaatcccaccactatttccaactgagggaagacacaacttgtgcacaaaattactcccaagagcagacagggaggcatgcatagaaatttcagccatcttggtttcttggatacacaccacattagcattaaaggagtttaccaaattacgaacagagtcttgccgagctctagagtttaggcctcgtacgttccaacacacaatatttgaaggattcatgataacaaatataagaagatcccgaccaacaggatagaggcatgaacagccgctcaacacaccgccaacccagggggtgtccatccgaaaagggcagcaagggcctggacatgagatggagggaggggctgctcaaaaagcctactataattatccaaggcctcctgactgatgccttcgctttcatcaatcacctgcagcgctctcattattttcttcttaaatttgaattgactatcactgaaggcagactggaattcaacaccaatcccagcaatgcgcctactgcgacgtggaggcacaactggagaaattgggttcccaggcctgacttccagaggagcaggtaaaatgtgggcagctgccttcacgaccttgttactgaaagaggatctgagcctgccaggggaatgcagttccgaagacatggaattaacaacatcacagacattgacattaccactggtaggggcagacttatcagccaatgaatcaagatcatgttgcagactctggtccctcctagaataaaccagaatgggcttgcagtatcgagggcaagagggtccaggaaagatatcaggccgaaccaatggcgcagcagaccccatgcgggagcaattcatcatggccgaacattccaaacgtgaataatccgcagaatccagaccaacatccgaccctgcccccgaggccacagggagtgttggcacaacagctgacaatccctcagcaggaaacgaggtagtcccagacgccaccagctctacaaccgaagcatcagggagagctggcgcatcaaatggtcccaccaacctcgaaaacgagtcatccaccgccattaaggaagaaaccgaggatttagcaggtgccaccaacgcattaatcccaacagcaattgggacaataactggtctgccagccgccgagcataaatggccgcacctcccttgaataggcgcagaagcagatccttgggactccgaacagtcttcatggggataatccgcagcattaacagcgacgagaacagggccagacgctgctggcacaacacccgaagcatccaatagcattgacacattagctggcccctccatcgcaggaaacgaggcaggtccaggcgccgccagccctacaaccgaagtaacagggagagctggcgcatcaactggagcagtcagcgtcggaaacgaggcatcatcagctgggtcaatccgcgtcagaaacgaggcatcaactgccattaaggaagagaccgactggattgcaggcgtcaccagagcagtaaccgcatcagcagggataacgcggccagccgccgagcagtgatggacgcgcggccccaggcgagtgtgaacaggagcgcgatccgatgaagactgggaattgaaacgccgcttttgcagacctctggaattctggtcactttcttcattctgacgctctggatctggtggcgtcggcgaagaatggagaggaggaagcacttccggcgagttcccggggcgggaaataaggattgaaattgggtaaaccaccgtgcgtgggggagacgggtcgtcgccaatcaggaccgaaggctcctccacgtgaagatccaataatgaaggcaggtcttcaggattatcacaccaaacactcaatttgaacgtagacagatcagaaccgccaacagaatcaaggtgcagctcatgaacaaggcaatgtccatcgagaagctgctcggctgtatgcaacccccacatatgaaacggaagtccgcggagctcaatatcaagccgatgaggcagcgtccctcccccattagccatgaattgacgggaccacctcttgatgtgcatccgaagaggaggaacgtagaatgactgacctccactgagccaccgatcagccatctccacgttgggaagcaaggcgatgaaggtgttcggtgcaacccggcgaaggtcgagcgcattaccctcaagatcaaatctcgaagcgagcgcatcggagacctccgcggcacagccagaacgccccatgcccacaacggagatgacaatagcgctctgcaggtcatcctcagcctgggcaatcctcctagaacgtttgaagaagcagcgccgagacgggggagggggcagagaaatggcgcgaacagcctccggtgggggttggggtagcacaacgggagggacgctggtgtccacagcaccagccgcaccaaagggtcttcgtcgtctatgcccccgacgagtacgcctgtgtccactgccgccagagcccgcgccagtgccaccaccagagcatgcgatgttgccaccctcgtggccatcagcaatgcgtcccgagacacccatagaaggcaagacgtgagagacaggccgccacaccttggaacgcagaggtctgggaggtgccgaccgccggcgcgggcacacgtgagcacggtgcccagacagcctgcaggagaagcacctcaccggatgacgacacaccgccgcgcgatgggaggaggagaagcagttgaagcacttcccacgcaggtcgaccgggatgggtctggatggaggcttcaaagggcgaggacgacgccagcgagcacgccgatcaacgaccttcacccagccatcaccggcaacggggtgagggaccaacgaagtggaggaggagacaagcacgtccttataagaaggcagctccccaggttggtcaccaccatcatcgcgccatcgttgagccttggaacggccagcaggccacgacgctggagagggagagaaggatcccgacgccggggaggtgttggctgtggccgccgggcctggagtaggcgtcggcgtggggctttgggtggtttgggcgccggggggagggggtggaggagggcaggggggcgggggcatcttaccatcccttggaattgataatgtaccacgcacttcactctagcgggccatcctgctgctgtattgagcatgagctgctactgcatacacacggtatacagcttgtgcagtactgcagtcacaggccaggtggtataaaagtagtgaggatgttagctaaggtggctagtcaaatcaaattgtcattgtccatgctttgattgtgctcactgactgatatctaaagtccacatctttcactacacctctatgcacttcactctcagccggccatccttctgctgtatttattatgagctgctactgcatacgcacggtatacagcttgtgcagtcacagaccaggtggtataaaagtagtgaggatgttagctaatgtggctagtcaaatcaaattatcatcagcgttactcgaaacaacaaatccgcatcaatagaacctatacatgaacatgagtatgagctaggtttaatgaaaaatccttgttaagcgaaaaatagtttttcaagtgagagccattactgacaagatggttcggttctcactcatttcgtcggttcagggattaaggtgccaagttggatgattcatatttgtggactaaaattgaacatcttatttttggtagttgaggggtaaaatggacttaatcccaccttgcacctagggctgatgagcattcgtttgaggattggtggaatagggccagcaagtgcatatggaaagaaaagagaaaagggatcaacatcatcatcattttgggggcttggtgcctttggctgcagaggaatagaacggttttttatggggatctcccctccattcagaaggtgcagcagcagttcagtgatgaactcgcttattggcttttggcgggcgccaggggtttgggtcagcttggccttcctaacttcatgagtagtgttggatctagtccttttactcttctgtaatctctttcttttgtttgggtgtgtatcccggttgtaagtcttttttctctctctctctctaatataaagatgtgcagctttcctgcgcgtttaagaaaaaaaatggacttaatcctttattctatattattcactaaagtactcttagtccttgcggattgcgctactaagtttttttttgtataactaaattgtaaattttcagatgatggggactcgatcttgcaagcatgctaaattatgtaatgaagcatgtacttgtaactgcaaaacacatttcagacatgaataggaacttttaatgcagtataatattgatactgtaaaaaattaaacaatcacaaggagtgccactatttttatatcatattccaatcttattgatttggaacatgctgtcacactagtttgaattaacaactttggacattattatggtgttctttgtaatgtcttgctgcgaacctttgcgtattttttatgttgcttaacttgcagtttatgtatgtgatagaacagtctgcagcagtgctcacatcttccatgtgtatttgtttttgcag

SEQ ID NO: 896 - DNA, 5706 bp, Zea mays
  Intron number 2 from transcript GRMZM2G124288_T01 (locus G RMZM2G124288) derived from phytozome v7.0 (chr-ID 9; pos 4 833961 to 4839666)
tccaaggagcatttagtgggaagttccctgcacaggtaattctgctcttccatttcatagattcatttgcactgaattcagtagtcaggcgatgtattttgttttgagctgctgtacgtgtgagaataggattcacacatggtttcagtgtgctaaagaacagtggacatgggtggatatgttgttctgctggggctatgacatctatgcattataggtattggtcaatttatttagttttaaacctgtgctggtaaagctttagaaatgacagtagtaagaagtgtttatccttattagaaaaaatggtgttttaaaatgtcatagatggattccactatttattaaaaatagtatgttgctatgcactcatgtcaatatacattgagaaaatttgttgcgtgcttggtatagaggtgtcaacggggaattctccatcgggtttggataccccatccccatacccgtcatgggtataagattcatcccgtatccatcctcatcccaattcaggtatcgggtctccaatggatccccatccccggcaagaaaagcatggtcacattatattttatatgacattaacaaccacacgacacccaacaacaatacgtaacaaatagggctgggcattcggtagaatcgagcacttcggttcggtttcttgggtggaagggaagttcggttttggataaactgcaaaccgatcggtgtaaacaaaactaagaaactgatgattttcgatgtctgtttattaggttcggtgtccaccgaactccgatgctcctcgccatctgagcgacttgcacgcgcagtgcgccatcgcccgaccgtggcctataaacatgttgacttctttggttgtaagagcgttggcccgttgggctgaaatagccaatggcccatgtggtctatggacacatacagaaatgtaagagcgttgactcgttcggctcttttggtagttcagtgcatggagtcctagaatcgaagccgatgttgacagccggttttcacaaaaccaaaaaccgaagccgaaactgaataccgaaaaaaccgagatttcagttcggttcacgattttcggtgcaaaagtgcccacccctagtaacaaataaatctgtcatgtaacaagcaaaacattgtttagccatacaaaacagtaaaaacaaagtgacacgttctagaaatagtaacttaattaatcccaacacatacatgtttttgaactcatgcagagtatgaaaaatgaaaatgttctagaaatagtaacttaattaatcccaacaaatacatgtttttgaactcaagcagagtatggaagataaaaacttgcatctctcaaggtggcaaactggtcggcggggcggctgacgactaatcgcttgggttgacgagtgcttaaaagggttgggagaggtagggttagttgttgggcttactgtctattaggcagcacacctaattttaccagatgaatatttacccatgggtaattgggtttggattctgcttcccaaacccatacccaccatacccagtgggggaagaatttcccccaaatctgtacccatggggattaaaatctccctacaccctaaccctaatagagaattcccgttagatttacgggtatcgggtccccatcgacacctctagcctggtatatgtagttaaaggggttaattgtggttctgcctgtccattatcaaataatgcttcgttctgccaatccgagggcaacatttaaaaaggacaacagtacaacacacacacatacgtgtgtgtgtgtgtgtgtgtggaaaaaagcctccccttttttaaatttagtgtccctgtacattactctagaccgttagggttttgaatcgagaattaagcaaggactttattgctttgctgtttccaacaggtgaactttcgtatcttttatgctttagcttttttgcattagatcaaaatgctcttggtttgtagagatagatattttgtgctattcttttacttcatttgatgaagtttcttctctctctagcttttctcattatcttttattgtacaaaaaatagaaggctatcatattcaaggttattaaaacgataaaacgttggaacgctcatgggtgaaattttgacttttaaacgtttaaactttgtttaaacgtagttttaaacaacataggaaaataccaatacatcataatttcagacaataatatgtagttaaataccaaaacaaagaggttactggcttaccaaaacttcacccatgagttggattgaaccccaaaagtaactaatagactgggcccaaaagtagctaatggtctaaaatgcataaaacactgcgttttacagtttagaacgccaaaacgctaaaacgtggtttcaacctctaattagagttttgacgtttaaacgtagttttaataacactgatcatattttttgcaatcttttaagcctttttggataattgaacccaatatgagctagcccaccttcattcttctttttggttattttaacttcttaccagtggtaacatcatgtgaattaatgtatttttattgtctgtagatgcaagtatacaacaacttttagcattgatgtatctcattttaaacatgttaggacctttctgtttattaacatcattgccttatgctgatagacatgagcctggtgatgctttttttgagttcatgtgttatcctagtctagtatgatgcatatgcccttgcgagcaacttataaagatggatcgatttgtacctggtgtaaactcatttttggggcttagtaaggggtcttttataggtatttggtgccaactcatatctaggtcattttggtaaggcaacaaattccttataaggttgtggccatcaggtcgtgcatatggtcgtgcaaaaaactgttttgcactgtagattgcactatttacaaagtagagtttgaaataagagacgggatgagaaagattgccggagatagcctaacaaggcctcagaaattagctacctttcaaatatgattccaatgttcatgcgaaactagcatctttaggctatctccagcatagagcgcaaatgggcttgcatgcgtttttttcgcactcacgttcaacgattcacccttctagcagagtgtggatgtgaggacccgcaaaatgagcgctcatcctcccctacctcaaatctatgggtttatctctccgatgttctatatgcgcatacacatgcgcgctctgctagaagtgtccctctttttttgcgccctcaaattcaccttctggacgactactttgcgcatgcgcatgcagtcgctactagggatagccttggtgacatcaaccactagtaatgtttgcggacattggaatgtagttgttggtgaacacaacattgttagcatcaagatcctaggtagggtgtatgatagtgttaggaatagtcccacattgtgtggtgagggtgagaaagcatgctttataaggttgagggtgcaacccataaaaagctagctttttggggagtgttggcccaagagacctaaagcctgctgctatacgtgcgggcgcgtgtgtcgcggcccaacagcctgggtgggcgcgccgtgtgtgcgggcggccccgacggacacgccatgtgtcggcggtccggttccaacaattggtatcagagccaggttgacccagtgcattctcagacaaatctcggctcacaatgtgtgagggggagattgttaggaatagtcccacattgtgtggtgagagtgagaaagtatggtttataaggttgagggtgcaacccctaataggctagctttttggggagtgttggcccaagagacctaaagactgctgctatacgtgcgggcgcgtgtgtcgtggcccgacagcctgggtgggcgcgccgtgtgtgcgggcggccccgacggacacgccatgtgtcggcggtccggttccaactgatagtggtagaattgaatatgttgggatatggtagttgagttggtatgttatatagttgaatgctaggaattctttaatactaactgtgtttttggtaatttgtcccataatatttttcaattttgcttgaatatgaaaagctcatttttagcttggttgcttttaactagattttagactcaatttttcagattttgatgtcatgtctacatggttacttcttactcaattcaaattggaactcttttttagtttgagaaccattatgtagtatttagttgtttttacataataatgattgttccaactttttttgcattcctaattcgatgattcaaaggttgccatgagtaatattgtgtaaagcagaccaaagatttttcaagttttagtacgccctcgacatcctggagtgggctggcatgtctggctgcaaggcctactccacgcctgtcgacactcacgcgaagctctctgaagacgacgggccctcggtcgccgacgcgatggcctactggagcctcaccgacgctctctagtatctgaccttctctaggcccgacattgcctacgccgtctagctagtgtgccttcacatgcacacccacgagagccccatctcaacgctctcaagcagatcctttgctacctccgtgcctccatcgactacaacctactactttgatcctcccaaacgtcggagctcgtggtctacattgacgctgactgggctgtcttcctcgacacgcgccggtccacctttacttatgccgtgttcctgggcgccaacctcgtcttttgggccgctaagcggcagcccgtcgtctctcactacttggttcacagtcttgtatactatagagtatagaacctcaccttgtgttggaatggggcggtggttggatttggacaacttgagtgaattttggcttgaggccacagcaaactcggagaaacttgttggcttgcttgtcttgacaagtcaaagttaggagacaaaggttggttatgtgcatgacataagtttaatcaatgggtatcaaggggaatttgaagggcgtacccagtgccgtaggcttcccgcactgtgcggggtctggggaagggtatctttaagcgccaagccttacccgcataatatgcaaaggctggggctcgaacccgggaccttccggttacagacggtaggctctaccgctgcaccaggcccgcccttctatcaaggggaatttgaaaatgcctaaaatttacaattgctagactgtaaggaattgagatgtaggtgagttttgaaagcacacctaacttgcaattggggttttcaatccttagatatttattggcatttagctgacttcattaacacaaagctatagacattttgacgcagaattggatgcttggctgttgcatctctaaattttcccttttggagtttccatgatcaagagcaatgttgcccccactttggcctgcttcagcttttgtaaaagccaactcatagggtttcttagttcaatcctatcttctgcttcccggcaatattgcagatagtcgtagtatttagcagtacttgctcttttgcatatggagaagataaagcggaagatgttctaaggaggcctccttaaaagatgtttctgttgaatattcatcattactcttgtattaaaactatgttatatgtgttatgcaggttaagtttaagattgataaagattgccgtcctct

SEQ ID NO: 897 - DNA, 562 bp, Zea mays
  Intron number 15 from transcript GRMZM2G427337_T02 (locus GRMZM2G427337) derived from phytozome v7.0 (chr-ID 6; pos 144125274 to 144125835)
ctcggctgcggcaactcccgtacgtctcccttcagtactcacgagctgctgttatttgcatactgtaagcctgtagctactacgttcgccatgcttcatggcggagctagagtctgcagcttggtgttgcagatttgcggttccccacacgggtcccgaaatatccggctgctattgcgtttcaaagtggcaatcgtagtcgtagacatgcgcaccttttagatccgccaattaatttgaaagcttattggcgagcagctcagagagtctgttagcaccgagcctacatacataactatacccttcatccgttatggtataccaatgtaagcctatgctcagtgctcccttgacaccccttcttccatgaattttatttatcgattcttgttggttggctatggactgtggtaagcaatgtgtgcttaaaattgacactgaagttattctgtaatttggctgctgaagattattatttttgctatttcgtgcactgacaatcaactccatggtgctacctgatattgttcttatcttgatttggtcagttttgtcggaggat

SEQ ID NO: 898 - DNA, 21751 bp, Zea mays
  Intron number 1 from transcript GRMZM2G049372_T01 (locus G RMZM2G049372) derived from phytozome v7.0 (chr-ID 5; pos 1 76007906 to 176029656)
cggccttctacttggatacgacatcagtgttacaggtcagtctctccctgtacctgtacgtatgctgaaggagtgaagttgcatggactgtgtcccgtaattacactacactcttgatgctcggtacaacttgtttcttgtctagccgcaagcctgccacaatggtttgtgagccgtgtttatatgttaaacttcgatgtgctcatatacttagatcgttaaatcactaagagatcgcttggatgctcatatattaatatctattagtcttgaattaagataattgcatgggtatttaaacagtggatattaacatccaaacaaggcctaagacattatttgatgtccatatattcatatcaatctatatatggtgggggcgttttagggtaaattttagttcaaattttactctaaactatataggaaacatatcatgtgcaatcgaaccaattagtgcaaccatacaaccaagacatagtgatgaaggtgggatggcctgtttaaagtatcatttttcaaaacaactctcccactcttcctatatatttttaaacaggctttcctatctctatccttctgtcttggttgcacacattggttgcaccggttgcgccaaataatttggttgcacctgatgcgttcccaactatgtaggaacaaagttttttttagtattgaagcaatactgcagtattgaacaatatattatatattttgaggtgtttgggaactcatttttcttgacagtgttccaatgcttacagttttcttatccatagtcaacactgcacggtatacatgatgtatgcgtaccattacaagatgtgcagctacatacatctcacgttaaacaaagcaactccggctcataagtcgttgtcttacggtaccgtgtgtccatttcagatgatgcatggtacctctaaacaattccgcaacgttattgtaccagatggcaaagtcgctctaacagatttcaatcagaattcataaaaaagggataatatacaaacacaagaactaaaattttgattggtatagtgctactcctgtcatatgctttccgagaatgtaagcgagttataagacccattgtctttcactctagactttattcgtatagtagagtttaaatataaagattatgatgggtaaacttctgaagatagcctaactctatcatgacggataacattttgcaaaacaattgtgttgggggccttcgtcctccgaaggtcctcaaaaacatgatttgacaatatcttccaagtgaaatgtatgaacagatatcttcggacccagattgtgaacatgaagtacgatcaggacgaagcttaagctagacgaaggaagattgagatgaaggacgggctgatcaccaagccgtacgagggatggtgcatagccgaagctatgcgcaggggagcttcggcatagtggcagaaaggggaaccgacttaaagatgaaaagactacttaggctttgacagatcctcataagtcattagcaaatgtagtggacatgaatgtaattttacatgggctgcgtcccacgtctataaatagatgaacagtactcccgtactgtacacactgactgggcatttgcttttgcgtcacatttgtattttcatctccttccaagccgaaggtacatttgtaattcaatattgtctctatttttctatgatgatataaaaaagctaaattgatgatgttatatgattattcatgctatcttttatgtttcatatgcttcgtctttcattaatgtatactgtgatgatgaaggttcgtccttcatgaccttcgtctgaagatcgttatatcctaagggaaataatgcttcaaaggacgaaggattttatcgtttaacattctctgtgttgccttgttcttaactcatagcacttgagaacaagtccccaacattggcgcccacctccggtgaactcacttccacttcgagttttttgaacaccttcggaagccatagaccctcgctatggcaccgaagaaagcttcagcgactggggctgcagctctgcaaccgctggaccctaaccaggaaactgtctctcttcgggaggcccgaagccagaagaggaaggccgtcagcccgacgcttcaggaggatgagctagaccaagaaatcagggatatggagatgctacatcaacaggtgcagaggaagaaggagaagatggcccgactagctgagttgcaaaggcagatagacgaagcctctgaggaagttcgccatctttctcacgatgagcagaaccgaaggcctcagcagaaagaccttcatcaggagggcttcgtcaacgaagatgactggtatgacaatttccatcagggaaattttgttttcgatgatgcttctcctctgtccgccgaactgcaggctacaccttggcccccgtcctataagccaccccaacttcccatctttgacggccattcagacccgaagcagttcttgatgagctacgaagcaacagtgtcttcgtatggtggcaatgctgcagtcatggcaaaatcttttgttatggctgtcaggagtgttgctcagacctggtattcctctcttcgaccaggaacaatcacttcatggcagaagctgaaggatatgttgttaaccagctttcaagggtttcagacgaagccggtcactgctcaagccttgttccagtgcactcaggatcatgaagaataccttcaggcgtatgtcagaaggttcttgcgtttgagggcgcaggcaccaacggtgcccaatgaaattgtcatcgaggccatgatcaaggggcttcgtcctggacctgcagctcaatattttgctaggaagccccctcagactctggagaagctgctccaaaagatggacgagtacattcgtgccgacaatgattttcgccaaagaagggaggaggctttcagattttctgagttgaccaggggcttcggaggaagattctatccgaggcatgtcaggtccatccataactctactcaaaatgatgataaggggaaacagcagcacaggccgcagccctcctcacaggcttcggggcaacaacaaagcttcttccggccaccagctccaagaggaagaggcgccaggggctttggcggaagatttggagatcaaccaaggagaatattttgcttgttttgcggtgaaaacaagggccataccaccaggatgtgtcatgttaccatccaaaagcaaaaggagatagccgaagctgcagcacaacaagctcagccgaagcaggtcatgcatactgcttcgtgccatgtgccttacatcccagaatacgtaggtaaccaccctgcaatttctgttgcttcggcaagtcaacctcaagcttcctggcaacaacctccacctccaccaccgctgcaacaaggccaacagccagaagggagccaatatgctccacaccaaagggacttcagagagcagtccgaagctcgtacagtcaacagcaccgtgccggagtcaaagcacatttattgacaagtatcctaccttgatagcagtcttttccatttagttctatttcctgtataataaagaacatttcgattttcatgtaatggttttgtggttggtcataagggaaatctattttctccgaaggcttaagttgctgaagcttgaaagtttgcggaggaccttcgaattattaaaaatccttcgaagtaacaaaaagacgttccaaagggagcgcagtgtaagttttttgctccaaagacgttcctaagggaatgcagagcttataccgcctaagtaaaaggcgaagaagctccaaagacgttcctaagggaatgcagagcttataccgcctaagtaaaaggcgaagaagctccaaagacgttcctaagggaatgcagagcttataccgcctaagtaaaaggcgaagaagctccaaagacgttcctaagggaatgcagagcttacagcgaagaatcagcgctgatacaaaaatattgtgtggagatatgtgtgtatctttcggaacaaatgtcatctacgtaacataacatcatcacatcattttgcatagcataagcatcatacatcatgttgcatatggcacaagaaggggacacaatattgatcttcggaagtatgctttgaaaagagtgaaaatcgtgttaagtcacaaggagacacaatcttcatcttcggagtatagcttcggagaatgttttcacgaagcttggatattcttcatctgagcactatggacattgttgtgatacataaaaatttttcttcacgaagcatgaaaagaagggaaggtgttttttcgccgaaggctcaaaagcggtacgtatgtaaagtttcatgcatcgtaaagaattgaataatgaacagagacttgtatattacattcaaatgtaccaaatattacataaatcacacttcaactgtttttcctaataacacctagtcttctcttaatactacttcggcagcctcatttagaagctgttcaacaactttatccacgatagtttcggtcatttgtttaatttcgtcatccccttttgtgtgaaggtcaacaaacgatccagcaggttctgagggaagagaatatttttgcattactattacaaaccgcgaacaaagtttgaaataaaaattacaacacgatacaaactattaattaatacctaattgaccttcgggctctgcgctcttttcagcagccttagccacttctctagcatcgtgaatgcccttttcacttctttgaataatttctcctgccatttcccggccaccattatcccagacgtcggtgaaaaattttccaccaacttggctagcttcggtcgaggggtctttaatatcttcagcggataaagtggcttcggattgcgcaagcagcttaatatgatcacaacctttcttctctagaatagtagcaactcctctggcgcctgaaaatgcgcagatatcaccgcggctgctcaggatttcctcgaaagcttctgcttcatgactaatccattccaatggaccttcgggattgcctctggagaaactttcttcactagaaaatgcgccaacgctggcgaagctggattttatctttttgacgcattctatagatttaacatagcatttcctctgggatgcacgaagctcctgagtacttaactctaaatgattaaccaactgatcactaagctctcgttttgtttcttcaagcacacgttcctctttagctctagctagctgtttctgaagatctttaatctcacgtttttgggcttcggcctggatctttgaggcagcttcgtcctttttaaccttgtctaccaatgtaagcaaaattttatccttttccagagcttcgtttctcagtttaataacttctgaccgaaggttgttgaacgcaatttcatagctctcatcttcggcactcttttgtgctcttaatgcgttgcttaggattaagccctatgtgtaaagacttggtataagaataaaagaatgaattacgtattgtaaaattttttcaaaacgactaattcccatacctttaggctgttatacgcaagactgtccgcgagatcctccttcgtcatagcacataatccagcttcgagcttcgggaaccccatacttctagccatctctcggcaaacagataattctttgttatcagggaggcagtataggaagtcatcctcatttgtcccattgaacaccactgctccctttggatattttaactctctggcatagtgattggcttcataagtctcttcttcagataattttttccccgaagcatgtcgtatgatatagttgaaagggaaatgtgcccttgggccatttctaagtattttggtgattaagtgcaaacacaggtgccaaaatgtgaaaatatgcccatggatgaacaaagtgcaaatcacaattaaaggtatgtttctaagccttagtacattggttttgtgtactaatatcttgtccaagtgttagaaacaggaagaagaagaaaagaaaggaagtggagagtgtaaagccaaaggctgcttcgggctggggcaccggactgtccggtgtgcaccggacagtgtccggtgcgccagaccagcgcagcgcaaaccagccgctctcgggtttttctccggcgacttcggctaaaattcaccggactgtccggtgtacaccggactgtccggtgagccaacggtcggccgggccaacggtcggccgcgtgatcggcgcgcgacacgtggccgagccaacggtcggaaggaggcaccggactgtccggtgtgcaccggactgtccggtgcgccagatctgcaacggtcggcaacggtcggctgcgctgtttatggaaataaatcgggcaccggacagtgtccggtgtgcaccggactgtccggtgctcccgacgacagaaggcaaggatagccttccagatgtgttctcaacggctcctagctgccttggggctataaaagggacccctaggcgcatggaggagaacaccaagcattccttgagcactcttgatcactcacacatcaatctcgcgcacttgttcgacattctagtgatttgagctccgttctagtgtgctagtcttttgagctcaagtctgggtcttgtgtgtgcgtattcgctgtgatctttgtgtcgtgtgtgagttgctaatccctcccttgctctgtgattctctgtgaacatcttttgtaagggcgagaggctccaagttgtggagattcctcgcaaacgggattgagaaaagaaaagcaagaacaccgtggtattcaagttgatcatcggatcacttgagaggagttgagtgcaactctcgtccgttgggacgccacaacgtggagtaggcaagttttgtacttggccgaaccacgggataaccaccgtgtcatctctgtgattgatttcttgtggttattgtgttttgactcctctctagccacttggccataattgtgctaacacttaacaagtttttgtggcttaagttttgaagttttacaggatcacctattcaccccccccccctctaggtgctctcaattggtatcagaggcgttctcttcaagaaagggactaaccgcccgaagagatggatcctaaggggaaaggaatcgtgatcaacgataaggagaaggagtccttcgtcaatgagcccaaagatgacaagcctaccgactccggctcgggtcataaacgaaaggaagggaagaagaagaagacgaggcgcatcaaggagatcgtctactacgacgacagtgatgagtctacatcttcccaaaaggacaacgaccacaacgactacgagcaaaggaaaccggttaattctaacttttcttttgactactctcgtattccgcaaagttcaaattcacatttgctttccattccactcggcaagcccccacactttgatggggaggactacggattttggagccacaaaatgcgtagtcacctattctctctccatcctagcatatgggagattgtagatagtggaatgcactttaatagttcggatagtcctatattcattaatgagcaaatccataagaatgcacaagctactattgttcttctagcctcattgtgcagggatgaatataataaagtgagtggcttggataacgccaagcaaatctgggataccctcaagatctctcatgagggaaatgacgctaccttgctcaccaaaatggagttggtggagggcgagcttggacggttcgcaatgataaggggcgaggagccaactcaaacatacaaccggctcaagacccttatcaacaaaataaggagctacggaagcacacgatggacggaccacgacgtcgtccgactaatgctaaggtcctttaccgttcttgatcctcatttggtaaataatattcgtgagaatcctaggtacaccaaaatgtcgcccgaagaagtctcaggaaaattcgtcagcgggcgaatgatgatcaaggaggcaaggtacgtggacgacgccttgaatggaccgatcaacgaaccacaaccttttgctctcaaagctacaagaagcaaggaggagctacctagcaaggtggcacaaattgaggcggtcggacttaatgatgaggagatggctctcatcatcaaacgcttcaagacggtgctaaagggtcacaaggggcagccaagcaagaccaagacaaaggggaagcgctcatgcttcaagtgcggtaagattggtcattttatcgctaactgccccgataatgatagtgaccaggaaaagggaaacaagagggaaaagaagaagcattacaagaaggcaaagggcgaggcgcatctaggcaaggagtgggactcggattgctcctcttccgattccgacaatgaaggacttgccgccaccgccttcaacaaatcagccctcttccccaacgagcgtcacacatgccttatggcaagagagaagaaggtatgtactcgcaactctacctatgcttcttcaagtgagaacgaatctagtgatgagtatgaagtagattattcatgtttgttcaagggcttagatagatctaagatagacaaaattaatgaattaattgatgccttgaatgaaaagaatatacttttagaaaagcaagaggatttgttgtatgaagaacatgataagtttgtagaggctcaaaaatcccttgcattagaaattaagaggaatgaaatgcttgcttgtgaagtgtcaacatgccatgattcaatttctaaattaaaaagcattaatgatgacttaaatgctaaactagtagaagcacataaatccaactcttgtgttgaacatgttgaaatttgcactaggtgtaaggatgttgatattaatgcttgtagtgaacacttagtttcaatttcaaaactaaatgatgaagtggctagtctcaatgctcaacttaagactagcaaaagtgattttgaaaaactaaaatttgctagggatgcctacacggttggtagacacccctcaattaaggatggacttggcttcaagagggaagccaagaacttaacaagccataaggctcccattcccgccaaggagaaagggaaggcccctatggctaccagtgctaaaaggaaccatgcctttttgtatcatgatagaagacaaactagaaatgtaaatagaagttatgatgcttttgattcatatgtttatgattctcatgccatgtttgctcctagttcttcttatgtgtatgatagaaatgttactaggagaaatgttgttcctaaaagaaatgttgcaaatgttcatagaaaagtagtgaatggaccctctacaatttattgtgctttgaatgcttcctttgcaatttgtagaaaggatagaaaagtaattgctaggaagttaggggcaaaatgcaaaggtgataaaacttgcatttgggtccctaaggaaattgtgactaaccttgtaggacccaacaagagttgggtacctaagtcccaagcctaaatttgccttgcaggtttatgcatccgggggttcaagctggattatcgacagcggatgcacaaaccatatgacgggggagaagaaaatgttcacctcctacgtcaagaataaggattcccaagattcaattatattcggtgatgggaatcaaggcaaggtaaaagggttaggtaaaattgcgatttctaatgagcattctatctctaatgtatttttagtagagagtcttggatataatttgctatctatgagtcaattatgcaatatgggatataactgtctatttacaaatgtagatgtgtctgtctttagaagaagtgatggttcactagcttttaagggtgtattagacggcaaactttatttagtagattttgcaaaagaagaagccggtctagatgcatgcttaatagctaagactagcatgggctggctgtggcatcgccgcttagcacatgtggggatgaagaaccttcacaagcttctaaagggagaacacgtgataggtctaactaatgttcaattcgaaaaagatagaccttgtgcagcttgtcaagcagggaaacaggtgggaggctctcatcacaccaaaaatgtgatgacgacatcaagacccttggagatgctgcatatggacctttttggacccgtcgcctatctgagcataggaggaagtaagtatggtttagttattgttgatgacttttcccgcttcacttgggtgctctttttgcaggaaaagtccgaaacccaagggactctcaaacgcttcctcaggagagctcaaaatgagtttgagctcaaagtgaagaagataaggagcgacaacggatccgagttcaagaaccttcaagtggaggagttccttgaagaggaagggatcaagcacgagttctccgctccctacacaccacagcaaaaatggtgtggtagagaggaagaacaggacgctcatcgatatggcgaggacgatgctaggagagttcaagacccccgagtgcttttggacggaagccgttaacactgcttgccacgccatcaacagggtctaccttcatcgcctcctcaagaagacttcgtatgagcttctaaccggtaacaaacccaatgtatcttactttcgtgtatttgggagcaagtgctacattctagtgaaaaagggtagaaattctaagtttgctcccaaagctgtagaagggtttttattaggttatgactcaaatacaaaggcgtatagagtcttcaacaaatcatcgggtttggttgaagtctctagcgacgttgtatttgatgagactaatggctctccaagagagcaagttggtgattgtgatgatgtagatgaagaagatgttccgacggctgctatacgaaccatggcgattggagaagtgcggccacaggaacaaggtgaacgagatcaaccatcttcctcaactatggtgctacccccaactcaagacgatgaacaggttcatcaacaggaggcagatgatcaagggggagcacaagatgatcatgtgatggaggaagaagcgcaaccggcacctccaacccaagttcgagcgacgatccaaagggatcatcccgtcgaccaaattctgggtgacattagcaagggagtaactactcggtctcgattagttaatttttgtgaacattactcttttgtctcttctattgagcctttcagggtagaagaggccttgctagatccggactgggtgttggccatgcaagaggagctaaacaacttcaagcgcaatgaagtttggacactggtgcctcgtcccaagcaaaatgttgtgggaaccaagtgggtgttccgcaacaaacaggacgagcacggggtggtgacgagaaacaaggctcgacttgtggcaaaaggttatgcccaagtcgcaggtttggatttcgaggagacttttgctcctgtggctaggctagagtccattcgtatcttgctagcatatgccgctcaccattctttcaggttgtaccaaatggatgtgaagagcgctttcctcaatgggccaatcaaggaggaggtgtacgtagagcaaccccctggctttgaggatgaacggtaccccgaccatgtgtgtaagctctctaaggcgctctatggacttaagcaagccccaagagcatggtatgaatgccttagagatttcttaattgttaatgcgttcaaggttgggaaagtcgatccaactctttttacaaagacatgtgatggtgatttgttcgtgtgccaaatttatgtcgacgacataatctttggttcaactaaccaaaagtcttgtgaagagtttagcagggtgatgacgcagaaattcgagatgtcgatgatgggtgagttgaactacttccttgggttccaagtgaagcaactcaaggacggcaccttcatctcccaaacgaagtacacgcaagatctgctaaagcggtttgggatgaaggacgccaagcccgcaaagactccgatggggaccgacggacacaccgacctcaacaaaggaggtaagtccgttgatcaaaaagcataccggtcaatgataggttccttgctttacttatgtgctagtagactggatattatgcttagcgtatgcatgtgtgctagatttcaatccgatcctaaggagtgtcacttagtcgcggtgaagcgaattcttagatatttggttgctacgccttgcttcgggctctggtatccaaaggggtctacctttgacttagttggatactcagactccgactatgctggatgtaaggtcgataggaagagtacatcggggacgtgccaattcttaggaaggtccctggtgtcatggaactctaagaaacaaacctccgttgccctatccaccgctgaggccgagtatgttgccgcaggacagtgttgcgcgcaactactttggatgaggcaaaccctcagggactttggctacaatctgagcaaagtcccactcctatgtgataatgagagtgctatccgcatggcggaaaatcctgttgaacacagccgcacaaagcacatagacatccggcatcactttttgagagaccaccagcaaaagggagatatcgaagtgtttcatgttagcaccgagaaccagctagccgatatctttaccaagcctctagatgagaagaccttttgcaggctgcgtagtgagctaaatgtcttagattcgcggaacttggattgaattgtagcatacatgtgtttatgcccttgatcatgttcattctgcattttgttgcttattgtggtgctcaagttgtacaaacactccctggatctcacaagtccattgcaaagtgatgcacatgtttagggggagatgtgttacaacttgaccctttgagactaaccatatgcttgagtttgcttgatctagtctcgaaggagaattgaaagggaaaaggtggacttggaccatgaaagacttccactgcactccgatgagagggtaattacttccaagttcatctcatgaactcttattgccatttgctcttaattgaaaattttggtgaggcaatggggttccagggccaagattgatcccgttttggtgcttgatgccaaagggggagaaaataaaggcaaaagtgataaatggatcagctaccacttgagagattttgaaaatagtagaatagagtttttgtgaatttttgttttgtcagtagaatagagtttttgtgaatttttgttttgtcaaaagcttttattgtctctattgtcaaaagtgggcttcgtgtggggagaagtgttgattatgggaaatagggggagtttttgaaatccttgatcaatctcttttggaatgactctctttatgcttcaacatgtgtgtttgacttagagatagagatttgagtttgatttgcaaaaacaaaccaagtggtggcaaaggatgatccatatatgccaaaattgaatcaaaatcaatttgagttttatttgaagtgaatttgcacttgttctagttgctttatgttgtgttggcataaatcaccaaaaagggggagattgaaagggaaatgtgcccttgggccatttctaagtattttggtgattaagtgcaaacacaggtgccaaaatgtgaaaatatgcccatggatgaacaaagtgcaaatcacaattaaaggtatgtttctaagccttagtacattggttttgtgtactaatatcttgtccaagtgttagaaacaggaagaagaagaaaagaaaggaagtggagagtgtaaagccaaaggctgcttcgggctggggcaccggactgtccggtgtgcaccggacagtgtccggtgcgccagaccagcgcagcgcaaaccagccgctctcgggtttttctccggcgacttcggctaaaattcaccggactgtccggtgtacaccggactgtccggtgagccaacggtcggccgggccaacggtcggccgcgtgatcggcgcgcgacacgtggccgagccaacggtcggaaggaggcaccggactgtccggtgtgcaccggactgtccggtgcgccagatctgcaacggtcggcaacggtcggctgcgctgtttatggaaataaatcgggcaccggacagtgtctggtgtgcaccggacagtgtccggtgtgcaccggactgtccggtgctcccgacgacagaaggcaaggatagccttccagatgtgttctcaacggctcctagctgccttggggctataaaagggacccctaggcgcatggaggagaacaccaagcattccttgagcactcttgatcactcacacatcaatctcgcgcacttgttcgacattctagtgatttgagctccgttctagtgtgctagtcttttgagctcaagtctgggtcttgtgtgtgcgtattcgccgtgatctttgtgtcgtgtgtgagttgctaatccctcccttgctctgtgattctctgtgaacatcttttgtaagggcgagaggctccaagttgtggagattcctcgcaaacgggattgagaaaagaaaagcaagaacaccgtggtattcaagttgatcatcggatcacttgagaggagttgagtgcaactctcgtccgttgggacgccacaacgtggagtaggcaagttttgtacttggtcgaaccacgggataaccaccgtgtcatctctgtgattgatttcttgtggttattgtgttttgactcctctctagccacttggccataattgtgctaacacttaacaagtttttgtggcttaagttttgaagttttacaggatcacctattcacccccccccctctaggtgctctcaatagtcgcatgtgctggcaggagcttcggggacggcagtgtcaatcttctcaaccaaaactggttctgatgttttttcggtttccaaagattgttccttggtgggctctgaaggcccagcttcagctttagcttcagcttcagcttgttgcttcgaagtttcggtagacgcttcagcaagttcgacagtcttctttggagttgtgcttgaagacataattgtctccaagacatctagtacgttcaccattctttttctttttggggtcatcaatgggcccttttggatttttcctgtttcagcattcgctgaaggacttaagatttccaatactttttgtccttcaattctcgatttttccgccttctctgctaaaggcgcttcagatttctcttctatcttcggcactggagctggttctgtagtttcagaggccaaggaaacttcaccaatgaattctggcactgtggccggctcaataaagcgcgctcggtgggtgagcaccttcatctttttcctttgcggcgctggctcattagtggcacttgtggtagtttctgttgcagaagaagtattctttcttttgcgacccaacaccggatagtgatagtcagggtagacaaacccgactgcgtcaaatacccggttgagtcttttcttctttcggcctccgaaggctgctgataatgcagtgttctcggccttcgaatatgccccaagcagttcgtcacttaatgtttcaatgcttttcaaccagtcgtcatcaggttcaacaaatttatccccgtatttgaatgtgtattttagtctgaccagtccgccttcgtcggactctttgatggtctccttcggcatttcccactttcctgcaagtggccacaccctgaaggcaatatattcttgaatcaagtcccttgtcccaataaaagagcagactacgccgaaggctctttggcattcctcggctgcttcatccatttcaaccttcggccttcgaagtccgaaacgttgccagatggggcgcataatgatactcttgacgtcttcttgcgttgttaggtcattttttacatagaaccattcagtcatccaggctccgggccatctcttccgaaaggtcggcacagggcagcttgacccggagcgggcaacgaagctgtaacacccaaagttgttgtgatattgttctttcccccagggcttcgtctcatataacaactcatgaatgttgcaaaagcttttggcatttggttctaaaccttggcttctcgcagcccagacaaacatccccattcttatgatagcttcgggagtaatttgatgaaggtagatttgaaatgttttcagaacttcaacaacaaagttgctcagggggaatcgaagcccagccttgagaaagcttcggaagattacgacttcatcttcttcgggggtgggagaagttttttctccagcatcagctctcacaatagatatatcttgaaaatatcggcccctcatattatcaatatgactctgcttaatggtggttttcccgaaaaccgcgtgacttggccgccatggtcgatcttcggactcttccccaccgctttctacatcataactgtcgctgtcaccagtatcttcagacaagccttccagtatctccttggtaatttttttcgtattggtctccgccatcgctataaggaaccccaggttcttctcttcagagagactcagcttcatctcaggaccggcctttttgtcttcagacatcttcggaaatgctaaaaactgttttcaatgccgaagcttcaaaactaaaagctcagtaaatttttgcgcgcaagagataaaattgagtaagcaggggcagatggcaagtgtgcgtaccaaaatgagtttgtggtatgatcttatttatacgcccagtgcgttgaaagttgaaagacccacttgtcagtgaatgttgctattctagcaaagggaaggtgttttttcggaccttcggcttaaggccttcgtccatatcgcaatctaaatttatcattaataaattaatattgcgaggggctactgttgggggccttcgtcctccgaaggtcctcaaaaacatgatttgacaatatcttccaagtgaaatatatgaacagatatcttcggacccagattgtgaacatgaagtacgatcaggacgaagcttaagctagacgaaggaagattgagatgaaggacgggctgatcaccaagccgtacgagggatggtgcatagccgaagctatgcgcaggggagcttcggcatagtggcagaaaggggaaccgacttaaagatgaaaagactacttaggctttgacagatcctcataagtcattagcaaatgtagtggacatgaatgtaattttacatgggctgcgtcccacgtctataaatagatgaacagtactcccgtactgtacacactgactgggcatttgcttttgcgtcacatttgtattttcatctccttccaagccgaaggtacatttgtaattcaatattgtctctatttttctatgatgatataaaaaagctaaattgatgatgttatatgattattcatgctatcttttatgtttcatatgcttcgtctttcattaatgtatactgtgatgatgaaggttcgtccttcatgaccttcgtctgaagatcgttatatcctaagggaaataatgcttcaaaggacgaaggattttatcgtttaacattctctgtgttgccttgttcttaactcatagcacttgagaacaagtccccaacaaattgaatgttttaggagtaattcatacgtgtttttttatcattggatcacaaacctacgtttttttcaaaaacgcacacacacatatacaaccttatctagattttcatatatatatatatatatatatatatatatatatatatatatatatatatatatttgtcggtaccctaaatcaggggtactccttactacaacatgaagacgcggtgcccacgtgactatctctagtcacgtggtgaacagcacccgactccaccacgtggatggctccagagtcgtcatgtggccagagaaaacgatacactccaagatgccaacagtaggtccggatcccatgggaaagtgccggacccctgcacatgtagaccggaccttcggagcaaggtccaggacccctgcgagtgcaacccggacctccaggtcgggtcccggacccctctgcgtagggtccggactacccacagtcgggtctcgggactctggggcagagaatacccaggccttgctcaggcaggggtccggtgccgacatgtgtccaggcccagcctagtgcggacctgtccgcataacgctactgttccttgcccaggcggagacccgatgctgccacatggcctaccgcgcgtgacgtaagccagcgggtggagcctgacgtaagacctctgggtcgcgctgtctctgcatttattgcggagaagacgcgccgcctgactatccagctgacaggcgatgtgccccttcagcatttaatgtgtcctgtccactcagctggcagacggcgtccagaccatcctgtaggcggcgtgcctatccattccattgccaaacagtacgcccgtgctgcgaagagcactgtgcccatccatcatcacacgtacgttgccagggaagcttcccctgcacgccaatactacgcagatcgcagatatcagagcacaaggaagattgcactggcaacgagtattagtcgctccaagtattacatctgttatgtccctgggcccacatgtcggggctcagtacccttgtatgtgcccccttgactataaaagggagggcacactgcgttacaaggcagatccacacacactcactcagactcaggccaacttagactctcagctctcaagctctcacagcaatacaacacacagtggagtaggatattacgctccggcggcccgaaccactctaaatccttgtgtgttcttatgtgttcatcctccgatcttgtaacaggcaaaatgcttaggccactcctcatcttaagacttagagtgggtgcattccatcacccggtcgaagatttcctctccgacaatatttttaaaaattctctaaccttggtcaatacctacataaatatctaaataatatgggtgtttgcatgcactagagttaatagttagttagctaaaaaattgctaatgaaattagctagctcactgataattaatgtgctaaaagtagctaatagttgaactattagaactattagctacactgtttggatgtatttaactaattttagtagctaagtagcatttaaacatgatcttagagggtgtttgaatacaatagagctaatagttagttatctctaaaaaatactagtacaattagctaggtaacaaatagctaaatacataggaataaacattgatctcaatataatttgatccttaaattttataatataaaaattagagcccactaccactctaaccacagtccccacttgtcaaggaacaaggatacatccagagatcccgttcctgataatgtgttcacatattaaaaaatatattggcatataaattggattgaaatatttgtttgtgtctttttggcgtcaatcattgcgtgagaaccggctaagcaggcgtggacggtccgctgccaggggtcggacggtccgtgacctgtggcagggctagggttttctgcctgacggtccggacggtccgcgcctacagcccggacggtccgcgcgtgcgtaggggcggcgaaggtcgccggcggcacctggatcttgctcccgggagggacaccgtcggaaaggagagatcctaggtgttgtctaggctcgacaggccgacctagactcctctaatcgacgtagagtcgaagagaagcgaagaattggggggattggaaagctaaactagaactagactagaactactcctaaatatacaagaaataaatacgagataagttgattatttattcgattgatgatggttaatctgtattcctctgtatttatagaggagggggctggaccattacaaacaaatttcccgagctaattccgcgaatatagccaataactgtagcaagaaactcggaaccctaattggctcggcgcgcgcggaccgtttggaccaccggcacgaaccgtctggaccgcggaccgtacgacgctcattttggtgctcaataatattaataacaaactaaaaaatatttggaacaacaaaattataggtgtaaagtaaaaaagaagaagaaatgacgtctacttaaacaagtcaatctagccagtttgccatactagcatggacggtttcactaccctagggttcgccttttcgattttactgttccgaaacttcgtttggacaaaaaacggtgtttgtatttttgaatttagaaccaaaataacacagaaaccggagcgagaaatgcatcccttagaacaagtaaggtcagttcctaaaccgactactaagggcttgttcggtttcatcaaaatctataaggccttattcgtttacactaatccaactctaagttagcatggattgaaattaaatccatgtcacaagctacactctaaaataatccatgcctactcaattttttttattcggttaaacccatcgtggattgtaacccaagagtttgtccatgcgtcagcgctgcacccataccaacaccgtcgtgtagggccatgtgtatattgtgcatccacgccatcacacatgatgcagccacgagccaacgcgtacgaccaacgcacccccagtgactaccagtgcgcaggcgcctagcgcaaggcacaagttgcaagcggcaccatgacaaacatgcagggcctacgaggatgtcgccacgacgctcaccgtcagcccgccgcccaaagacagtcaccacatccactagcgtatccactaaacgtactttatcttagtagtctctcctttgatccatttttggagacactgacaactatcccattgttctaggtggcattgatcgttctatgcaacgtctatgtgctcctcaccaaagtcttccatgaaggcattctagtctaccaaaaaaaaaaacagacacaacatcggtctaactgccaccctcagccagtttcgcacgtcgatctgtttcgttcttgatgcgattaagcttgtttgcgagctcagacttgttagaccttgctggtgtgtgacccaactcagcctcaacgcagtaactatatatcaagttaatgttatcgtagactcaaactttctcttttttactgcataaattgtagatatttaaattgttataaaacaatttaaaagtcaactataaactagttgttcaatcgatattgtggcgctgcataagagcaattacgtgacagcaccaatgtatttgtggtaataacattttcttaacagtttggaccagtcacagcctgcatgtatgtttgatccatgtgatatgatatgatcaaataaatctggtgtgatctttgatcgccataaaagttgaaactacttagagcatctccaaaagattttttattttttgttctctatttaactatctatttacgttttcataaagattacattctatatatagcatctcagtccaacagactatctatctagtttggctagtggtggctagccaaatttagctagtgagagagccaatttacaaagtcagatagtttgcgagtcagatagctagtctgttggagatttaatttactattgagtagctaaaatttggctttacgagttatttagctagtctcttgaagatgctcttagtcatatatgtgatacaaatctgtttatttctttttcaaataaatttcagcttgttctgtttaatttcaggaggattg

SEQ ID NO: 899 - DNA, 3987 bp, Zea mays
  Intron number 5 from transcript GRMZM2G427685_T02 (locus G RMZM2G427685) derived from phytozome v7.0 (chr-ID 10; pos 40748231 to 40752217)
caccgccggcacagctacctgcccctggagcacaggtttgtattctaactctatagctatcgccgacagttcagcagttaatatgtacgatttctgacaaattgcattctcgctccataggacaatcaggaaggaagtggaacgatggatggcttcgtcaactccctattcgtgtacccaactccggacggaggcagcggccaaagctccaacaaccctagccgccgcggttcgtgaatgtgcttcgatctctaccttttcagtaatgaacacttcgatctctaccttttcagtaatggacacttcttttgtggatgaacacttcttatgtggatgaacacttcttatgtgtatgaatgtggatgaatgttcttatatatatgtgtgtggatggatgtgattgatgtgtgtggatggatgtgattgatgtgtgaatgtgcatgatgatattgtgtatattttctgtgccattgatcataaatatggggtttttggggggggggacagtttaactcccgtcggctttgcaaagccgacgggagttaaactggtactgtccaggataactcccgtcggcttagccaagccgacggcagttgttgctcccccgtcccggcacccagggctgacgtggcggacacataactcccgtcggctacctaggccgacgggagttaattgcccgccacgtcagccctgggccggggagcgacaaccgccgtcggctacctagggccgacaggagttaattatctcccgtcgggccgacgggagttaatgcaatccccgtcgggtagctcctgtcggccgggtaccgacgggatttagactaaaaccgacgggaatagctaaatcccgtcggttttagagtaaatcccgtcggtacccggccgacgggaatatcctggaatagtactattcaaaatcaccattaatgatggccagtatgatagcatgtacaatttgtggttctcttagctaatatatttatcacaatcgagatttgcaacaatcatatatctcacatgttcgaattccacttaacgactagtttggcaatcctattttctcaagggatcctcaagggaaaataagctaatttatcttaggaaaatgaaaatactttggaaaaatggtgttgtgaaactagccctaaccgattagaccctatcaattgcagtcatctcctcgctaacttgattgttaggtaaagaaaggcttatttaatatatttgcttcataaaaaattggaaattcaattggtgttggtttttccaacattgtaagcttgttgttctaacttgagttgcatcaggacttgaagtgaagctagtcaaggccacgctccgctgtatcgtgtgaacaatactagattatattctattagattagtttagggtttttaggaaagagataaattagatagattaaggtattttcttaggagccaagtcatttaaaaatgagagaagccaaaatcgcttgtggttaaaatctctacactataatgcagtagtttccatcatcgtcatgcaccaacacttttgcaaaaaaatcccttatatttcattataatcaactcctcgtcgaggcctccccatccctagtctctcccctctcacacaatgaatttgtctccttccacttgatgctgaaacctcatgagggcaagaatcgagtgcatgccccgcggtccctcccccccccccccccacgcgcaccaatgaagacgacgcgcccgtcattaatggtgggagcccatgccacgtttgtcgcctcgcaggcgcatctagagaaggcctccttctacggcttcggttgctacatgtagggctcgtacaactgttgcagcggtcttgacacctgaaaccccactcgctgctatgttcctctgcatatttgctcgcctacactggcattcaccaccactgcttctctaattcggtttccccttgtgtcctagatttgttcccttgtaaaacaccaaaaatcctatttttaggactcaagagaattctctaaatatttaaaattttaatagtttttataataaaattagaaattaaaactattttcctaaaagttaaatataaaaaattggctatatgtttaaattattttcttgaataattattatggtaaaacatcttacgaattattcctacccagttatatatattgtttgaagcattttcataaatggataaattaattaataaaaaattctctgcattcatgttgagtttttgtttattacaactagacttgatttttaaatttaaaataggaagcagaaattacaaataaaatataagctaatataatgtatcgatgtgtgtttggttggtttgtttgtacgcgacgtcctttaggtaaagtcgatacaaattaagatatcgcaataagatatttaagaaaatactcctttcaactcgcatgtaacacccaaaaatttgatttaaaatttaaataaaaatatattctaagatttattaaattagatgtttaatatgattagtgttgattacttgttttcaattgctatatgaaataaaaaacaaggcaacacaaagttaaaaagcagaaaccttcctagccgcagggagggggaaacaggtgcgccaagcctagtgctagctccgatgagggagggggaacaccagagccaaaaacgtgggcatggggcgaggctaaattgatcggacgttgtgcgggcgcggcgaaccagagcgatagaactcccgcgagcgcggtttcactattgtaaggcaaaatcgaggcaaccagagcatggggaaaggttcctcaccttgggatggcgctcggggagacttggcgtggtgtctagaactccaggtggacggcacggcgggtgttcttctccggcaagctcgggcggcgacggctgattgtgtgagagagagcgagagcgggtgaaatgagagacaggcgagagagagcgggtgcaggcggggcttaaaagggagctggggaacattggcaagcgacatggctgactttctcaacatgcgtgcgcacgcgggttagcatcggttgcggggaggacggagctgacaagtgaggcccacggcgcagaggcacaagcgcgcgcgaggggaaacggttaagtgctgacggtccgggctcgctgcgtacagggagagcgggggcatgcgcgaggttgagtggcgccgacaggttgggtcgtcctggtagagggagaatggggtcgggtgctcgcggtgcgagatgggcctggtgggtcgaatggccgagggaaagggttggctgggctgctttagctttttcctttttcttttgaatttctaattccttttctttttatttttcttttgaattcaaatccaaccaaactacaaattcaaatttaaatatttaaaacatgtgcatcaaccaaaaacaaagtttaggatcaacatgatgtaacatttcatgtctcccctaggttttaatatactaaagaaatagtacatctcccaaataaataatcaaactctattaagaggaaaagagaagaaatctatagagagaagaaaaaggggtaacacctgaatttggtagatattagagaagaaattttatacccccaaattcagggtgttacaatgttgaagcgagatgtaattagattcttggtaattttagcaagtctggagccgaggctttgcaacaggcctttggggcccgaaagaggcgttgactaaatcgtgtctttgatgccattgggttcttgtatcctgactatcatgtcatggtttagggtttgaagaaaaggaagaagaaagtgactacaaggcaaagcaaggttccgaaggtccatgccggatcaactcctcaggcttcagagggaatcccggtaaataagattttttatttttggtataactattatggatttattgtattgattctacgtttttgaatttctcaggctgcacccgaagctaggatagaagttgacattga

SEQ ID NO: 900 - DNA, 9106 bp, Zea mays
  Intron number 1 from transcript GRMZM2G152935_T01 (locus G RMZM2G152935) derived from phytozome v7.0 (chr-ID 2; pos 2 22452410 to 222461515 reverse strand)
cctggatctggcggcctccggcggtcgcgggatcccgtgagagcacctagaggggggggggtgaataggtgatcctgtaaaagttcaaaacttaagccacaaagacttgttaagggttagcacaagtatggccaagtggctagagagaactcaaaacacgataaccacaagaaagcaatcacagagttgacacggtggttatcccgtggttcggccaagtacaaaacttgcctacttcacgttgtggcgtcccaacggacgagagttgcactcaactcctctcaagtgatccaatgatcaacttgaataccacggtgtttttctttcctttgatcttttcccgtttgcgaggaatctccacaacttggagtctctcgcccttacaattgagttcacaaagaaatacggagtaaggtgggaatgagcaacgcacacaagactcgaaaatcagagcaacaacacgcacacaagtcgcaacaagagctcgcaacgcaacacaaagagttcacaactccacaagagctctatatgctatcacaatgaaacgaatgcgtgagattgatgtcttggtgcttagaagagttgtaggaatgcttggtgtactcctccatgcgcctaggggtcccttttatagccccaaggcagctaggagccgttgggaacaaatctggaaggccatctttgcctcctgtctcgtggcgcaccggacagtccggtgcacaccggacactgttcggtgcccgatttgtttccttaaacagcgcatccgaccgttgctgtcagagtcagatctgtgcaccgttggcgcaccggacatgtccggtgcacaccggacagtccggtgcttccttccgaccgttggctcggccacgtgtcgcgcgccgatcgcgcggccgaccgttggcccggccgaccgttggctcaccggacagtccggtgcacaccggacagtccggtgaattttagccgaagtcgccggagaaaaaacccgagagcggcctcttcggccgaggcagcctggcgcaccggacactgtccggtgcaccaccggacactgtccggtgcaccaccggacagtccggtgccccagaccgaaacagccccttggctgcacacagccaagtcttctcttctcttcttctttctgtttctaacacttagacaaatatattagtacacaaaaccaatgtactaagacttagaaacatacctttgttaaagatttgcactttgttcatccatgggcattgatttatatttaagcacttgagttgacactcaatcaccaaaatacttagaaatggaccaagggcacatctccctttcaatctccccctttttggtgatttatgccaactcaacataaagcaactagaacgagtgcaaaatcacttcaaataaaaactcaaattggttttgattcaattttggcatatatggatcatcctttgccaccacttggtttgtttttgcaaatcaaactcaaatctctatctctaagtcagacacacatgttgaagcataaagagagtcattccaaaagagattgatcaaagatttcaaaaaactccccctatttcccataatcaatacttctccccacaagaagtcaacttttgacaaaagagacaataagagacaataaaagcttttgacaaaacaaaaactctattctactattttcaaaatctctcaagtggtagctgatccatttatcgctttggcctttattttctccccctttggcatcaagcaccaaaacgggatcaatcttggccctgtaaccccattgcctcaccaaagtcttcaattaagagcaaatggcaataagatttcatgagatgaacttggaattagttaccctctcatcggagtgcagtggaagtctttcatggtccaagtccaccttttccctttcaatcctccttcgagactaaatcatcaaactcaagcacatggttagtctcaaaagggtcaagttgtagcacatctccccctaaacatgtgcatcactttgcaacggacttgtgaggtccagggagtgtttgtacaacttgagcaccataataagcaacaaaatgcaaaaaggaacatgatcaaaagcataagtacatgtatgctacaattcaatccaggttccgcgaatctatgacatttagctcactacgcaacctgcaaaaggtcttctcatctagaggcttagtgaagatatcggctagctggttctcggtgttaacatgaaacacttcgatatctcccttttgctggtggtctctcaaaaagtgatgccggatgtctatgtgctttgtgcggttgtgctcaacaggattctccgccatgcggatagcactctcattgtcacataggagtgggactttgctcagattgtagccaaagtcccggagggtttgcctcatccaaagtagttgcgcgcaacactgtcctgcggcaacatactcggcctcagcggtggatagggcaacggaagtttgtttcttagagttccacgacaccagggaccttcctaagaattggcacgtccccgatgtgctcttcctatcgaccttacatccagcatagtcggaatctgagtatccaactaagtcaaaggtagacccctttggataccagagcccgaagcaaggcgtagcaaccaaatatctaagaattcgcttcaccgccactaagtgacactccttaggatcggattgaaatctagcacacatgcatacgctaagcataatatccggtctactagcacataagtaaagcaaagaacctatcattgaccggtatgctttttgatcaacggacttacctcctttgttgaggtcggtgtgtccatcggtccccatcggagtctttgcgggcttggcgtccttcatcccaaaccgctttagcagatcttgcgtgtacttcgtttgggagatgaaggtgccgtccttgagttgcttcacttggaacccaaggaagtagttcaactcgcccatcatcgacatctcgaatttctgcgtcatcaccctgctaaactcttcacaagacttttggttagtagaaccaaatattatgtcatcgacataaatttggcacacaaacaaatcaccatcacatgtctttgtaaaaagagttggatcggctttcccaaccttgaaagcattagcaattaaaaagtctctaaggcattcataccatgctcttggggcttgcttaagtccatagagcgccttagagagcttacacacatggtcggggtaccgttcatcctcgaagccagggggttgctccacgtacacctcctccttgattggcccgttgaggaaagcgctcttcacatccatttggtacaacctgaaagaatggtgagcggcatatgctagcaaaatgcgaatggactctagcctagccacaggagcaaaagtctcctcaaagtccaaacctgcgacttgggcataaccttttgccacaagtcgagccttgttcctcgtcaccaccccgtgctcgtcctgtttgttgcggaacacccacttggttcccacaacattttgcttcggacgaggcaccagtgtccaaacctcattgcgcttgaagttgtttagctcctcttgcatggccaacacccagtccggatcaagcaaggcctcctctaccctgaaaggctcaatggaagagacaaaggagtaatgctcacaaaaattaactagtcgagatcgagtagttactcccttgctaatgtcacccagaatttgatcgacgggatgatccctttgaatcatcgctcgaacttgggttggaggtgccggttgcgcttcgtcctccatcacgttatcatcttgtgctcccccttgatcacacgcctccttttgatgaacctgttcatcgtcttgagtcgggggatgcaccataattgaggaagagggttgatcttgctcatcttgttcatgtggccgcacttctccaatcgccatggttcgtatagcggctgtcggaacatcttcttcatctacatcatcacaatcaacaacttgctctcttggagagccattagtctcatcaaatacaacgtcgctagagacttcaaccaaacccgatgatttgttgaagactctatacgcctttgtatttgagtcataacctaacaaaatcccttctacagctttgggagcaaacttagaatttctacccttcttcactagaatgtagcatttactcccaaatacacgaaagtacgatacattgggtttgttaccggttagtagctcatacgacgtcttcttgaggaggcgatgaaggtagaccctgttgatggcgtggcaagcagtgttaacggcttccgtccaaaagcactcgggggtcttgaactctcctagcatcgtcctcgccatgtcgatgagcgtcctgttcttcctctctaccacaccattttgctgtggtgtgtagggagcggagaactcgtgcttgatcccttcctcttcaaggaactcctccacttgaaggttcttgaactcggacccgttgtcgcttcttatctttttcactttgagctcaaactcattttgagctctcctgaggaagcgtttgagagtcccttgggtttcggatttttcctgcaaaaagaacacccaagtgaagcgggaaaagtcatcaacaataactaaaccatacttacttcctcctatgctcagataggcgacaggtccgaagaggtccatatgcagcagctccaggggtcttgaagtggtcatcacgttcttgctgtgatgtgctcctcccacttgtttacctgcttgacaagctgcacaaggtctatctttttggaaatgcacgttagtcaaccctatcacgtgttctccctttagaagcttgtgaaggttcttcatccccacatgtgctaagcggcgatgccacagccagcccatgctagtcttagctattaagcatgcatctagaccggcctcttctttcgcaaaatcaactaaataaagtttgtcgtctaatacacccttaaaagctagtgaatcatcacttcttctaaagacagacacatctacatttgtaaatagacaattataccccatatgacataattgactcacagatagcagattatatccaagagactcaactaaaaacacattagatatggagtgctcattagaaaattgcaattttacctaaaccttttaccttgccttgattcccatcaccgaatacaattgaatcttgggaatctttattcttgacgtaggaggtgaacatcttcttctcccccgtcatatggtttgtgcatccgctgtcgataatccagcttgaacccccggatgcataaacctgcaaggcaaatttaggcttgggtcttaggtacccaactcatgttgggtcctacaaggttagcacatatatccttagggacccaaatgcaagttttatcacctttgcattttgcccctaacttcctagcaattacttttctatcctttctacaaattgcaaatgaagcattcaaagcacaataaattgtagaaggttcatttgctattttcctaggagcatgaataacattccttctaggcacatgatgaatagcatttcttttaggaacaacatttctcctagtaacatttctatcatacacataagaggaactaggagcaaacatggcatgagaatcataaacatatgaatcaaaagcatcatgacttacatttctagtttgtcttctatcatgatacaaaaatgcatggttccttttagcactagtagccataggggccttccctttctccttggcgggaatgggagccttatggcttgttaagttcttggcttccctcttgaagccaagtccatccttaattgagggatgtcttcctattgtgtaggcatcccttgcaaattttaacttatcaaattcacttttgctagtcttaagttggacattaagactagccacttcattatttagctttgcaatagaggctatgtgttcactacaagcatcaatatcaaattctttacatctattgcaaattgtaatattttcaacacaagagttggatttatgtgcttctactagtttagcatttaagtcatcattaatgctctttaatttaaaaattgaatcatggcatgttgacacttcacaagcaagcatttcatttctcttaatttctaatgcaagggatttttgagcctctacaaacttatcatgttcttcatacaacaaatcctcttgcttttctaaaagtatattcttttcattcaaggcatcaattaattcattaattttgtctatcttagatctatctaagcctttgaacaaacatgaataatctacttcatcctcatcactagattcttcatcactagaagaatcataagtattagcattacgagtgattaccttcttttcccttgccatgaggcaagtgtgatgttcgttggggaagagggccgatttgttgaaggcagtggcggcgagtccctcattgtcggagtcggaggaggagcaatctgaatcccactccttgccgatatgcgcctcgcccttggccttcttgtaattcttcttcttctcccttttgttccccttttcctggtcactttcattatcaggacagttagcaataaaatgatcaagcttaccgcatttgaagcatgatcgcttccccttggtcttagtcttgctcggctgtccattgcgaccctttagcaccgtcttgaatcttttgatgataagagccatctcttcatcattgagcccggccgcctcaacttgcgccaccttgctaggtagcgactccttgctcctggttgcctttagagcaatgggttgagactcgtggagtggaccgttcaacgcgtcgtcgacgtatcttgcctccttgatcatcatctgcccgctcacgaattttccaagtacttcttcgggcgtcatcatcgtgtacctgggattctcacgaatattgttcacgagatgaggatcaagaacggtaaatgacctgagcattagacggacgacgtcgtggtccgtccatcgcgtgcttccgtagctccttattttgttgataagggtcttgagccggttgtatgtctgagttggctcctcgccccttatcattgcgaaccgtccaagctcgccctccaccaactccattttggtgagcaaggtagcgtcatttccctcatgagagatcttgagggtatcccagatttgcttggcgttatccaagccactcactttattatattcatccctgcacaatgaggctagaagaacagtagtagcttgtgcattcttatggatttgctcattaatgaatataggactatccgaactatttaagtgcattccactatctacaatctcccatatgctaggatggagagagaataggtgactacgcattttgtggctccaaaatccgtagtcctccccatcaaagtgtgggggcttgccgagtggaatggaaagcaaatgtgaatttgaactttgcggaatacgagagtagtcaaaagaaaagttagaattaaccggtttcctttgtttgtcgtggtcgtcgtccttttgggaagaagaggactcatcgctgtcgtagtagacgatctccttgatgcgtcttgtcttcttcttcttcccatctcttcgcttgtggcccgagcccgagtcattggacttgtcatcccttggctcgttgacgaaggactccttctccttgtcgttgatcacaattccctttcccttaggatccatctcttcgggcggttagtccctttcttgaagagaacggctccgataccaattgagagcacctagaggggggggggtgaataggtgatcctgtaaaagttcaaaacttaagccccaaagacttgttaagggttagcacaagtatggccaagtggctagagagaactcaaaacacgataaccacaagaaagcaatcacagagttgacacggtggttatcccgtgggttcggccaagtacaaaacttgcctactccacgttgtggcgtcccaacggacgagagttgcactcaactcctctcaagtgatccaatgatcaacttgaataccacggtgtttttctttcctttgatcttttcccgtttgcgaggaatctccacaacttggagtctctcgcccttacaattgagttcacaaagaaatacggagtaaggtgggaatgagcaacgcacacaagactcgaaaatcagagcaacaacacgcacacaagtcgcaacaagagctcgcaacgcaacacaaagagttcacaactccacaagagctctatatgctatcacaatgaaacaaatgcgtgagattgatgtcttggtgcttagaagagttgtaggaatgcttggtgtactcctccatgcgcctaggggtcccttttatagccccaaggcagctaggagccgttgggaacaaatctggaaggccatctttgcctcctgtctcgtggcgcaccggacagtccggtgcacaccggacactgtccggtgcccgatttgtttccttaaacagtgcatccgaccgttgctgtcagagtcagatctgcgcaccgttggcgcaccggacatgtccggtgcacaccggacagtccggtgcttccttccgaccgttggctcggccacgtgtcgcgcgccgatcgtcggccgaccgttggcccggccgaccgttggctcaccggacagtccggtgcacaccggacagtccggtgaattttagccgaagtcgccggagaaaaaacccgagagcggcctcttcggccgaggcagcctggcgcaccggacactgtccggtgcaccaccggacagtccggtgccccagaccgaaacagccccttggctgcacacagccaagtcttctcttctcttcttctttctgtttctaacacttagacaaatatattagtacacaaaaccaatgtactaagacttagaaacatacctttgttaaagatttgcactttgttcatccatgggcattgatttatatttaagcacttgtgttgacactcaatcaccaaaatacttagaaatggcccaagggcacatttccctttcatcccgacgcgccaaactggaggaagcgaagccctcccc

SEQ ID NO: 901 - DNA, 3668 bp, Zea mays
  Intron number 1 from transcript GRMZM2G038153_T01 (locus G RMZM2G038153) derived from phytozome v7.0 (chr-ID 1; pos 6 1012562 to 61016229)
atttcttcatcgattatatcccagaaccattacaggcatgttcatatatcatcttcctaagtcgttggcttagtcttcaatgtatcgttcgtatatagctaataagcaacgtttatctgcatgtactattgtttcaactagaaaggcccatataatgaaaatgtgtttcatgatgttggttaacttcatccttatattattaacccatgcatgcatatttataacgctagtggatcaatcagagcgctctcacacataggataacatcttagccaatataaacactaattgtcgttcacatatgtacatttgtacatctggtgcatttctaacacaacgggcatataataatacttggtagaacttgtagttatgatatttatcagttactaatctacatgctttgccatgtttatatggaacttttgtgtgtcttcatttgatatcttggtccaaggcttaatagagtacccatgcatcaacaaggtgtttgtctcgaaggaacctctgggttaagtgagcttaggctagagcaattttgggatcggtgaccgatccaaaagtcttttcgggtgcgcatgagtagggacaaagtgcatacaaaagacttgtgttgatctgtaagtatggtctatgattttagagtattgccaggaataagtactgctgattcgaaagtgaacggcacttcagtatgcgtttagttgaaaccttgctctaaactggagaaatgataatggcaaaattgccaatggctcctctaaactgtggtgttgcagcttgttgcagtccatttcttatagttttttattttcaatataacgaaatggactgacagcagtccctaaatttgtgaggtggtgttatcttgattctaagccttcattttgtatatctgaatccccaaacttgctctttgtcttatcactaatcctccctctcctctctctctcccgtgctatccgtcatccctcacccatcgccggtgcgcccgtcgttgtccctcacatccatgccatccacaccgaccaccaccactatagggaaataatggtagatgatagcggattggcaggacaggacaagccgcgcgcacagggccaagcgtgtccctagtcgtccaatgctaaggccaccgcctagactattgtcattaattcattatcctttgtccatgacgttgttcaacaggcctcttttccttttcctcttcacacgctgtgacccccttctaccgacacaatatagaaccggtggtggtgcagtaactattagggtatgtaccacccgagactctgatttagtttttaaaataccagagacaactaagagactgtataatataattttaaaactttagataataaatacagctaaaagataacatgtatagggagtcatgaaaagacgtctcttgtttttttttcacttagcctcttaaagaccgctcaagagactgtatattaaatggagttgcacatgcccttagagcatctccaaaagctccccagaggtctccctaaatcaagtttttttggaaaaaacacaaaaagtgtctccaacagttaacctaaagtgctcccaactttttcatagtcattaaaactccctcatttgtagttacaaatggggtttttttgggtccacataaacaatctgccacaagagatctgttggagaaagaattaaaatctacccccactaatttttttagataacccttaaaactgattttcaggagtcattttctcgggagctcttggagatgctcttatgcggctatccatacttatcttactctaaattcctactctaaaaagaatattttatcttatttatcaatattttgttcacaactactctatatctcaatcatatacaaactaccagattttttatccatatatatcaaacacatcgggccccatcatccaactccttcccaccaacatgattgcacaatagagtaggagagaataaactctgtaaataaggtttctcttgcacactttaaatttagagtgccaagtaagatatgtggttgtagcaattttttactgcatgcatagtgtgcactgcgaccagccattcacgcgactcacgaggccaagctacacccatcgcgactttttatactagtatcgccatgctaccaacatccacatatgggtgcttgacaccacgtcatgcatgccatatatggggtccctagttttcgttctgtcggcaccatacatgttcgcttcgaattaaaacccattatttagactgttgtagatacaatttatacagacaaaaatattatataagtaatagaagtcggtaccgattaaagccaaacaaacagtcatatggcttcgttgggtaacctatggctaccatgtccatagagaaggtgctcgtatataaagtcatgtttgtaactcatagagctaataattagctaactaacaaaatgttagctggattgtgccagctaataaactaattgttagttgtgtgttagataacaattagctaggatattagttgaggatttgaaacctccacagtaattttagcagctaactattagatatagaggattcaaacagggtcaaagatagataaatatactataggattacatagaataggactttgtgggcttccggcataagaaaagctaaatgattaacacgagacatcagtttatatagggcagggtactaggtcatgtagggcctatttggtgtagcgtcgaagctgccacacccagcgctcgatttggccgccacaacggcgacggcaaacctatgacgcgttgtggcgtgggcggcggccaaccaaacaggcctgtaataccatacttcctatgtagcatggtgtcttgcgttggattgctaattatgatatgttacaagtggagtaccaatgcatctctttatatatagtccaaaggatagacgtacaggtcgagatctagtcggtcaaggcagaagagttctgatccaattaggggtcatttggatccattcattttagaggaattagaatctacttaacatatgatctttaacatatggtctcggtaacacttctcgagtcctgagttcgactgttctcatatagtctacggtgtcgcttaatgatcataggttatcttgctcctataggttgagctttttttttgtccgcatcacccctatatcgacatgacgtgtaagatagcaggtcaagtaatacctattttcatcacctgaaccagttccccatttagggcttattcggttagctctcaatccatgtggattgagtggaattggatgggtttaaatctcaaataagtcaaacttcttcttattttttcccaatcatatccaatccatggataacggtattaaccgaacaaagccttaattaaatctcaccccaccacaccgagcccacccaaaaaatgattccctcgtgctgcccccacctaattaaatgtcgccccaccacaccaaacccatccaaaaaatgattccctcatgccgcccccacctaattaaatcctctgctagtatatcgtaagtcattgtgtttctttctatatatgttttataaaggatatgatctattgtctttcctctgcacccctgcaactggcaggtttcagacaaacagagagtcgtggaactgaaagg

SEQ ID NO: 902 - DNA, 30770 bp, Zea mays
  Intron number 6 from transcript GRMZM2G011526_T01 (locus G RMZM2G011526) derived from phytozome v7.0 (chr-ID 7; pos 9 4203191 to 94233960)
gacaatgtaagttgatctctagtattcacagttagtttgaaagcatcagtacatcataatgcatcgagaaacacctcgtgtcctcagtattagatgaaaacacagtttgttacgtctattcctaaattagagagagctgcgtctctctaccgtgatttacgatgggttagttgtggattacgatcccatctatgtatatccctatcttctctcttctctctatcttctctcttctctataactgcatatatcagcaatatataaacaccggccgtgacccctagagggcattgagccaagccaattaacattatcggtgccaagggattaatcactcgatccatgttcattgttatatcctactcctgccctattgccgtctcaactcctgcatcgtccatcatgtccaccaccacctttcccctccaccacgctgtcaccatcaagctcaacaaaaacaacttgctatggcgtgtgcagctgcttccataactacggagctccaagctgatcggatacctagacggtaccctcatcgcaccgacgtttttttttcttgaatacgcaggagagctgcgtatttttgtattaagaagaagaagaaaatggggagaaaaacccccggtacaaaggtgttacatttgcccaaccaacaccaaaacacaccccaaacaactaagacacctcttctaaatggaagaaagagagcgctttggctccagccatacgccaacccattaactcctcccttgcagctgccaacaccaccgcagcgctagggttacatttatcaaaaacacacctatttctatgtttccacagagaccatgcacccaaaatgactagagaattgaatcccttggataaaggtttgcccaccctggcagcactattcctccaccaggtttcaaaacagacgtcaacatgggaagggcagagctcctggaaaccacctgtctgcagaaggctgaaccaaaactgttttgcaaaactgcactgaaccagcaaatggttgatagtttcttccaactggtcgcataaagggcaagactccgggtgatctaggccacgcttagcaagtctgtcagccgtccaacatctatcgtgctccacaagccaaaggaagaatttacactttcctggagcccaggatttccaaatgcgttcagcaggctcaaagctaacagagccaagaagcaaagtcctgtaagctgaactagccgagtattgacccgattcactgaacctccaggcatgcacatcgggaacatccggctgaagaaccatcccctctagcaagtcacaaaggtccatgagattagcaatggctgtaacagaaatagcccccctcagatcagccaaccaattgagatcaggcaaggcgtctttgaccaggcgcctagaagcaatgcacttgggcaccatacccaagacagcaggtgccacgtccttaatacatttgccattcagccaacgatccttccaaaaaagagtatcagacccatctcccaaatgagtgataacagccgcagccaccaagctttgcacaatgtcgcaagtttgaatctgaaagtccgaccatggcttagtcctatcagatttttgcagccaaggccacctagcccgcagtgcccagctcatgatccgaaggtcacttatgcccagaccccccaggtccttgggtctagtgactttgggccaagtcagcagacaatggccaccattcacctccttcctccctctccacagaaagcctcgtctaatcttatcgattgctttaacagcccaaggagggatgtccagcgccagagcagcataaatcattcttgatgtcatcacaaattgaacataaatggctctaccagcttttgtcatcagatcagctttccacccaggtaactgggctgcagttttatcaacaattgcttgaacttgacttcttctaagctttccaagagaaagcgggaggccaaggtactgacagggaaactccaaaatggaacatggaaggagctcctgaacacaagcaagatccgcctcagaacatcgaataggaaaaacattactcttctgaacattggtcattagaccagacgtatccccaaaaatcctaaggatttccagaatcagaattatgtctgagggcaccggcttgaggaaaaccaccgcatcattcgcgtacaaagagaaacggtgttgcaaactgttcgtggaaagagagtgaagcagcccttcatcagaggccctctggattagcaagttgagagtgtccatgactaagatgaaaagaattggagataaagggtccccctgccgaagaccccgctagtgagcaatgtagtccccgggaacaccatttaataaaattctcgtcgaagaagaggctaacagcccacaaatgatgtcacgccagatctgcccaaaacccaacttctgcaggacttccaacaagaaagcccaagagaccgaatcaaaagccttagaaatgtcgagtttgaaaagaatgcgggcttacctttgacgatgaagaaaccttgcagtgtgttgcactagcatgaaattgtctaagataaatcttttcttaataaatgttgtttgattaggagaaaccatatcattcaaatgccgagccaatctgttggccatcatttttgttactaacttcgcgaagctatggacaaggctgattggacgaaaatctttcacttgggctgcaccctcaaccttaggcaaaagagtgataaacgctgaattgagcagccccatgtttctaaattttcgagcccaaacacaagagatcgctggcattacatcagctttgattgttaccgaacaagccttgtagaaacgaccggtgaaaccatccgggcccggagctttatccgacggcatagattttacagtgccccaaacttcttcctctgagaaaggcacatccaactcatttagattgaaagaaggcatcccacaaatcatggcgtccacacagactgacgctgagctggttcccaatcctgcctatgagcaatggtacaataccgatcaacatctcttgagcgggctcctctcatcaatgattgaagagatgcttcacgacgtcctggatgccaagacgtcaaaggaagtctgggattccatccggatgaaattttcctcctcgacccgtgctcacacagtgcagctacgtgtcgagcttgccaacgtcaagaaaggtgatctgtcggcggcagataactttcgcaaagtcaagaaccttgcctcggaggttgctgccgcggatgccgctcttcgcgatgaggatgtgctggcatatcttctaaccgggcttccctcgaactacgactccttcgttacatctataacgaccaaggactccgtctccctcgacgacgtctacacccacctcgtcacttttgaggcgcatcaactacgacatcatacaaatcttcagctacagatgggatcatctgccaattacgctagccgaggaagccagtccaagggccatggtggtggacgctcctgtgaacatggaggtgggcggcctcatgggggtgctctgtgacgtcccaacgatcgtcgcccacctagctctacttcgcaccccatctgccagatttgcggcaaggaaggtcacacggccatacgctgctggtaccgcatggacgactcctactccgaggaacctcctttctcacacgtcgccaccgcatcctcaaaggttgataccgactggtacactgacaccggcgccaacgaccacatcaccagcaatctggatcgtcttaccgtccgtgaacgctaccacggcaatgaacaagtgcacgtcggcgatggatcaggtttatgaattacgcatattgatcattcctctcttaatactgccaatcgtcctcttgtgttacataacatccttcatgttcccaacattactaaaaaccttttttcagtgcataaattttcacgagataatgacgtatttttttaatatcatccttggcatttttccattaaggaccgacagtcgaggaaaagccttctggacgggtgatgtgagttggacctctatccaaccaagtccacaaatctccctgcgctcaaacatgctcttgcagcaagatctactacctactctcattggcatgcacgccttggacatcctgcacccaaagtagttcagtctattttgcatttaaacaaactctcgtattctagagataattcataatcagtttgtaatgcgtgtcatcttgctaaaagtcatcagttgtcttatacacattctgttcatcattctacttctcctttggagattattcactcggatgtttggggccctacccctagctctgttggttgtttttcttattacatcagttttattgatgactttagcaaattttgttggatttacttaatgcatgctcgtactgatgttcctcgtatcttcatagagtttaagactcatgtagagcttctccttgatagaaagatcaaatgtattcaatctgattggggtggagaatatcaaaaaatacacaacactttcttccgctccatgggtattgcccatcgcgtctcgtgtcctcacacacaccagcaaaatggctcagccgaatggaaacattgacacattgtagaaaccggtcttgctcttttagctcatgcaaatgttcccattaaatgttgggatgccacttttctcaccgccacctatctaataaatcgcatgcctattcgtgtcatcgataatactagccctttagagtgcctttttcacacttctccaaattattctatgttgcgtgtatttggatgtgcttgttggcctcatctttggccctacaacaagcataagctatccttccaatccaaggagtgtgtgttcttgggctatagcccactccataaggggtacaaatgtcttgatcccaattctggccacatctatgtttcaagagacgttgttttttatgagaatgtttttcccttccaagcgtttgtcctatgatcctaacactccattacgtaacaaagaaatggacaatcgtagtattttgttgagatatgatcctatgcatgttcgtttgcctgttgtttctttggatgcagcagatccggcacaatcctcggtgccagtaccatctcccgctcggacggaggagcctcaggattcagcggacaatcgtcccgcgctctgtccggcatcagtggacgccaatccatctgcctgcactcggcctgggatggcaccacctggtggcctaacagatttggtccctgcttctagttctgaggagcatgcaatactggcatcgttgtctcaccttgttgaacactcgtacgacactagacttcggcacaatattcgcaagcccaagctacacagatggcactgttacatactctgtggtatggtcctctgattcagctctacttctcattttgttgctcttaatgatcctctttagagacggactatggatgatgagtatcgttctctcattaaaaatgctacttggcaccttgttcctcctcggcttggcttgaatgtggtcgattgcaaatgggtcttcaaaataaaatagaaacttgatggctcagttgatcgctataaggctcaaccggttgctagaggattcaagcagcaatatggtgtggattatgatcacaccttcagtctggttgtaaagcccactacaattcgacttcttctatcattggttgtctcttgtggctgggttattcgacaaatcgatattcaaaatgccttccttcatggttttcttgatgaagatgtctatacgaagcaaccacctgattttgaagattccgctcgtccagagtatatttgcaagcttgataagtcactgtatggcctcaaacaagctcctcgtacatggttctcttgcctaagcactacattacttgccctgggttttttggcctcaaaagcagatatatctctatttctttttaacataggtgacatcaagatctattttcttatatatgttgatgatataatcatcattagttcctcttcagtggtcgttgattgcttgcttgggcaactcagagatgatttcacgataaaagatcttggacccctgagctattttttgggtgttgaagtacatcatcatatcgacagtctaaccttaacacgacacaagtacattcatgatcttcttttccggactaatatgcttgctgctagtactgctgttacaccgatggtccccgctgaaaagattactctaacagatggagaacctttgtcacaagagaactccactcgatataggagtgttgtgggagcactccaatatctgccgctgactcgaccagatatttcgttctcggtaaatcgtgtttgtcaatatatggctgcccctacttcagtgcattggactgtagttaaacacattcttcgttatctacgggacacaattgattatggctcacgttttatcaagactggatcattgcttcttagcgccttttcagatgcagattgggctggtaatttggatgatcggcgtagtaccgatgggtacgccgtctttcttggggcaaccttatttcctggagttctcacaagcaagctacagtgtcctagtcaagcactgaagcttaatataaagccgtcgctgatgccacagcagatgtcatctagcttcaggttcttcttcgcgaaattggcatttctcttccatgaccaccgaacctatggtgtgttaacataggcgctacatatctcatggcaaaaccagtttttcatcgtcgtatgaagcatgtggagattgattatcattttgtccgagagcgtgttgccatgaaacaacttgaggttcgcgccatatcattgaaggatcaagtggccgacatcatgataaaggcgcttcctactccggcattcaagcatttcagaaacaatctgaacttatttccacgacgtccagattgaggggggtattagacgaaaacacagtttgttacgtctactcctagattagagagagctgtgtctctctaccatgattcatagtgggttagttgtggattacgatcacatccatgtatatccctatcttctctcttctctgtaaccacatatatcagcaatatataaacaccggtcgtgactcctagagggcattgaaccaagccaattaactgtcaagggcaatgagcccgagggtagggggacctcggctacgtagatcgtagccgctgtccgtgatggccggctgggttgtacccccttgccaccgttcttcgtcggtgggttattccccctgccgccggcttaggtagaggaagagagaggattagatagtaatatctttcttaattcccaagtgtttgattacaacatatttatagcctccggctcaaccaaaaggagtaacaaactccactaattaaggaccaaccaaaatagctaaagatctccacatttatagcctttcggcacaaccaaaaggagtaacaaactccactaattaaggactaaccaaaatagctaaagatctcctacttttcctcctagccgctgctagaggtcgtgccctgcgtgcttgccgtgcgcgcagcagcgcgttcttgggctcggcgcacgtcacgggccctatggtgcctgttgtacacttgtttgaacatgacatctccctccccgtcgagagccaactcgtcctcgagctggaattggggggaacttggtgcggataggcgcgacgtcttcccaggatgctgatgctgccgacgtgcccttccactggatgagtacctgatgtacgctgcgagccaaacggtaccgcaccacgcgctctggttccgggctaatggcgccatgatgcaggagcggcagtggtggaggctctgtaggtggcggcccctggtacttcttgagcagccccacatggaacacattgtggatgcgggcatggggaggaagctctattcggacggcgacctcgttgatgagttcgacgacacggtacggcccaaagaagcgcggcttcagtttgccgcccaccgcctgaggaagagacgacgccgcgcgctgacgtagtcgaagcagcgcccaatcaccgacttgataagtgacatcgcagtgcacacggtcgtagtggcgcttctggtacgcctgtgcctgctccagacggtagcggatgtccgccaggaactccgtgcgctcctccatgctcttggcgacggccggcaccctggtttccccgagttcataggactggatggagggaggatcacgcccgtagaccacgcggaatggggtgtcccgcagggacgtctggtacgccgtgttgaagaggaattccgcccatgggagccattggagccacttgcacggtctgtctcctgccaagcaccgcaggtagatgaggatgacacggttggccgactcggactgcccgtcggactgggggtgaaacgccgtggtcatttgcagcttggtccccatcaaccgcatcaactcctgccagaacgttgacgtgaacaccgtgtccaggtcagagaccatgggctgtggaacaccgtggaggcggacaatgtcgttgaagaaagcttgggcgatggattcagcggagtacgggtgtgccaatggaatgaaatggcagtacttgctgaacctatctgaaagggaaatagggtcaaaccttttcctaaatgattttggtggttcaattgaccaacacaaataattggactaactagtttgctctagattataagttctagaggtgccaaaggttcaacacaaaccaataaaaagtccaagacatggttcaaaaagaaaggagcaaaagaaactgaaggctgccctggtctggcgcaccggactgcccggtgcaccaccgaatagtgtccggtgcaccaggggacgttcactccaaacttctcagcttcgggtttcccagacgcagctccactataattcaccggactgtccggtgaaccaccggactgtccgatgcaccagcggagcaacgactatctgcgcgcaaaggtcgactctgacggatgaaaagtgcagcacagtgacgcgacagaagtcagagcagaatgtcagaggggcaccagactgtccgatgtggcaccggactgtccggtgccgcatgaggacaaagcctccaacggtcgaccagctccaaaccctaacaacaggttgacgtggcggcgcaccggacactgtctggtggcgcactggactgtccgatgcgcccatcgccaggagccttctccaacggctacaatttggttggtggctataaataccacctcaaccggccacttcaaggtgtgggagcccaagcaacattctaagtcatatagttgacatatccaagccctcccaaccacctctattcattgatccatcctatacacaagatttagaccactacaaccaacacaagtgccacaaaagagagatcaagcaaaagagagctactcgtgtgagtttagcacgagtgccttgtgagattcattgagagaaattgtgtgctatatcttgtgttcatttgtgcgtggagttttgactcccattgaacttcctccaaagttttggaggcttgtaaagctagcaagagacacctaagagtgtggtgatccttgcggggtcttaagtgatccttgagaagaagaagagctcgccggtcttagtgatcgatggagagagggaaagggttgaaaaagacccgtccttagtggactcctcaacggggactaggccttcaagggccgaacctcggtaaaacaaatcacctgtgtctctcgtgtttattgcttgtgatttgtttgttctctccctttctaagttctcttgcgcttctctttgctaatattattttgtgttgcttcaagttaaattcacatttagagaagcaaccccttgcaagaaagaacttgtgttactcctctccttatctaagccctcttgcattattctccactaacatttctagtagtattgctattgactaaattccgcactctttgaaaacaatactcgttgcaagcaaaggacttggtttctatactccgataattgtgaatcttgttctaaccactaatcaagggatctagttggggtgtaaagttataattttcaggtttcgcctatccacccccctctaggcgactttcactatccaccacggtgaggatcaccgacttgccgcagacccgtggcagcgcctccacaaagtctagcgcgacgtcagtccatacgccctggggaaccggcagcgaaaggagacccgccgggtgctggtgctcggacttgtagcattggcatacttcacatctacacacccgttcctgcacaacttgcttcatgttaggaaaatggaagtcacgacgcagccggtggagcgtccgttgtacgccttcgtgtccgtcctcatgtatgccccccacgatctcttgtagcagcggaaagtcggccgagatgtacaaccatccggaaaattgcaccatgctgtccaccaacgcccagggagccggtcgggtgcccgctgtgatctcgccacggagagcgacaagggccgggtggtcctgctgggcctgtcggagcttgtcgatgaagtcgaagcgcgaagcagagagggcaaggagctctccctccacggtgtcgcgtctggacagcgcgtcggcgacggtcgtgtccggcttgtactcgacggagaagtcgaagccagtagattgccaacccaatgttgctgcggaatggtggccaagcgctggtccaacagatacttcaagctgtagtgatccgtcttgactgtgaaacggcgcccccagaggtatggctgccagtggcgcaccgcctggaccaaaccaatgagctcacgctcgtaggctgccagggcttgatgtcgaggtgccaccggccggctgaagaaggcgatcggatgcccctcctagatgaggacagcaccaaacccgtgggacgacgcgtcgcactcgacgtcaaagggcttgtcaaaggccggcatagcgagcaccggcgccgaggtgaccgcctccttgagggcgaggaaggctgaggcagcctcaggcccccacacgacgccctccttcttgagtagcgcagcgatggagccgtagatgtggatgaacttgcggtagtattccgcgagcccaatgaagccgcgcaccacccgcgccgagcgaggtaccttccattcgtgaatggcctgcaccttggcggagtccatggccacccctgcctccgagatcgtgtggccgaggtaggcgacggagccgaccccgaacgcacacttggagcgcttgacgaagagggtgtgccgacgaagcttgctaaggacggtgcggaggtgacgcaggtggtcggtccatgacttgctgtagatcaagatgtcgtcaaagaaaacaagtacaaatcagcgaagaaacgggcgcaagacgtcgatcatgagcgcctgaaatgtggccagggcgttgcagagtccgaatgtgaaagtcgcctagagggggggtgaatagggcgaaactgaaacttacaaagttaatcacaactacaagccgggttagcgttagaaatataaatgagtccgcgagagagggcgcaaaacaaatcacaagcaaataaagagtgtgacacgcggatttgttttaccgaggttcggttctcgcaaacctactccccgttgaggtggtcacaaagaccgggtctctttcaaccctttccctctctcaaacggtcccttggaccaagtgagctttctcttctcaaatcaaccgggaacaaaacttccccgcaaggaccaccacacaattggtgtctcttgccttggttacaattaagttttgatcgcaagaaaagaatgagaaagaagaaagcaatccaagcgcaagagctcaaaagaacacaacaaatcactctcacttaacactaaagcttttgtggaattgggagaggttttgatcacttgggtgtgtcttgtattgaatgtctagctcttgtaagtggttggaagtgtgaaaacttggataacttgaatgtggggtggttgggggtatttataaccccaaccaccaaactagccgtttggtgtaggctgttgtcgcatggcgcacagtccggtgcgtcaccggacactgtccggtgcaccagccacgtcaccaggccgttgggttccgaccgttggagctctgactgctgggcccgcctggatgtccggcggcacaccggacatgcactgtagagtgtccggcgcgccacttcgcgcgtgcctgacttctgcgcgctctggcgcgcattaattgctgctgcaggtgaccgttggcgcgaagtagccgttgctccgctggctcatcggacagtccggtgtacaccggacatgtccggtgaattatagcggagcgaattcccgaagctggcgagttcagagccgctctcctctggagcaccggacactgaccggacagtccggtgaattatagcagagcgcctctgagttttcccgaaggtgaagagtttggcttggagtcccctggtgcaccggacactgtccggtggtgcaccggacactgtctggtggcacaccggacagtccgatgcgccagaccagggctgccttcggttatcccttgctctctttgttgaacccatttcttggtctttttattggctaagtgtgaacctttggcacctgtataacttatacactagagcaaactagttagtccaattatttgtgttgggcaattcaaccaccaaaatcaattaggaaataggtgtaagcctaattccctttcaatctccccctttttggtgattgatgccaacacaaaccaaagcaagtatagaagtgcataattgaactagtttgcataatgtaagtgcaaaggttgcttggaattgagccaatacaaatacttatagaatatgcatggattgtttctttattttcattattttggaccacgcttgcaccacatgttttgtttttgcaaattcttttgtaaatccttttcaaagttattttgcaaatagtcaaaggtaaatgaataagattttgcgaagcattttcaatatttgaatttttctctccttgtttcaaatgtttttcctttgactaagcaaaaactccccctcaataaattctcctcttattgttcaagagggttttaagatgttaattttgaaaatactaatctctcccccttttgaacacaataagataccaatttgaaaatcatatcaattgaaaatctctttctaaaattagtactaattgaaaaccaaaatttttaaatgggtggtggtgcggtccttttgctttgggctcatgctctctccccctttagcataaatcgccaaaaacaaaatcattagagcccttttaactactttctcccctttggcaaataaaacatatgagtgagaattataccaaagacggagtccttttgcttgggactcaggctttttttttctcgaaagcgcaggagaactgcgcatcattatattaagtagaaggaaaagagggtccaaaatagaccatagtacaaaagacctccccagaggggataaaaaaaccaaagaaaaaagaagagaaaaaacaaaaacaagagcaaacagatcctgaaaacaaaaccagcccatcagcgataaaccaggcagctaggtgcccctgatggttgcggcaagaaaggagagacccttagctcctgccatttcccacaactgttgttcctcccttgcctgacaaagagctgcagaaacactaggggagattccatcaaagacaatttggttccgatgattccaaataatccaggctcccaaggcaataagggagtttgacacccttcataatcatatctccagagccattgtctatcatctcccaccaacccgtaaaagacaccgtactaggtgtaggagccagattttgtagtctgaaaatgcacatcagccggaaccagaattctctcgcaaaaacacaagaaaccaaaatatgatccaaagattcagactcttggtcacaaagcggacacttctctggatgatcaagtcctctctttgccaacctatctgctgtccagcatttatttagcaccgataaccagaggaagaagtggcatttagagggggcccaagttttccaaactctttcatagtgaccgaaatgcacagccccgatgaacaacccatcatatgcagccttagcagaataagtcccatttgcagcaatactaaaagtatgtttatcttctatatctggcagcagctcaaaatctgaaattaaattccaaagatgaagataatccaataatactcccaccgagagtgatcctgtgatatcagcaatccatcttctatctgtcaatgcttcctgaaccgtccttctggtagtgatttttttcggaatgatatcaaataatctaggaaccaaatctgcaattttctgcccatgaatccatttatcagtccagaacaaagtattagccccattaccaacctttgaagtcaacaccatcgagaagaaagcccttgctttatccggaacctggataggaaagctgcaccaaggtcggttaggttcagtcttttggagccaaagccatctcatgcgcagggcccagataagttctttaagactagaaatgccaagaccgcccatctgtaggggtctacagactctgccccaggccaccaggcagtgaccacctctggcctccttgcgccctctccaaaggaaacttcttctaattttatcaatggccttaatagcccaagagggaatatttactgccatagcaagataaataagcattccggtaagcacatgctgaacttgcactttacggcctgctcttgtcatcaaatctgctttccagcctggcagctgatcagcaattctatccacaataggctgcacctgatccttggtgagatttttcagggacagaggcagccccaggtatttacacggaaaggtcgagatgccacaagggctctcccccaaagatggagagttgcccggagcgacgacgaaggatgagttacggagtggaagcctttgtcttcgccgaagactccaattccctttcaatatacctatgacttggtttgaaatttacttgaaaacatattagtcatagtacatgaaagagacatgatcaaaggtatatgaatgagctatgtgtgcaagacatcaaaagaagtttctagaatcaagaatatttagctcatgcctaagtttgttaaatgtttgttcatcaagtggcttggtaaagatatcgactaattgatctttagtattaatgtatgcaatctcgatatctcccttttgttggtgatcccttagaaagtgataccgaatggctatgtgtttagtgcggctatgctcaacgggattatccgccatgcggattgcactctaattatcacatagaagaggaacttcggttaatttgtaaccgtagtctctaagggtttgcctcatccaaagtagttgcgcgcaacaatggcctgcggcaatgtactcggcttcggcggtagaaagagctacggaattttgcttctttgaagcacaagacaccaaggatcttcccaagaactagcaagtccccgatgtgctctttctattaattttacaccctgcccaatcggcatccgaataaccaattaaatcaaatgtggatcccctaggataccaaagcccaaacttaggagtataaactaaatatctcaagattcgttttacggccgtaaggtgagcttccttagggtcggcttggaatcttgcacacatgcatacggaaagcataatatccggtcgagatgcacataaataaagtagagagccaatcatcgaccggtataccttttgatccacggacttaccttccgtgtcgaggtcgagatgcccattggttcccatgggtgtcttgatgggtttggcatccttcatcccaaacttgcttagaatatcttgagtatacttcgtttggcttaggaaggtgccctcttggagttgcttcacttgaaatcctaagaaatacttcaactcccccatcatagacatctcgaatttttgtgtcatgatcctactaaattcttcacatgtagactcgttagtagacccaaatataatatcatcaacataaatttggcatacaaacaagtctttttcaagagttttagtgaacaaagtaggatcggcctttccgactttgaatccattagtgataagaaaatctctaaggcattcataccatgctcttggggcttgcttgagcccataaagcgccttagagagtttataaacatggttagggtactcactatcttcaaagccgggaggttgctcaacatagacctcttccttgatcggtccattgagaaagacactcttcacgtccatttgataaagcttgaagccatggtaagtagcataggctaataatatacgaattgactcaagcctagctacgggtgcataggtttcaccgaaatccaaaccttcgacttgcgaatatcccttggccactgatagtcgcctagaggggggtgaatagggcgaaactggaatttacaaagctaatcacaactacaagctgggttagcgttagaaatatgattgagtccgcgagagagggtggaaaacaaatcgtaagcaaataagaagtgtgacacgcggatttgttttaccgaggttcggttctcgcaaacctactccccgttgaggaggccacaaaggccgggtctttttcaaccctttccctctctcaaacggtccctcggaccgagtgagctttctcttctcaatcaaatgggaacaaacttccccgcaaggaccaccacacaattggtgtctcttgccttggttacaattgagttgatcgcaagaaagattgaaagaaagcacgattgcaaaaagccaagcgacaagagcgacaaataacacacggatcactttctctctcaagtcactaatcactaatgatctcttttctcaattgtgaagcttggagagatggaggctttgaatgtgtcttggaatgaattgctagctcttgtattgaatgttgaaggttggaatgcttggttgaagtgaatggaggtggttgggattgtatttatagccaccaaccacttcctagccgttgctccattctgctgagcgcggacggtccgcccgcctggtccggacggtccgcccctgtagatcaacggctgaaaacgcaacggtcagcagtaacggctatatcaacggctatatcgcatttaatgcgtcgtcagatgtcagataaagtcaatcgcggacggtccgcccgcctggcccggacggtccgcgaggccgctataattcatttctctgaacccgtcaccttcgggtttttcggtttctcacctaccggacggcccgcgccttaggccggacggtccgcgcgagggctcggacggtccttgcttttcctctggacggtccgtagtggagacttgtatttttgcattggttctgtccgaagggtatcctggtgtcgcggacggtccgccgtaggggcccggatggtccgcgcttggcctgtttttccaaaaagcttctcctgtccggaataatctacggtattccagacagtcgatttagtatagttatagatgaaccttttgcacctgtagaacatataatctagagcaaactagttagtccaattgtttgtgttgggcgattcaaccaccaaaattaattagggactatgtgaaagcctaattccctttcaatctccccctttttggtgattgatgccaacacaagccaaagcaaatatagaagtgcataattaaactagtttgcataacgtaagtgcaaaggttgcttggaattgagccaataaatgttacttactagatatgcatggattgtttttttgtttttaacattttggaccacgcttgcgccacatgttttgtttttacaaattctcttgtaaatccttttcaaaggtcttttgcaaaatagtcaaaggtaaatgaataagattttgcgaagcattttcaagatttgaaatttttccattgtttcaaatgcttttccttgactaaacaaaactccccctaaatgagatcctcctcttagtgttcaagagggttttgatatatctttttttgaaaaactacttttctccccctttagaacacaataggataccaaatgaaaatactctttgaaaaaactaagtttttgaattcggtggtggtgcggtccttttgctttgggctcatattttctccccctttggcatgaatcgccaaaaacggaatcattagagcccttgagttacattctccctctttggtcaaaacaaatgagtgaagattataccaaagatggagtccttttgcttggtgctcatgctttctcccccaacaatggagggttgcttggagtgacggcgaaggatgagttacgtagtggaagcctttgtcttcgccgaagactccaattccctttcaatattcctatgacttggtttgaaattcacttgaaaacatattagtcatagcatatgaaggagatatgatcaaaggtatgcaaatgagctatgtgtgcaaatcaacaaaagaagttcctagaatcaagaatatttagctcatgcctaagtttgttaaaagtttgttcatcaagtggtttggtaaagatatcggctaattgacctttagtattaatgtaagaaatctcgatatctcccttttgttggtgatccctaagaaaatgataccgaatggctatgtgtttagtgcggctatgctcgacgggattatccgccatcttgattgcactctcattatcacatagcaaagggactttggttaatttgtaaccgtagtcccgcagggtttgcctcatccaaagcagttgcgcgcaacaatgtcctgcggcaatgtactcggcttcggcggtggaaagagccatcgaattttgcttctttgaagcccaagacaccaaggatcttcccaagaactggcaagtccccgatgtgctcttcctattgattttgcaccccgcccaatcggcatccgaataaccaatcaaatcaaatgtggatcccctaggataccaaagcccaaacttaggagtataacccaaatatctcaagattcgtttcacggccgtaaggtgagcttccttagggtcggcttggaatcttgcacacatgcatacagaaagcataatatccggtcgagatgcacataaatagagtaaagagcctatcatcgaccggtataccttttgatccacggacttacctcccgtgtcgaggtcgagatgcccattagttcccatgggtgtcttgatgggtttggcatccttcattccaaacttgcttagaatatcttgagtgtacttggtttggcttaggaaggtgccttcttggagttgcttcacttgaaatcctagaaaatacttcaactcccccatcatagacatctcgaacttttgagtcatgatcctactgaactcttcacatgtagactcgttagtagacccaaatataatatcatcaacataaatttggcatacaaacaagtcattctcaagagttttagtaaatagagtaggatcggcctttccgactttgaagccattagcaataagaaaatctctaaggcattcataccatgctctgggggcttgcttgagcccataaagcgccttagagagcttatagacatggttaggatactcactgtcttcaaagccgggaggttgctcaacatagacctcttccttgattggtccattgaggaaggcacttttcacgtccatttgataaagcttaaagccatggtaagtagcataggccaataatatgcgaattgactcaagcctagctacgggtgcataggtttcaccgaaatccaaaccttcaacttgggagtatcctttggccacaagtcgagctttgttccttgtcaccacaccatgctcatcttgcttgttgcggaagacccatttggttcctacaacattttggttaggacgtggaactaaatgccatacctcatttctagtgaaattgttgagctcctcttgcattgccaccacccaatctgaatcttgaagtgcttcctctatcctgtgtggctcaatagaggaaacaaaagagtaatgctcacaaaaatgtgcaacacgagatctagtagttacccccttatgaatgtcgccgaggatggtgtcgacggggtgatctcgttggattgcttggtggactcttgggtgtggcggccttcgttcctcttcctccttgtcttcctcatttgtatctcccccttgatcattgccatcatcttgaggtggctcatttgcttgatcttctacttcatcaacttgagcttcatcctcattttgagttggtggagatgcttgcgtggaggaggacggttgatcttgtgcatttggaggcttttcggattccttaggacacacgtccccaatggacatgttccttagtgcgatgcatggagcctcttcaatacctatctcatcaagatcaacttgctctacttgagagccgttagtttcatcaaacacaacgtcacatgagacttcaactagtccagtggacttgttaaagaccctgtatgcccttgtgtttgagtcataaccaagtaaaaagccttctacagtcttaggagcaaatttagattctctacctcttttaacaagaataaagcatttgctaccaaagactctaaaatatgagatgttgggctttttactagttaggagttcataggatgtcttcttgaggattcggtgtagatataaccggttgatggcgtagcaggcggtgttgaccgcctcggcccaaaaccgatcagaagtcttgtactcatcaagcatggtccttgccatgttcaatagagttcgattcttcctctctactacaccattttgttgaggtgtgtagggagaggagaactcatgcttgatgccctcctcctcaaggaagccttcaatttgtgagttcttgaactccgtccgttgtcgcttctaattttcttgatccttaagccgaactcattttgagcccgtctcaagaatccctttaaggtctcttgggtttgagatttttcctgcaaaaagaataaccaagtgaagcgagaataatcatccactattacaagacaataattactcccgccgatgcttatgtaagcaatcgggccaaatagatccatgtggagtagctcaagtggcctgtcggtcgtcatgatgttcttgtgtggatgatgagcaccaacttgctttcctgcctgacatgcgctacaaattctgtctttctcaaaatgaacatttgttagtcctaaaacgtgttctctctttagaagcttatgaagattcttcatcccaacatgggctagtcggcagtgccagagccaacccatgttagtcttagcaattaagcatgtgtcgagttcagctctatcaaagtctactaagtatagctgaccctctaacacacctttaaatgctattgaatcatcacttcttctaaagacagtgacacctatatcagtaaagagacagttgtagtccattttgcataattgagatacagaaagcaaattgtagtctaaagaatctacaagaaaaacattagaaatagtatggtcaggtgatatagcaattttacccaatcctttgaccaaaccttgatttccatccccgaatgtgatagctcgttggggatcttggtttttctcatatgaggagaacatcttctcccctgtcatgtggtttgtgcacccgctgtcgagtatccaacttgagcccccggatgcataaacctataaaacaagtttagttcttgactttaggtacccaaatggttttgggtcctttggcattagacacaagaactttgggtacccaaacacaagtctttgaccccttgtgcttgcccccaacatatttggcaactaccttgccggatttgttagtcaaaacataagatgcatcaaacgttttaaatgaaatgtcatgatcatttgatgcatttggagttcttttcttaggcaacttagcacgggttggttgcctagaactagatgtctcactcttatacataaaagcatggttagaaccagagtgagatttcctagaatgaattctcctaattttgttctcgggataaccggcagggtacaaaatgtaaccctcgttatcctgaggcatgggagccttgccctttacaaaattagacaatcttttaggaggggcattaagtttgatattgtctcccctttggaagccaatgccatccttgatgccagggcgtctcccactatagagcatacttctagcaaatttaaatttttcattttctaagttatgctcggcaattttagcatctaatttagctatatgatcattttgttgtttaattaaggccatgtgatcatgtatagcattaatgttaacatctctacatctagtacaaatagaagtgtgctcaacagtagatgtagagggtttgcaagattttagttctacaatcttagcatgcaatatttcatttttacttctaaggtcggaaatagtagcattgcaaacatcaaaatctttagtcttagcaattaatttttcattttcatttttaaggctaacaagagataagttcaattcttcaatcttagcaagtaaatcatcattattatttctaatattgggagttgaaacattacaaacatgagaatcaaccttagctaacaaattagcattttcatttctaagattgtctatcgtctcatggcaagtgcttagctcactagataatttttcacatttctcaatttctagagcataagcatttttaaccttaacatgctttttattttccttgattaggaagtcctcttgggagtccaagagatcatccttttcatgaatggcactaatcaattcattaagtttctctttttgttgcatgtttaagttggcaaaaagagtgcgcaaattatcttcctcatcactagcattttcatcactagaggattcatatctagtggaggatttagatttaaccttctttttgccgtcctttgccatgaggcacttgtggccgacgttggggaagagaagtcccttggtgacggcgatgttggcggcatcctcgtcgtcggaggagtcggtggagctctcgtccgagtcccactcgcggcacacgtgggcatcgccgcccctcttcttgtggtacctcttcttttctctcctcttgcccttcttgtcgttatccctgtcactgtcacttgataatggacatttagcaataaagtgaccgggcttaccacatttgtagcaaaccttcttggaacgagatttgtaatccttccccttccgttgcttgaggatttggtgaaagcttttgatgatcaaagccatctcctcattgtcgagctttgaagcgtcgataggttgtctacttggtgtagactcttccttcttctcctccgtcgccttgaaagccaccggttgtgcttcggacgtggagggatcatcaagctcgttgatcttctttgagcccttgatcatacattcaaagctcacaaaattcctgataacttcctcgggggtcattgatgtatatctaggattaccacgaattaattgaacttgagtggggttaaggaagatgagtgatctaagaataaccttaaccacctcgtggtcatcccatttcttgctcccgaggttgcgcacttggttcaccaaggttttgagctggttgtacatatcttgtggctcttccccttggcgaagacggaagcgaccgagctccccctcgatcgtttcccgcttggtgattttggtgagttcatcaccctcgtgcgcggtcttgagtaagtcccaaatctcctttgcattcttcaacccttgcactttgttgtattcctccttgcttagagaagcgaggagtatggttgtagtttgagagttgaagtgctcgatttgggccacttcgtcctcatcatagtcttcatcccctacggatggtacttgtgcaccaaactcaacaacatcccatatgcttttgtggagtgaggttagatgaaatcgcattaaatcactccacctagcgtaatcttcaccatcaaatgttggtggtttgcctaatgggacggaaagcaaaggtgtatgtttggaaatgcgagggtagcgtagagggatcttactatacttcttgcgctcttggcgcttagaagtggcggatgccgcgtcggagccggaggtggatggcgatgaagagtcggtctcgtagtagaccactttcctcatcctctttttcttgtccccacttcaacgcgtcttgtgagaagcggatttctccttcttctccttttggtgtgaagaagacttcttctccttccctatggaggagttcttcttctcctttctcttggtgcgggactcttccgatgaagtgctcccatggcttgtagtgggcttttcgccggtctccatctccttcttgacgtgatctcccgacatcacttcgagcggttaggctctaatgaagcaccgggctctgataccaattgatagtcgcctagagggggggtgaatagggcgaaactggaatttacaaagttaatcacaactacaagccgggttagcgttagaaatatgattgagtccgcgagagagggtggaaaacaaatcgcaagcaaataagaagtgtgacacgcggatttgttttaccgaggttcggttctcgcaaacctactccccgttgaggaggccacaaaggccgggtctttttcaaccctttccctctctcaaacggtccctcggaccaagtgagctttctcttctcaatcaaacgggaacaaacttccccgcaaggaccaccacacaattggtgtctcttgccttggttacaattgagttgatcgcaagaaagattgaaagaaagcacgattgcaaaaagccaagcgacaagagcgacaaataacacacggatcactttctctctcaagtcactaatcactaatgatctcttttctcaattgtgaagcttggagagatggaggctttgaatgtgtcttggaatgaattgctagctcttgtattgaatgttgaaggttggaatgcttggttgaagtgaatggaggtggttggggttgtatttatagccaccaaccacttcctagccgttgctccattctgctgagcgcggacggtccgcccgcctggtccggacggtccgcccctgtagatcaacggctgaaaacgcaacggtcagcagtaacggctatatcaacggctatatcgcatttaatgtgtcgtcagatgtcagataaagtcagtcgcggacggtccgcccgcctggcccggacggtccgcgaggccgctataattcatttctccgaacccgtcaccttcggggttttcggtttctcacctaccggacggtcagcgccttaggccggacggtccgcgcgagggctcggacggtccttgcttttcctccggacggtccgtagtggagacttgtatttttgcattggttctatccgaagggtatcctggtgtcgcggacggtccgccgtaggggcccggacggtccgcgcttggcctgtttttccaaaaagcttctcctgtccggaataatctacggtattccagacagtcgatttagtatagttatagatgaaccttttgcacctgtagaacatataatctagagcaaactagttagtccaattgtttgtgttgggcgattcaaccaccaaaattaattagggactatgtgaaagcctaattccctttcagccacaagtcgggctttgttccttatcaccacaccatgctcgtcttgcttgttgcggaaaacccatttggttcctacaacattttgattaggacgtggaactaaatgccatacctcattcctagtgaagttgttgagctcctcttgcatcgccaccacccaatccgaatcttgaagtgctttctctaccctgtgtggctcaatagaggaaacaaaagagtaatgctcacaaaaatgtgcaacacgagatctagtggttacccccttatgaatgtcgccaaggatggtgtcgacgggatgatctcgttggattgcttggtggactcttgggtgtggcggcctttgctcttcatcctccttttcttgatcatttgcatctccgccttgatcattgccgtcatcttgaggtggctcatttgcttgatcttgtacttcatcaacttgagcttcatcctcattttgagttggtggagatgcttgcgtggaggaggatggttgatcttgtgcatttggaggctcttcggattccttaggacacacatccccaatggacatgttccttagcgcgatgcacggagcctcttcatcacctatctcatcaagatcaacttgctctacttgagagccgttagtctcatcaaacacaacgtcacaagaaacttcaactagtcccgaggacttgttaaaggctctatatgcccttgtgttcgaatcatatcctagtaaaaagccttctacagtcttagtagcaaatttagattttctacctcttttaacaagaataaagcatttgctaccaaagactctaaaatatgaaatattgggctttttaccggttaggagttcatataatttcttcttgaggattcggtgtagatataaccggttgatggcgtagcaggcggtgttgaccgcctcggcccaaaaccgatccgaagtcttgtactcatcaagcatggttcttgccatgtccaatagagttctatttttcctctccactacaccattttgttgaggggtgtagggagaagagaactcatgcttgatgccctcctcctcaaggaagccttcaatttgagagttcttgaactccgtcccgttgtcgcttctaattttcttgatctttaagccgaactcattttgagcccgtctcaagaatccctttaaggtctcttgggtatgagatttttcctgcaaaaagaatacccaagtgaagcgagaataatcatccataataactagacagtacttactcccgccgatgcttatgtaagctatcgggccgaataggtccatgtgtaggagttccagtggcctgtcagtcgtcatgatgttcttgtgtggatgatgggcaccaacttgcttccctgcttggcatgcgctacagatcctgtctttctcaaaatgaacatttgttaatcctaaaatgtgctctccttttagaagcttatgaagattcttcatcccaacatgggctagtcggcggtgccagagccaacccatgttagtcttagcaattaagcatgtgtcgagttcagctctatcaaaatctaccaagtatagctgaccctctaacacacccttaaatgctattgaatcatcacttcttctaaagacagtgacacctacataagtaaaaagacagttgtaacccattttgcataattgagaaacggaaagcaaattgtaatctaaagaatctacaagaaaaacattggaaatagaatggtcaggagatatagcaattttatccaatcctttgaccaaaccttggtttccatccccgaatgtgatggctcgttggggatcttggtttttctcgtaggagaacattttcttctcccctgtcatgtggtttgtgcacccgctgtcgatgatccaacttgagcccccggatgcataaacctacaaaacaagtttagttcttcactttaggtacccaaatggttttgggtcctttggcattagatacaagaactttgggtaccaaacacaagtctttgaccccttgtgcttgcccccaacatatttggcaactaccttgccggatttgttagttaacacataagatgcatcaaaagttttaaatgaaatgctatgttcatttgatgcactaggagttttcttcttagacaacttagcacggggttgcctagagctagatgtctcacccttatacatgaatgcatggttagggccagagtgagacttcctagaatgaattctcttaattttgctctcgggataaccggcagggtacaaaatgtaaccctcgttatcctgaggcatgggagccttgcctttaacaaagttggacaatttcttaggaggggattaagtttgacattgtcccccttttggaagccaatgccatccttgatgccagggcgtcttccactataaagcatactacgagcaaatttaaattttttattttcaagttcatgctcggcaattttagcatctagtttagctatatgatcattttgttgtttaattaaagtcatgtgatcatgtatagcattaatatcaacatctctacatctagtgcaaatagaagtatgttcaacgatagatgtagagagtttgcaagattttaattgtacaaccttagcatgcaatatatcatttttacttctaaggtcggaaatggtagcattgcaaacgtcaaaatctttagccttagcaattaatttttcattttcattcctaagactagcaagagatatgttcaatttttcaatcttggcaagcaaatcatcattattatttctaagattgggaattggaacatcacaagcattagaatcaaccttaactaataaattagcattctcatttctaaggttgtctatagtctcatggcaagtgcttagctcactagataatttttcgcacttttctacttctagagcataagcatttttaactttaacatgcttcttgttttctttaataaggaagtcctcttgggagtccaagagatcatccttctcatggataacactaatcaattcatttaatttctctttttgttgcatgtttaagttgacaaaaagagtacgcaaattatcttcctcatcactagcattatcatcgctagaggattcatatctagtggaggatttggatttaaccttcttatttttgccgtcctttgccatgaggcacttgtggccgacgttggggaagaggagtcccttggtgacggcgatgttggcggcgtcctcgtcgtcggaggagtcgctagagctttcatcggagtcccactcgcgacaaacatgggcatcgccgcccttcttgtagtacctcttcttctcctttcttctccccttcttgtcgtcgcccctgtcactgtcactagatataggacattttgcaataaaatgaccgggcttaccacatttgtagcacactttcttggagcggggtttgtagtccttccccctcctttgtttgaggatttgacggaagctcttgatgacgagcgccatttcctcgttgtcgagctttgaggcgtcgattggttgtctactcggtgtagactccttctcctccgtcgccttaaatgcgaccggttgtgcttcggacgtggagggaccgtcaagctcgttgatcttccgtgagcccttgatcataaactcaaagctcacaaaattcccgattactttctcgggagtcattagtgtatatctaggattaccacgaattaattgtacttgagtagggttaaggaaaataagtgatcttagaataaccttaaccacctcgtggtcatcccatttcttgctcccgaggttgcgcacttgattcaccaaggttttgagccggttgtacatgtcttgaggctcctcccctcggccatggtgtgttgatcgccattgcccatggttgacggtgcagacgttgccttggacgaagaggaaggagatggaggcggcggctggaatggtggtgaggctgcggtggaagattgggtggaggtggtgggagaggatcgacgagactgagataccaggttgtcaagggcagtgagcccgaggatagggggaccttggctacgtagatcgtagccggtgtccgtgatggccggccgggttatacccccttgccgccgttcttcgtcggtgggttattcccctagccgccgacttaggtagaggaagagagaggattagatagtaatatctttcttaatttccaagtgtttgattacaacatatttatagcctccggctcaaccaaaaggagtaacaaactccactaattaaggaccaaccaaaatagctaaagatctccacatttatagcctttcggctcaaccaaaaggagtaacaaactccactaattaaggactaaccaaaatagctaaagatctcctacttttcctcctagccgctgctggaggtcgtgccctgcgtgcttgccgtgcgcgcagcagcgcgttcttaggatcggcccacgtcacgggccctatggcgcctggtgtacacttgtttgaacatgacattaacactcgacacttggtggcacaacaaggacagctgccctttggggtgtttctcggcctgtgcaagagaaacttctaatcttagtgcaaaactgtggggacgatacttccccaaactggttgagtttttctattatgatagaaaagggtagcattgatagtggttaatgagctttggataagttacaaatttctataacctgtatgattattagtaaaagtgctaaactcaaaataaacaaaacccataaactcacttactagtaatttcgggcttacttacacaagggtacattgttttttagcaaaaagaaactaagatcatagctagtgttcttgattcagcagcgatgctgcaaggaaaacttacctacacatttttgcagatcactcttcactgcatatcaattgcggcgacaaa

SEQ ID NO: 903 - DNA, 17252 bp, Zea mays
  Intron number 1 from transcript GRMZM2G389416_T01 (locus G RMZM2G389416) derived from phytozome v7.0 (chr-ID 2; pos 1 63774132 to 163791383 reverse strand)
agattgataggggatcgtccccaacgctcttaaccgtgagtgaacagttgtcatgacatatggtttgtgaaaacataccctataacaagataaaaaagtatttccattcgcaaaaatcacaacatcgataaatcaacaagatctacaaccacaaaaacgtcaggtctgctactccatgagattagcaacatcctccatcaggttgataggggatcatccccaacgctcttaaccatgagcggacgattatcaagacatatggtttgggaaaacataccctagaacgagataaaaagtatttccattcgcaaaaatcacaacatcgataaatcaacaagatctacaaccacaaaaacgtaaggtccgctactccatgagatcagcaacatcctccatcaggtttataggggatcgtccccaacactcttaaccgtgagtgaacggttgtcatgacatatggtgtcacacccggttttaaggaacaaagccgggtgcatctcatacatgcgccaagaagacaacatatacaataacagagtgtatagagataaatgtcataaaacatcagagtatttattacatagcggaagacttaatacaaaataaaagaataaacataaaacgaactaaggatcgttggcgccaatgtcaactgagaaacgccacctagatcagatcatactcctcgccttgtggctcctcctgaaccacctgttcttctcctgtgggggggggggggggtgtgagacagcaagagtgagctcacatacgttcatcgctcaacaagttgtggggaataatgtgacatgaactcaccaaaggtgggagttcatgtagtgtaaggctgatcaatgaaataaaggctgaagctgagcattgcttttagaagttggtcaaaattttattagcagttactaagtgtaagtgaataccaaaccatagtaataataagtaaaagtaataataaaataatcccaaatgcaatgatatgacagattaagtttaagttccataaattaatcatgtgagtgtccgagccgctcatgaccgtgagcacggctagtatactagttttacactctgcagaggttgcgcatctttacccacaagtcgtgttacccatttgccacggagttgatcagaccccatacacctctaccaaggaagcgaggcagggtaccactacgaggcctttacaaagttccattagcttcagaaaacccgctacagtttataggaagctccagtgcagggttcttgcctgaccgccatcgcagcaaaatcaacccaaggacctccctacactgaccactcccctactgcccttgcccctttcgggtaaggtagccctccactagctttcctagttaatcagccaagggcgtcccattaaacccttgtggtagcactgttttcccgggtggttctccatgttcccattaacataatgatcttatcatgaacataaaataatgaacagataatagaaagtgtaatcatgagtcataaatatctttatacccaaatccacataaagcaataacatgtactacccaaaaatttagtagtaaaaccagtggtgaaacaaggtataaagatagtcaaatctagggtaacctattgggtcccagcaaaattaacctatgcagatcattatgattaataagaacatgaatgggtaaaagaagtgatcaagggcacaacttgccttcaacgagcttctgctcagcagtctctaccagcagaacctcaggatcctctgtgacttgctcgtctactcgcatcaacacaatacatacataatatagcaaaacttaacatcacaccaaacatgtaaataaaatacacaataataatctagacaataaaataggaccataggaactggaatcattaaattcggagttatagattttaagttatgaattttccaaggttttgtgtatttaatacatgattaaacgatagataaattttaatgtgactttcatgccaaaacagaggcacaaatggatagacaatattattatgaaaatttaggaactggaatgggtcaatttggagttcatatgcattttctacaatttaaacaagttctaacatttatttatgcactaaaaataaatttctgattttcaatgctctctggattgggccacaaattccagaaagcacaggggtgttggcgcaaaagatcctaagacatagactagccagggaaggactgcgggttctatttcaaaaagactagggtttcttgtgtaagaatgccagcccgaaggggtatggtggaaatctggccgtccgattgggactcgatggcccagattagatccacaccaagcagcaattggtttcacccatcgcgtcggatccgagatcgacgaccgatggaggcccgcgacaccgattctctccctgaccgcaagatcccggttccacgaccacgatttaaacgacgaagagaaggtaatctgaggcctactcgaagccacacgatttaaaaggggcggcccagattctattttctcagagtctctgagatccacccgatcggatccaacggtccatattgtccactggaaacgttaagcctgcatctaatcctccccgttgcacagcgatccgacggcagcgatcgcgtcgtcttcacaggagagcggtcgccgagccgtacgcgcagacctcatcggcgcactcaccggcgagaacagctctgggtgtccagctcccaaacatcgaattcctaagtaaataatgatgccctaagtgccacaaactcatagaagtactacttacggtggtttatgccgtggaagactctggccacgacgcgcggcggcgacgcgttaccggcgagaaattcccgtggccaccctgggcttcttggtccgatacaccgcagcacgctacaccggccctaggcgaaactctacggccaacagaagggcaccgaagtgcaccagggccgaatcctcacggcagcgagaagaacagccgcggcgacggtgcagtggctgacgtggggaggggaatacggggtaggaagggacgagccccgaactcgcggccagctttatggatgcgcggtgacagggacaccgcaacggtcccgccacagcggcgcgaccggcgagcatgcagcggcggaagaaacgggccgactcaaccaaccgaggagacgaccgacccgaccagtgggacccctcagacagagaacgcggaaggctgacaacggacccgccccgtcagcgcggagagacggatgccaggttctccggattgggcccgcgcggatgggaagttagagtgggccgaaatggaggtctgaggcccaaatagccttttattcttttcctttttattctctatttcccttcctctattcccaaattcaatttgaatttcgaatttgaattcaaacttgtgcttaatttattctcaattcatgttgtggaatttagaataccaactttggaaatataattatattattatatttttatatcatttctcttcttctcattttcaaaaaccctaattttaattttagggtttaattccacttctaagaattattatcttattattattaccttattatttcattcgatgcacaaacatataactccaacatgatgcatattttttatcctttgttttagttcatctctaaattttatgtatgctctttttatgatgcaaatgaggcacatataataaggaaatcgctatataatccctttatacactttttgagtattacaaatcctaccccccttaaaaatattctcgtcctcgagatttaggaaggaccagtgaaaagatggggaaaatctatgcgaagctcttcttctctttcccaagttgcttcatcttcaccgtggtgactccattgaactttgcacatctttataaccttattcctcgtgacccgagtcagtgtatccagaatcttgatggggtactcagcataagtcaaatcctcctgaacactaaggtcctccattggtagctgctcctcaagtacccggaggcacttcttcagctgagatacatggaatacatcatgtacatctgacagatgatcgggtaactccagttgatatgcaacttctcccactcgctttaagatcaagaaaggtccaatgaagcgaggggacaactttcctttaactttgaatctcctcattccacgaagtggtgacatcttgaggtacacatgatcaccttcctcaaattccagtggtcttcttctattatctgcgtagctcttttgcctggtttgagctaccctcaaattttctcttatcattcgaacttgttcctctgcctcttgaataagctcaggtccaaagaattgtctttctccagtttgatcccaatacaggggagtcctgcatttcctgccatacaaagcctcaaatggtgacatcttcaaactggcctggtagctattattataagaaaactcagcatagggtaagctcttctcccaactgccaccatgcttgagagcacaagctcttaacatatcttccagcacttgattagtcctctctgtctgtccatcagtctggggatggtaggctgagctaaaattcaactttgtatccaagctctcatgcaacttcttccaaaatcgagaagtaaactgtgatcctcgatcagacacgatcttcttaggcactccatgtagacaaactatccgagtcatatacaattctgctagcttggctcccgtgtaattagtcctcacaggtatgaaacgagccacttttgtcaatctgtccacaattacccaaatagagtcatatcctgctggagtgcggggtagtccaacaataaaatccataccaatttcttcccatttccactcgggtatcttcaatgggtgcaatagtccagcggatctttgatgttcggccttgactctttaacacacatcacacttagccacatgtgcagcaacatctcttttcagtccataccaccaatacttttgcttcaaatcctgatacatcttagtgctaccagggtggatagaataatcagaatcatgggcttctttcaatatagtctcacggaggctatcaatctctggaacacatatccgatctttgaaccatatagtaccttgctcatccttcgtgaattccggaactcgaccttccgtaatcagatccttaatctcttgaattttagcatcaccaacctgacctttacgaatctcttgctccaaggtaggttccaactcaatggtaactccttcaatgtgagtaacaattcccaaattgagtctctcaaagtcctttgctaattcatcgggtagctggacgacaaaagcggagtgaacatgctctttccgactcaaggcatctgcaaccaaattcgccttgcccgggtgatagtgaatctccaaatcataatccttaataagctccaaccaacggcgttgcctaaggttgagatccttctgagtgaatatacacttcaaactcttatgatccgtgtatacttggcacttagttcccataatataatgtctccaaatcttaagtgcatgcacaacagcagccagttccaagtcatgagtggggtattttcagttcatgcttccgcaactgacgagatgcataggcaatcacatgtccttcttgcatgagcacacatccaagtccttggccacatgcatcacaataaatgtcaaatcccttctctagatctggcataatcaatactggtggcgacattagtctcttctttaattgatcaaaactattttggcacttctcgtcccacttgaactctcttcccttttccagaagcgaggtcataggcttagcaatcttagaaaatccttcaataaatctctgatagtatcctacaagccccaagaaactccgaatatccataactgtagtgggtatgctccacgccactatctccttgactttagcaggatccactgatatccctccattagaagtgatatatccaaggaatggcacctctccaatccaaaactcgcatttactatacttggcgtagagttggttatctcgcagcttctgtagcaccaatctcaggtgttcctcttggtcactttcactcttagaataggtaagaatatcgtcgataaatactacgacgaatctgtccaaatactccatgaacaccttattcatcaaattcataaaataagttggtgcattagttaatccaaatgacataacagtgaactcatataatccatatcgggttgagaaatccgtcttggaaatattcgatggcctaatcttcatttgatggtaacccgatcggagatcaatcttcgagaatactctagaacctctcatctgatcaaataggtcctcaatgcggggtaacgggtactttttcttcacagtgacatcattaagggacctataatccacacacatccgctatgatccatctttcttctgtacaaacagtaccggtgctccccaaggtgaggaactcggacgaatgtaccctgccccttgtaactccgttaactgcttcttcagttcctttaactcttctaccgacatcctgtatggtcgcttagatataggggcagttccaggcagaagatcaatcacaaactcaacttctctatcaggtggcatccctagtaactcttttgggaagacatccggaaaattcctaactgcacggatgttgtcacccacaaacttctcatctactaagaatgttgctagtctgatggtagtagttactgcaacttcaacttcaaatctttgccctttggaactggtgaattctacggttcacttagcatagtgtatatactgcctttgcctttcttaaccatgacgtaccaaggatcacgtctatagtgctctcttctaacactataggggtagcccatctaggttagaaatacagggtaagaaaggaagaattgtagacaaggcgagtaattacgagaaatgttactgcgggggatttattagttaagtagattagtgtgttatccactaaagctaatgcattaccttatggtggaacatgctaagatgcccaactatactatttcaatcaatcaaagaagcaaatcaggcattgatcatcagaacaatcaaccaacatttttaatagagaaaataattttaattttttgtcttggttccctatctcttaaaaagatcataatggtaggattccaaggtgtgaaatccatcttgtcttagagtagaaaaggtaagagtgatcagagtagagcagtagaaggtgagacaggatcaatataagtatagaaagaatcagagtaaggtaagtatagaatgaatcagagtaagacaagtagatgagggtttgtccatttctatctaggtttcgtcctacagtcaacatttcctctgataccacttttgtcacacccggttttaaggaacaaagccgggtgcatctcatacatgcgccaagaagacaacatatacaataacagagtgtatagagataaatgtcataaaacatcagagtatttattacatagcggaagacttaatacaaaataaaagaataaacataaaacgaactaaggatcgttggcgccaatgtcaactgagaaacgccacctagatcagatcatactcctcgccttgtggctcctcctgaaccacctgttcttctcctgtggggggggggggggggtgtgagacagcaagagtgagctcacatacgttcatcgctcaacaagttgtggggaataatgtgacatgaactcaccaaaggtgggagttcatgtagtgtaaggctgatcaatgaaataaaggctgaagctgagcattgcttttagaagttggtcaaaattttattagcagttactaagtgtaagtgaataccaaaccatagtaataataagtaaaagtaataataaaataatcccaaatgcaatgatatgacagattaagtttaagttccataaattaatcatgtgagtgtccgagccgctcatgaccgtgagcacggctagtataccagttttacactctgcagaggttgcgcatctttacccacaagtcatgttacccatttgccacggagttgatcagaccccatacacctctaccaaggaagcgaggcagggtaccactacgaggcctttacaaagttccactagcttcagaaaacccgctacagtttataggaagctccagtgcagggttcttgcctgaccgccatcgcagcaaaatcaacccaaggacctccctacactgaccactcccctactgcccttgcccctttcgggtaaggtagccctccactagctttcctagttaatcagccaagggcgtcccattaaacccttgtggtagcactgttttcccgggtggttctccatgttcccattaacataatgatcttatcatgaacataaaataatgaacagataatagaaagtgtaatcatgagtcataaatatctttatacccaaatccacataaagcaataacatgtactacccaaaaatttagtagtaaaaccaatggtgaaacaaggtataaagatagtcaaatctagggtaacctattgggtcccagcaaaattaacctatgcagatcattatgattaataagaacatgaatgggtaaaagaagtgatcaagggcacaacttgccttcaacgagcttctgctcagcagtctctaccagcagaacctcaggatcctctgtgacttgctcgtctactcgcatcaacacaatacatacataatatagcaaaaattaacatcacaccaaacatgtaaataaaatacacaataataatctagacaataaaataggatcataggaactggaatcattaaattcggagttatagattttaagttatgaattttccaaggttttgtgtatttaatacatgattaaacgatagataaattttaatgtgactttcatgccaaaacagaggcacaaatggatagacaatattattatgaaaatttaggaactggaatgggtcaatttggagttcatatgcattttctacaatttaaacaagttctaacatttatttatgcaccaaaaatcaatttctgattttcaatgctctctggattgggccacaaattccagaaagcgcaggggtgttggcgtaaaagatcctaagacatagactagccagggaaggactgcgggttctatttcaaaaagactagggtttcttgtgtaagaatgccagcccgaaggggtatggtggaaatttggctgtccgattgggactcgatggcccagattagatccacaccaagcagcaattggtttcacccatcgcgtcggatccgagatcgacgaccgatggaggcccgcgacaccgattctctccctgaccgcaagatcccggttccacgaccacgatttaaacgacgaagagaaggtaatctgaggcctactcgaagccacacgatttaaaaggggcgacccagattctattttctcagagtccctgagatccacccgatcggatccaacggtccatattgtccactggaaacgttaagcctgcatctaatcctcctcgttgcacagcgatccgacggcagcgatcgcgtcgtcttcacaggagagcggtcgccgagccgtacgcgcagacctcaccggcgcactcaccggcgagaacagctctgggtgtccagctcccaaacatcgaattcctaagtaaataatgatgccctaagtgccacaaactcatagaagtactacttacggtggtttatgccgtggaagactctggccacgacgcgcggcggcgacgcgttaccggcgagaaattcccgtggccaccctgggcttcttggtccgatacaccgcagcacgctacaccggccccaggcgaaactctacggccaatagaagggcaccgaagtgcaccagggccgaatcctcacggcagcgagaagaacagccgcggcgacggtgcagtggctgacgtggggaggggaatacggggtaggaagggacgagccccgaactcgcggccagctttatggatgcgcggtgacagggacaccgcaacggtcccgccacagcggcgcggccggcgagcatgcagcggcggaagaaacgggccgactcaaccaaccgaggagacgaccgacccgaccagtgggacccctcagacagagaacgcggaaggctgacaacggacccgccccgtcagcgcggagagacggacgccaggttctccggattgggcccgcgcggatgggaagttagagtgggccgaaatggaggtctgaggcccaaatagccttttattcttttcctttttattctctatttcccttcctctattcccaaattcaatttgaatttcgaatttgaattcaaacttgtgcttaatttattctcaattcatgttgtggaatttagaataccaactttggaaatataattatattattatatttttatatcatttctcttcttctcattttcaaaaaccctaattttaattttagggtttaattccacttctaagaattattatcttattattattaccttattatttcattcgatgcacaaacatataactccaacatgatgcatatttttttatcctttgttttagttcatctctaaattttatgtatgctctttttatgatgcaaacgaggcacatataataaggaaatcgctatataatccctttatacactttttgagtattacatatggtttgtgaaaacataccctagaatgagataaaaagtattttcattcgcaaaaatcacaacatcgataaatcaacaagatctacaaccacaaaaacgtcacgtccgctaccccatgagatcagcaacatcctccatcaggttgataggggatcgtccccaacgctcttaaccgtgagtgaacggttgtcatgacatatggtttgtgaaaacataccctagaacgagataaaaagtatttccattcacaaaaatcacaacatcgataaatcaacaagatctacaaccataaaaatgtcaggtccgctactccatgagataagcaacatcctccatcaggttgataggggatcgtccccaacgctcttaactgtgagtgaatgagagcacctagaggggggggggggtgaataggtgatcctgtaaaaacttgaaacttaaagccacaaacttgattaagtgttagcacaataaaatcaagtggctaaggagagctcttgtgaaccacaattgacacagtgagaacaagcacaagagacacagagatttatcccgtggttcggccaagtacaacacttgcctagtccacattgtggcgtcccaatggacgagagttgcactcaactcctttgaagtgatccaatgatcaacttgaataccacggtgttctttttcctttactctttcccgtttgcgaggaatctccacaacttggagcctctcgcccttacaatgagatgatcacaaagaagcacagatgtaagagtgggaagagcaacacacacaagcctcaaagcacgagcacaaacatgcacacaagtcacaacttgagctctaagatcacacacggagttctcaactcaagaggagctcaaattgctatcacaacgaatcaaatgtgctagagagatgtcttggtgctaagagatgatcaaagaatgcttggtgtactccttcatgcgcctaggggtcccttttatagccccaaggcagctaggagccgttgagagcaatccaggaaggcaaatcttgccttctgtcgactggtgcaccggacagtccggtgcaccaccggacactgtctggtgcagatatctttcctattctggcgcagctgaccgttgacgatttggagccgttggcgcaccggacactgtctggtgcacaccggacagtttggtgcccccttcagaccgttggcccggccacgcgtcacgcgcggattgcgcggccgaccgttggctcaccggacagtccggtgcaccaccggacagtccggtgatttatagtcgtacgccgccgtcgagacccgagagcgggcagttcaccagatgccagcctggcgcaccggacactgtccggtgcacccagactgagcagagtcttggctgctcgagccaagtcttttccatttgtcttttctctgattctagcacttagacaaatatgttagtacacaaaaaccgatgtactaagtctagaatcatacctttgtattgatttgcactttgtccaccatttgtcatagtttaacacataaccatttgtgttggacacttaatcaccaaaatacttagaaatggcccaagggcacatttccctttcaatctccccctttttggtgatttatgccaacacaacaaaaagcaacatatagaagtgcaacatcaatgcaaattagaacaagaatttgttttgattcaaatttgacatatttggatcattctttgccaccacttggtttgtttttgcaaatcaaactcaatttcctatctctaagtcaaattcacttattgaggcatagagaaaggtattccaagagaaattgatcaaagattcaaaaactcccccttttcccactatcaaccattctccccacaagagaccaatttttgacaataagagaccataagagtattttgacaaaacaaaagctctaactctactattttcaaaattctcaagtggtagctgatccatttgctttagccttaatttctccccctttggcatcaagcaccaaaacgagatcatttttggcccttaaacctcattacctcaccaaaatcttcaacttagagtaaaaaggcaataagagcatggaaatgaacttggagttagttactctctcatcggagtgcagtggaagtctttcatggtccaagtccatctttccctttcaatccacctttgagactaaatcaagcaagctctaacacatggttagtctcaaagagtcaagttgtagcacatctccccctaaatatgtgcatcacctgcaaatggacttgtgaggtccggggagtgcttgtacaacttgagcaccataaataaacaacaatatgcataaaggaacatgattaaaggcataaaacacatgtatgctataaatcaatccaagttccgcgaatctaagacatttagctcactacgcaacctgcaaaaggttgactcatctagaggcttggtaaagatatcggctagctggttctcggtgctaacataaaacactttgatatctcccttttgctggtggtctctcaaaaagtgatgccggatggctatgtgcttcgtgcggctatgttcaacaggattgtccgccatgcggattgcactctcattgtcacatagtagtgggactttgctcagattgtagccaaagtccccgagggtttgcctcatccaaagtagttgcgagcaacactgtcctgcgacaacatactcggcctcagcggtggatagggcaacgtaagtttgtttcttagaactccaagacacaagggaccttcctaagaattggcacatccctgatgtactcttcctatcaaccttacatccagcataatcagagtctgaatatccaatcaagtcaaaggtagacccctttggataccagatcccgaggcaaggcgtagcgactaaatatctaagatttcgcttcacggccactaagtgacactcccttggatcggattgaaatctagcacacatgcatacactaagcataatatccggtctactagcacataagtaaagcaaggaacctatcatagaccggtatgctttttgatcaacggacttacctcctttgttgaggtcgacgtgtccgtcaattcccattggagtctttgcgggcttggcgtccttcatcccaaaccgcttgatcaaatcttgcgtgtacttcgtttgggagatgaaagtgccgtccttgagttgcttcacttggaacccaaggaagtagttcaactcgcccatcatcgacatttcaaacttttgagtcatcaccctgctaaactcttcacaagacttttggttagtagaaccaaatattatgtcatcgacatagaattggcacacaaataagtcaccatcacaagtcttagtgaataaagttggatcggtgagagcacctagaggggggggtgaataggtgatcctgtaaaacttaaaacttaacaccacaaacttgattaagagttagaacaatgaaatcaagtgagtagagaggagagctcttgtgaagcacaatagacacaacaaggacaagcacaagagacacgaggatttatcccgtggttcggccaagtacaaaacttgcctactccacgttgtggcgtcccaacggacgagagttgcactcaactcctctcaagtgatccaatgatcaacttgaataccacggtgttcttctttactttactcttttccgtttgcgaggaatctccacaacttggagtctctcgcccttacaataagaatcacaatgaagaactagagtaagggagggaagcaacacactcaaatccatagcaaatacgcacacacaagatcaagacttgagctcaagacaatatctcgaggttctcactagaacggagtttaaatcactaagaatgtcgaacaagtgcgcaagaatgaagtgtgagtgatcaacaatgctcaaaggttgcttggtgttttcctccatgcgcctggggtcccttttatagccccaaggccgctaggagccgttgagagcatttcaagaaggcaattcttgcattctgtcgcttggcacaccggacattgtccggtgcggatttctttccttctttggcgaagccgaccgttggcgctttggagcctttggcgcaccggacagtccggtgccccttctgaccgttggctcttgccacgcatcgcgcgcggattatgcggccgaccgttggcccggtcgactgttggctcaccagacagtccggtgcaccaccggacagtccgatgatttatagccgtatgccgttaattgcttcccgagagcaaccagttgacagacgccggcctggcgcactggacactgtccggtgcaccaccggacagtccggtgcaccctgaccgagctgtctttggctgaacgaagccatctcttttccaacttgacttctcctgtttccagcacttagacacaatacattagtctccaaaacaatgtactaagtcttagaaacatacctttttacttgatttgcactttgtccatcactttgcatagattaacataagtccacttgtgttggcactcaatcaccaaaatacttagaaatggcccaagggcacatttccctttcaatctccccctttttggtgatttatgccaacacaataaaaagcaactaaaagaagtgcaacatcaatgcaaatgaaaacacaattttgttttgattcaaatttggcatatttggatcattctttgccaccacttggtttgtttttgcaaattagcctcaatttcctatctctaagtcaaacacacttgttgagacataaagaaaggtattccaagagaaattgatcaaggatttcaaaaactacccctttttcccataatcaaccattctccccacgagaggccaacttttgacaaaagagacaataagagatttttgacaaatcaaaagctctattctactattttcaaaattctcaagtggtagctgatccatttgttgctttggccttattttctccccctttggcatcaagcaccaaaacgggatcatttttggccctttaaccccattgcctcaccaaaatcttcaactaagagtaaaaatgcaataagagtacaaagatgaacttggaatgagttactctttcatcggagtgcaatggaagtcttgtatggtccaaatccacctttcccctttcaaacctcctttgagactaaattaagcaaactcaagcacacagttagtctcaaagggtcaagttgtagcacatctccccctaaatatgtgcatcacttgcaaatggacttgtgaggtccggggtgtgcttgtacaacttgagcaccataaataaacaacaaaatgcattaaggaacatgatcaaggcataaaacacatgtatgctataaatcaatccaggttccgcgaatctaagacatttagctcactacgcagcttgcaaaaggtcgactcatctagaggcttggtaaagatatcggctagctggttctcggtgctaacataaaacactttgatatctcccttttgctggtggtctctcaaaaagtgatgccggatgtcaatgtgctttgtgcggctgtgttcaacaggattatccgccatgcggataacactctcattaccacataggagtgggactttgctcagattgtagccaaagtccctgagggtttgcctcatccaaattagttgcgcgcaacactgtcctgcggcaacatactcggcctcagcggtggatagggcaacgaaagtttgtttcttagagctccacgacaccagggaccttcctaagaattggcacgtccccgatgtactcttcctatcgaccttacatccagcatagtcggagtctgaatatccaattaagtcaaaggtagacccctttggataccagatcccgaagcaaggcgtagcgactaaatatctaagaattcgcttcatggccactaagtgacacttccttggatcggattgaaatctagcacacatgcatacgctaagcataatttctggtctactagcacataaataaagtaaagaccctatcatagactagtatgccttttcactacacgacggttgatctttagcgacccttatttgggaccgacggttggtcgctaaaagttatagaccgacggttggtcgctaaatgcgtttatagcgacggtctgtgggtcgctaaaagtctagaaatttaacgacttatggtcggtcgctatagaggtaagtgtgtgactgatggtgggtcgctataggggtatgtgatttttgtgtttcttatttactcaccaaatcccatctaaaggcctactaaacaaacaaacgaaaccctattccacgcgcgcagccgccgtcacttctcccatggccgccccctccctcagccgtggcgggtgccgccgccacctcacccttggtgctcgccgagctcgccctcagccctgtcgtgcccctgcgcttggtcctcattggttccaggagaggtcggtgtcgtgcgcggagaggggcgacac

SEQ ID NO: 904 - DNA, 4523 bp, Zea mays
  Intron number 5 from transcript GRMZM2G169433_T01 (locus G RMZM2G169433) derived from phytozome v7.0 (chr-ID 5; pos 2 2205967 to 22210489 reverse strand)
gtactcaagaagaatctgctgccacttatgtttctgacccgtacgacaaggtgtacaacaacatccctgaagaaacacatatgctcaagcttgttcccaactgcggttattgcaccgcgaagaagtttgagtatgagccacctgggttttgttgtcgtggtgggaaggttgagctagctccagtggagacccctccccaactcaagaggttgtgggatagtgcagactctgatgctaggcactttcgtgataacattaggtttttcaatggccatttctctttcacttccctatactgttgcctcgatagtatgacaactaatgtaaggggttctggtatatacacgtttcgagcacagggcatgatgtaccacaatatcaagtcatttggtagggaaggtggggcagagcataaacaccttgagctttacttttatgatgacgatcccagcctcgagcatcggtaccgtaagtgccgtgaagagcatcaacagaaagacaaggaggttatcaaacagatagtcgacatactacgtggaaacccgtactccgagcaccttaggaccatgggccacgttgacaaccttgatgactatcgtatcgcgttgaaccttgaccagacgttgaaccagaagacatataacacacctctcacttcggaggtggtcgctgtctggatcgaagggagcgaagggcgaggccaattcagcaagagtgttatgctccatgggaaggacagttcaagacactgcatccgctcatatcatggatgctacgatgcactatcatatccattgttcttccctagaggcgaacttggatggcattcaaatatcccaaaggttggagtattcatggacgaagtggatgcataccgcgcgacacatagggcaagtaatgcaaatgatgaagatgcgggttagttgttaatttgatatttgagatatttgcacattattaactatgctttcgacatcactcacttttcaatccttgcatatgcagaatctcctagccatttatgtgtgtctgtacgtgactactactgctacaaattccagattcgtcccggggtattcaatccaatacttcatggaaagcggcttttccagcagttcgcggtcgacacatacataaagattgagagctctcgtttagatttcatacgtaagaaccaagatcgattaagggcagacctatatcagggcttggtggatagcatgctagatggagatattagagcagagaagattggcaagcgaactgtgctgtcgacatcgtttattggcggtcctcgtgacatgagacgtcggtatatgaatgctatggctctggtgcgcaagtttggtaaaccagacatctttcttaccatgacatgtaacccaaactgggatgagataaggagggagcttctccctgggcagacactgcaagatcattcggatcttgtagtgcgtgtctttcatgcaaagctacaggagttaaagcataggctgactaaataggatattcttggtaaggtccgagcctacgtctatgtcgtggagtttcagaagcggggtttgccgcatgcccattttctactcataatgcagaggaagtacaagctcacatgccctgagcagtatgaccttttgatctcagctgagatcccaagcaacaagtaccctgaactacgaaagatggttatcaagcatatgatgcatggcccgtgtgggtcgctaaaccctaactgcccatgcactaagggtcgtaaatcgtgcaagaatcattaccctcggaatttcagtgacacaaccttgcaagggaaggattcgtaccctgtttacagacgtcgtgacgatggtcgtaccgaaaaggttcgagggtgcgaattggacaatagatgggttgtcccttacaacccatacctccttcgtctcttcaactgtcacatcaatattgaggcatgtgggagcatcaaggctgttaaatacctgttcaagtacatatacaaaggccatgatcgtgcttctgttgttatgagagatgcgagcaaggcagatgatgatgtagatgagatcaagcagtacagagatgcaaggtgggtgactcctccagaagccttatggaggatatacggctttgagcttagtcagatatctccacctgtgatgcagttgcaactccatcttccaaacatgcacatggtgtcgtttcacgagcggcaaatggtcgagcgagtcgtcaaccgtccaggtgttgataggtcaatgctcacagcatattttgaggcgaatagtctacacaaggaggcttgtggcatcctgtatcgtgacttccctgaatggtacacttggcagagtggtaagggaaaagtatggcaacagaggaaacgagatacgggtggacaagtcggtagaatagtctctgctcatccggccgagggggagcgctactatcttcgtgttctcctaaaccatgtgactggcgccacttcctatgtggatctaaggacagtagatggtgtcacgctaccgacttttcgtgaggcagcagagagaaggggactgcttgagtcggacaacacactggatgagtgtctcactaaacgtgctcttttccagatgccatcggcgccgcgccgactttttgccacaatacttgtgtactgtgagccaagcgatgtggttgtactctggcagaaacacctagattctatgtccgaggactatcaacacaggaatccgtgcaaaactcatgttgagcagatggtattgattgacattaggaacatgctgcagtcaatgggaaaggacataaagacattccctcttcctcctatcatggatgcgtatgacgatgctattggtactgctagggaggtttacgaggaggaaattatcgaaccggcagcaggagatgtggctctcaaagactgtcttaacaaggaacagagggccgcctatgataagattctgtctgccgttgacactgatcagggcggattattctttgtggatggacctggtggcaccggaaagacttacctatatagagtgcttctcgcgacgctacgcagccagggcaagattgcagtggcaacagctacatctggcgttgctgcttccataatgcctggaggaagaaccgcccattcacgcttcaagatacctctcactattgacgatggcgctgtatgtagcttcacgaagcagagtggaaccgcagagttgctacggaaagcatctctcattatctgggacgaggcttctatgactaagagacaagtcgtggaggcactggacaatagcatgcgcgatataatgggtcgacccggactgccattcggtggtaaaaccattgtcttcggtggggatttcagacaggtcttgcctgttgttcgtaaagggtcaagggctcaagtggtcgcttcttcgctacggatgtcttacctatgggagtccatgtcccacttaaagcttgttaccaatatgagggcaaaaaacgacccttggtttgcggagtatttgctgcgtgtaggcggtggaactgaggacacaaatactgacggcgacatccgtcttcctgacgaggtatgtgtgccttacagtgggagtgacaacgatcttgacaacctaatagacttcgttttcccaaatctcaacaaaaatatgtctgattcgacctacatcacttcaagggcgatactgtcaacacggaacgaatgggtggatatgataaatgttaagatgattgatcgtttttcaaggggagcatatggtgtaccatagtttcgatagcgccatggatgatccccataactactacccacccgagttcctaaacacactgacgcctaatgggctgccaccacatgttttgaagctcaagattggatgccctgttatattgcttcggaatatagaccctgcgaatggactttgcaatggcaccaggctggtcgttcgtggtttccaaagaaatagcattgacgcagaaattgtactgggtcaacacgctggaaaacgcattttcctgccgcgtatacctctgtgtccctccgatgaagagatgttccctttccagttcaaaagaaagcagtttcctgtacggcttagctttgcaatgacggttaacaaagcacagggtcagactattcccaatgttggtgtatacttgcccgaaccagtgttctctcatggccaactatatgttgctctatctagagcgactgcccgatcaaacataaagattcttgcaatcccacccgttgatgggaaaaaacgtcgaggaagggtgtaagaaagaaccccacagtagattgtgggacatatactaagaacatcgtctacaaggaggtcctaacaaactagacctacggtaagtctgtcaaaactcaattgtttgtttcaataaaaatacaccgacacaagactaacactcaaatgtaattgtgacattttgatgaggagatgttaatgagctttataaaataatattgatttgtttgtaactgttctgtttgataggttggggtattc

SEQ ID NO: 905 - DNA, 8713 bp, Zea mays
  Intron number 1 from transcript GRMZM2G432653_T01 (locus G RMZM2G432653) derived from phytozome v7.0 (chr-ID 2; pos 2 20026011 to 220034723 reverse strand)
gtctctcagcctggctccacagaaacgagctcagggtccgtttcctgggagcctggctgctcgtggcgcaaggattccgcgtttaggtaattttggtcttctagcctggctgcatattgggtgacaaacaccagctcgtctgaaccaggctcatatggtacaagtgcgcaaacaaagtgagttgcagtagccgggacaggctagcctcagcctggtccaattgaacgagccgagctggccagggacagggtcacaaacacgcccgaagagttcttcgttaaaaatagagctcttcgttttttaatacgatctcgttatatatgaattctattgttcttgaattacttcgatcttttccaaagagaatagttcttctttcgtctccatcaactgtgtgatttgcaaaagcattaataaaaactattatgatattaaattcaacagtaagatagttagttatcatgaaatcaaaattattactatagacattattgacgtaccacgatgtcttttgccactaacatgttacctatgaaggtgttaataaattcacaaaaaaaacattatccacaaatattgttccctgttttccagtgtaaaacactaaaactggaaaaagtgatagattatactagtaaataacttgcgagatatgcaatcttcatacatacaggaaactttggcctaaacttatgaacttctattaggcttgtgtagctatgtccaagtactgtataacaaaaataatcgatccttggtacatgatcgaatcgtttagaggtttagagagttaagtttgaagaataagaattacaaattaagaaggtccatgacttcttgtaactctatatggttgacttcctcttggagtcaaagatgtgtaccattgaaacggtcgccggaagtattcagtataagttgtagaaatgttataagtaggaagaggaagttagactacatattcggttataaaaagatatgaggtagtggatggtaacataaaattctaatgtagaaatatgtatagcatatagtgctgcttgcacagaaacttgagcaatcttttcagaatgtcagcacaaaaatccataatagtttttttgataacaaccacaagagcgatgaaacccacgttgtcgggttccattgataactaatgttgtgaattttataaacaagttaaacttggtttattgttaatcgggaactgatgtctatgttgctcttaacatttttagtattggatgagctagtttagtttcaagtaatatatgttctatcctctctcctataactctaggctatatattcatacacttgtcaaaatatttagttttccaagtaaaattattatttagaatcatgcatgtgttgggctaagctaaaaaaatactatttcaaaaactaattcatttaatgatgacctaccatgaattcacctatataagttgaagttagcattgcaaaaatatttctaaggaatatgaacgatataggggctactaagggcactaaagtattcaattattatatatgaagaagattttctttgtgtccaaacaagaggagagttgtcgcaaaaggaagcagaagacgagagctgtcaaatagctcttaggaatttttggtcagaagtcattacactaaggaacgaagctctcgagaaagataagatattgttttccttagtggagagactgaaaactagcgaagccaaacttagtgcacaagccgaagctcacaaggccgaagttgaagatttaaagaagaaacttgcagaaacgagcgagaaatttgaagttgcaaaggcgaagcacgagataagcgaaattgaaagattaagggtacaaaaaatgtcgaagagctccacgactccaaagagagatgctacgaaatatccttagaatgcaccaaaactctaaaggatagttttgcaaaggtgggagcatatgcttccgagcagaaattcatccatggtgaccccgatggtgtcgtccagtggatcagcggagaagtcgaagcctttgacgaaatcttgagtgatcgaggagacttctgcgcattcgctggcgcacgaggggtcgcgacgaccttagagaaagccggttgtgaacatgttaaggctgcagctcagccgagatttgttttctcggcggatgacaccaaaaacccttcggctgaagcttctacgttgggcgggagattttactccgatgtgtggatgaagggcgttcgtgagatagttgatgaagcgattagaaaaaatgagaaagaatctcacgacgctcaagaagaagctaagcgagctgaagaggctgctgagcgcacaaggcttataggtacttttactggggtttagcttcagagttcattctcagcttcagaattaaccaacatttttttattgtagctgaactttcacctccaccggagccatataaccctgaagctgacacggccatgaaggaagcattaaacataataagaatcgctaatgaagctgttgacgaagctgtcgacaactggtaaatgaagctgctgaataagtgttgaaggaagactaaaattttgtattcttgaaagtgtaatgcttgtgtataaccttcgtcttttgtaagaaacaaacattaagtttttgtatgtatattaatgtaatatatttctttgtgatgcatgaaagcttcgtacgtaccgtttttgagctgttggcgaaaaaaacacattcccttcttttcatgcttcgcgaagaaaaagattctccttatgtcaccgctgacaaagattaacttcgtatagaaagatatatctgccgaaagcatgtcttgtgctatagtattcccttttttaatccgatcaacttttctgaaagggcaacttccctttgtttctccacatccttttggtgatgcaagatgatgtctgatgcgatgctatgcaatatgatatgacgcggaatgacatttgtgccaaaaataagaaaccacacggatacacacccagactctgcatccccttgggaacaactttggagtctcttcacctttttacttaggtggtatttcaactctgcatccccttaggaacgactttggagcttcttcacctttgatttaggtggtatttaagctctacatccacttaggaacgactttgaagcttcttcaccttttatttaggtggtattttagctctgcattctcttaggaatgacttttgagctttggaacttactctgcgctcccttgggaacggcttttgagctccggaacttactctgcgctccctaggaatgacttttgagctttggaacttactctgcgctcccttaggaacgacttttgagcttcggatggtcatattggatggtgtaacaacatgtttattacatcaagctgaaggttaaacctttctatattgtctttttagaaagaaatataaaaaacaaaaagagtaaaaatataacaaattagagctctatcttggccaaaacattgtgccatcttcagtagatatgccttgactcaggcacagtactgtaaactatgcgagcttcggactgctcccgaaggtcatgttgttgctgaggccgaagatgcccttctggttgctgatcatgacttgggggaggcgctagtggtgggggtggtggtaactgagcccaggaagcttgagagtgacttgttgaagcagcagaagccataggctgttgattgcctacgtatttcgggatatatggagagtagcacgaagcagtatgcaggacctgctttggctcattctgtcgtgcctcggcttcagcaatttccttttgcttttggatcgtgacttggcacatccttgttgtatgtcccttctcctcgccacagaaaaggtagaacaattttctgggctaattatcgtaccttcctccaccaaagcttctccccctctgcctcttggggctggtggtctgtaagaagtttgttgcatgcccgaagactgtgagttgtgctgactgctctgagcattattggccctatcgtcgctggcgttgggattgtggattgtcctgacatgcctgggatggagtcttcctccaaagcccctagtcatctcagaatatctattatatgtttcttcccttttttgacggaaatcattatcagcccggatgtactcatccatcttctgaagaagtttctccaaggcgtacggtggtttccttgcaaaatattgagctatgggtcctggtcgaagccccttgatcatggcctcaatgacaatttcattaggcgctgtaggcgcttgagctctcaaacgcaagaaccttcagacgtatgcctgcaggtactcctcatggtcttgcgtgcattggaacagggcctgagtagtgactggcttcgtttgaaagccctggaagctggtgactagcatgtccttcagcttctgccacgacgtaattgtccctggccggagataggaataccatgtctgagccacacttctgactgcaatgacgaaggacttcgccatgatggcagtgttgcccccatacgaggatattgttgcctcgtagctcatcaggaattgttttggatccgagtgcccatcatacatgggtaactgaggtggcttgtacgatggtggccacggggtagcctgcaattctgcagccagaggagaagcatcatcgaaagcgaagttaccatgatgaaaatcgtcgtaccattcatcttcgttgattgggctttcttgtcgaagctccctgtgttgaggccttcagtcttggtcatcttgagtaagatgacacatctcctcagctgcttcgtcaatcttcttctgaaggtccaccagccgaagcatttttttcctttttcctttgtacttgctggtgaattgcttctaagtccctgatctcctggtcaagctcctcctcatgaagtgtcgggctagtagcctttctcttttggttcctagcttctctcaaggaaagtgtgtcctgatttgtgtccagtggttgcaaagcagccgctggcactgttgtcttcttcggcagcatgacgaaggtggatgcttgccgaaggtggtcgtacaggttcaccggaggtgggcaccaatgtttgtcactcgttctcaaatgctatgaatcaagaccaaggcaacacgatcattaaagattaaagatcttcgtctttcgaagcattatctccacatggagataatactcctcagacgaagatcaaaaaagacaaacattcattatttaatatataaatgggaatgcaaaaagatgaagatcaatactggatcttcattaattcatttatattcatgttccataaaacataaatgaatatccgatagtattgatattacattgataccttcggcttgcttgaaggcgaaaatgcgagagagtgattacaatccagcgtgaacagtacgatgttactgttcatctatttataggcacgggacatagctagagcaaaagtacatttatgtcctcaacatttacacatgatcgtaatacaaattattaaggattaagtagtcttttcccctttcggtcatcatcattattcatcatcttcattgcgagccgaagctgttcatctggtggtaacttcggtgtttactcttatcctttttagatccgtcttcatcttgtgtgccttcgtcataagggagaagcttgtacttcggaagatgaagtttcctgtaatatcttgtgctgaaaataaatggttaattatgtttttaaggacctttgggaggagaaggcccccaacaggccccttctttgtcctgttgatgatgatgattgttggatatgtagtattttccccttctttctgtcctcctgttttcattcctcgaagatttatcaaagacatgtatttagcttcgtagctaagctttatttgcagatgaaggagcaatttctcttcttttctctatggttaatgcagaatgatatgatgcataatgatgtgatgacagaaaaaaatattataataagactatgcatccccttagaaatgactttggagtctcttcacctttgctaggtggtattttagctccgcatccccttaggaatgactttggagcttcttcacctttactaggtggtattttgagctcagcatccccgtaggaacgactttggagcttcttcacctttattaggtggtattttgagctctgcatccccataggaacgactttggagcttcttcagcacttttcgttacactcgatggtgtaacctcagatttattacaaagcatcgaaggatataccttcttaaagtatttttggggcaaatgtaaagcaaaagaaacaaaaaatataataggttctttgaagatagcttcagaattcttgatcaagcccctctggtgctttagtagatatgtttagattctggaatagtgttgttgactgttcgagcttcagactcttctctcgcatcacactattgctgatcttgatattgcccttgaggttgctgattataagacgaagatggaactaatgtggatggttgaggtaaggcccacctagccggagagtggcttgctgatgcaactaaatttgtaggttgttgaagtggatgttggttgcgtacatactctgggatgtatggagagtagtacgaagcagtatgaagaacttgcttcggctgattctgccttgcttcggcttcagctattttcttctgctttgtgacatgacaagtccttgttgtgtgtcccttatcctcttcacagaatagacagaatagtcttcctgactgagggttgtatcttcctccgaagcttcgtcctcctctgcctcttggggcttgtggtctgaaggaattctgatgtgtccctgttgattgggagtggctctactgcccttgattatgattgttcttgtcttcactttgacctgggttgtggattgttctaacatgtcttggatgaaatcttcccccaaagccccttgtcatctcagagtatctgtaagcttcctctcttctttgccgaaaatcattatcgaccctaatatactcgtccatttttttggagaagcttctctagagtccgaggaggcttcctagaaaaatactgcactgttggacctggccgaagccccttgatcattgcttcaatgtcaatttcatttggcaccgttggtgctttggctctgagacacaaaaaccttcggacgtaagcctataaatactcctcatggtcttgtgtgcattggaacaaagcttgagcaattaccagcttcatctgaaacctctggaaacttgtgatcaacatgtccttcaacttctgccaagatacaattgtgcctggcctgagagaagagtaccaggtctgagaaacactcctgactgccatgacgaaggacttggccatgacaactgtattgccaccataggatggtatggttgcttcgtagctcatgagaaattgcttcggatcgagtggccatcgtacatgggtaattggggtggcttgtacgaaggtggccatggtgctgcctgcatctctatagctagaggagaagcatcatcaaaaacaacattgtcatggttaaaatcttcataccgcatatctttgtggctagggccttcttatcgaaggtctccttgatgtggtcaatacccctagtgttcagtatcttgtgcgatgtgtcgcatttcctcagctgctttgtcgatcttcttttgtagcttagagaacataagcattttttcccttctcttctccacttgttttgtgtggcttcaaggttgttgatctcttgatccagctcctcatcttgtggagttgggctagcaaccttccttttctggcttcgggcttctcttaggaggattccatcttgattggtatctagaggagcaagaacaacccctgaccccattgtcttcggaggcatgatgaaggtggttgtggtcgaaagttagttcaccggaggtgggcgccaatgttggtcacttgttctcaattgctatacatagtcgaaaacaaggcaacacaatattaaatagatgatcaaccttcgtccttaagtagttatcccttcataataaccccttcgaagacgaaggttaggactcaatcaagtaaattatgacttaattgtgtaagtaaatatgtcaaagaatgtgaagaagataaacatgataacccatctcagatattttaatatcacgtttctcttctttcatgtaacaaatttacaatagtaccttcgactttatagagtaagttagaacgaaggtgttcaaggggaaagattacacacagcaattctacagtccaccaaaaggtactttatgcagagcactgttcatctatttactaggtgggtgcccgtgcgttgcgacggaaccatataataacttatgtacatataggtgagtgctcatgtgttgcaacggggacatataatatcacggtaacttatgtattatatgtctccgttgcaacgcacgggcactcacctagtatctagatatgaattataccgcattgccttttaacgtagggtgttagtcctgtgcattgtatataatcagcccatggggctcaatgcaatacaatataattctatgacaatacctcctctaacagttctggttcttattgtcacatctggtaatctgtttatgtgaaatattttcatatcaggttgcaaagaaacatcttgctggaaggattgatcg

SEQ ID NO: 906 - DNA, 1031 bp, Zea mays
  Intron number 1 from transcript GRMZM2G077897_T01 (locus G RMZM2G077897) derived from phytozome v7.0 (chr-ID 1; pos 6 8563997 to 68565027 reverse strand)
ccgggcaaggcgtgtccgtgcccctcggacaccgggtaaagctcactcctttctgctgtagttttgccagcttaatttggttttgacacagtgattttgtcgtcgaggctggtttcggtgaatttggttgacgggttctcggtgctgccgtcgcatggatgcgttcggctccgcggcccggaggcttttgctggtgccgtgggagatcttggtcggggtttggagctttcctggttttggctgtggttcctgtttagcgtcgcctaacgcaaggattggtttctgtcgtttggtagatatataaatattcggttaagaggatttggtttgagctcgtctgctatacgagctggaactggaattaggaggtgacacgcctttcctggttatagcttcgatgctaagataagctcgagtgcttgaggcccagcggctgcgatccatggattagaggcgacggtagaacagcaacaactctgagctagctgacccaatctcagcatcatcttgtttgatcatgacgttcttgctttgtttgctttggattttatcaaaagtagaaaactgttgcctttttatgtgttgttggaaagaccatttggctacacgaacggaacggaaagaggtttggtggaagtgtggaacagttgccgagcagtaattgctgagctggttcgtgactccgtgtcggtgagtgcccatggttcatgcttatagcaccggatcacacttctcctgtgctgcccgctgtcatctttactgcacacaagagtgtctgtggatggttccatggtatatgcacatgaaacggggtgattcataaattgctgaagtttttttagttttccatactgtatgaatggtagtgataataataaaactatctccgactacaaggaggtgtacggtatgagctcattctgcttagtttacccgtaataatatatgtgcagtttattttctgtaaggtgacattttttcctgaacttctgtttataggagtaaaaaacagtgaacgctaagctttggga

SEQ ID NO: 907 - DNA, 6799 bp, Zea mays
  Intron number 2 from transcript GRMZM2G431703_T02 (locus G RMZM2G431703) derived from phytozome v7.0 (chr-ID 5; pos 8 9852524 to 89859322)
atcatcgtcggctccggctgatccgtaaacctcaggtatactttccaatcacgttatacccctgctctggcttccactggatgtgtgtaattcggtagatctcttgtatcgagccacatgcttaggacaattcgttactgttacatctttttgtgtaaattgttctgccgagtttggtttgtgtggtaatttagatttggtgattggagattcgctgaatgagaattcagcataggtgtttatctgctgtctttaatggtatactgactattagtagtgcttgtgagatccaatatcctctaggattctcatactactataatggatgatcagattttttttatttgttctagactctagtagcttggtttggaagccaattatctgtttttacggggtattcccttgaaactgtggcattaatgaattcatgcatctatatggagacaattgcatatttaggactctaaacaatgcgcttcacaataatgccatccgaaagatttaattcgtaaaaaaggtactacaaaccttctctaattgattatactaccattcaacgtatattcttcctttttataatctgatctcatgtattttctctgcaacaagacagttttaccccttataaatctctcctctggccaacgtcccagcaacgagtgagcatccacccgacttagattagcagattcgtttcctctggttccttcatgaactcatgctgaaatggattgctaattaatgctattgtgggttgttcattactgattgatgagtactatacattacctgacatgccgtcacgacacaaatttccttgctttactcaattactcagtgtacaattggtgcatcaaaattcaaaatggacttgctgctgtgatttattcatgcttggatcgattcaggtggcataagtactaacttttttagcagttcaatgggcacatccattccatgcaactggcaaccctttttattttccttcgtcatcatgtgctaatccataagaaagcattgcagatcatgctttatttctctggagtaattagctttttttaggaatggtaattaaccgttttaaagagaaatacttctttgtttataccctgcccactgcccgtcgcggcgcggtggcgtccccgccccctgcccggcgcggtgcggtggcggctctacccggtgtggcgcggtggccgtcgcgtgaacagccgtggaggagagaggcgtggtggcggccctgtccggctcggcgagagaacgcgaaatctcagaggaagatagatctcgaggaagatagagacaaccgagggagaggtaggggcaattttgacttttagatgataaatacatggaaacaaattataaaaaggaacaatacatgttaaatggtagtataatcaattataatatatttatagtcccttttttacgaatacaatctttcgaatggcatttgtgcgaagcgcgatatttagagtcccaaatatgcaattctctccatctatatggcatcatttaactgtggcaagaacagtgttttgtttaaaaaaatgagagggcagttgataatttgttcggactgcatttgtttgcatgtagattgtagaatcattcctgacgtttcctattcactgttgctgtgcggtaatgcaattgacatatagtcacacagtgtagatcctggttggagttatgctagcctgttcatgctttctacattcactatgtttttgctgctatcaatgctcataaacaaaaaacagagaataacccatttgttaactatgtgaaacacagtgactggctagtctgggtgccttttagatcattcggggtttgattaaagaatatgaaggtctgaattctgctgatagagatagacaatggaaatatatggtgtgcttgtatctgtgcatcctgcataattttcagatatatttttgcatgtggtaaatatggtatatttaacaactgacacatgttaccttctattgcaaaccatggtttggatgctcctttgtgcagttggcacagtggaaattttatatttgatatggtacagtgctagttttgcataatgttccctgaatcaccttgcattcccaatttttggaatttatggattagtgagatgaccaagttttgtgttcattgttcaatccactgatgttctgtgtttctggagtttgatgctttctattgtcctcccaacgaatgcaatctctactaactattaagacaatagtgtagaccattttctatgcccccgcctcccgctctgcgcaagccccatatccccgcgaaagctgcaactgcctcccccgctgcgacgtgggcagggagggtcagaactttgggtggcaggtctgtgctcatgggcagacgacatcgcagcgaccgaaggttacgagtagcgagacgagaagtcgaagtccaggcatccagggcctcccttgcttccgccggcgtcgcagagcggagacacttacgcgcgctcgaggtcgtcgggatcgggatccccgcggcggctcctgcggcagccgcgacggcgagcagggccagcgccgccacgccgatccccggggcacaccgcccacgccacatcccctacgcagcccacgcgcaaccaggtctcctcgacccagatctctgccccggcccgtccttctcctcgcggcccacacgacccgcaaaactaattcggtcgcaaatgaggcacggaagcagagagggacagagggggacgtgctcacgcgtgaggaagtaggagacggcgaagatgcagagcgcccaccagacggtgcacagttttgcctcctcgatcagatcgtcgacgctctccatcctcttccgcatctcggcctgcgcgcgcgccacgacgcggcccggcccgtgggaggcggcgagggatccggtgggaccgattaacggatgtggaatccccgtaacgagctccgccttcgccggagaagaaggccgtgccgggcggtgccggcggcgactcgcctccacggcgatttttatttctgggttattttgtctttttttggagttttcttaggatttgtagaaacgtgcccggggtctcgaaccagcctgtgtgctctgttgtgaggcccacctagcgaatgcgtgtagccgaatgccatgtgggtccatatagccacgctccacgctcacgagtggggtctttatgtgatggttcgacatttccaccgtcccacgaggagaaatttggattcatgtcattatgaaacttaattcgttcaaatgacattataaaaacacgcttcacataaaaatcattatctccactaactattaagacaatagtgtagactattttttatgcccccacctctctctctgcgcacgccccatctccccccacgaaagctgcaactgcctccccagctgcgacgtgagcagagagctccaacaagaccctctaaagggttctctaccctaaatatagaggatcaaacggtcctctacgctctccagcagcgtcctctaaacggtcctctaaatttagaggacgttgctggattctctatatataaagtttctctaaacaatcatctatctatttgaatactttaaataaccgatttagcaaaactaaaatatgtataatatatttgagagtatgacaaacacgtatgtataaaaaataaaaataaaaaatgtctataatataggtatttgagtatagaggacgtgatttagaggatgttgttggagagaaagtagatatagaagatagaatcttttagatgagactgtaaaggacagatatagaggatgaatatagaggacgttgctggagacagccggctagctccagcaaggcaccctaaagggttctgtatcctaaatatagaggatcaaaaggtcctctatgtcctccagcagcgtcctctaaacggttctctaaatttagaggagttgttggattttctatatatatatatagagtttctctaaacggtcctctatctatttgaatactttaaataaccgatttagcaaaactgaaatatgtacaatatatttgagagtatgacaaatacatatatatataaaaaataaaaataaaaaatgtctctaatatagatatttgagtatagaggacgtgatttagaggacgttgttggagaggaaggagatatagagaatgaaatttttttaaaagagactgtaaaggacggatatagaggatagatatagagaacgttgctggagacagcctcagaactttgggtggcagatctgtctattgcagaagtgctcatgcgcagacgacatcgtagcgaccgaggattacgagtggcgagacgagaagtcgaagtccaggcatccagggcctcccttgcttccgccggcatcgcagagcggagacacttacgcgcgctcgaggtcgttgggatcgggatcccccgtggcggctcctgcaacagccgcgacggcgagcagggccagcgccgccacgctgatccccggggcacaccgcccacgccacatcccctacgcagcccacgcgcaactaggtctcctcgacctagatctctaccccggtccgtccttctcctcacggcccacacggcccctccactcgcactacaacaaccacgacaacaatgacgtgcggcgggctacacgttcgggcgctccttccaggcatccaacttactccctccagctctggtcccccgcgctatgaaggtgtcgtgcagctgcgcacaggtggatgtggtccagcgcgggcgggtgcttcttgtagtggaaggtggcgacgaggatggcgagggcgtggacgtggttgacggagacggcgaactggtcctgcagcatgcgcgcgcgctcctcgcacatgctgacgagcccctcctccgccttgcgcagcgccgcgtggcggaagtaggagtgcaggaacaccccgagcgccgtggcccccagcaccgctacggcgatcagcttcgccttcaaggtccagtcgttgccatcctccgcgtccttccccgcctcctccgctggcgccggcgccgaaaccgtcgcggcctcccctccgcctcccacccccatcctagaggccaaggcaggtccccgccaccgcagctctcacatacgctgcaccacaggccaccgaccactcctgcttccaccgtccggcgcccacgctgtctcctctctgtgagaatccgagctctcctctcccgctgctttgatgtgttattttggtgtgttttttgttggcttgtgacttttcgcgacccgggagaaagcagccaggcttcgagtgaatcgaatttcctggatttcacgagatacgctgccactaaaataacatcgtggttattttctctctcgacgctacgggcgcgcgtgatggggtgtgggcatgggtcccggccttttgcgcctcactccactcgcccaccccaccctaccccgcgccgtgccgccgttgccggtggccgcggcttgtgttgttgtcgcgttgctttccagccccactcccttgtcgtccgccgggctcgggcacgaactgccgagccaaccggccacgggggcacatcgtgtactctgcacgcctggtgattggtgaattcgttcggggtctccttacgtgattggtggggccgagcggtcgcgggcagtggttgagcaggtgtgagcgcgcgtcgtcgtctcgtgtgtcgtgtgattttgttgcattgcctggccggccggccggacggcctgccaggcgccagctcgtgcccgcataggctgaggcctaggggtgggagccgggcagccgaagcggcggggaaacgcaaatctggcgcggcccggaaaaggctgcgacctgcaagtgcaagggggagggagtgtgggagcatgaggcaatggtcatcaacagtcaacaatgcgccatgtccccagacaaatctttctaccgatgcgctctgctttgcttcgcttcgtggtcgtggctgccatcactggtgctctgtcaaaaacacgggtgaagtgcgattactggtcaggaaaccctttctatcccctcttccattattcggtttgaaagagcctctctctctctcccatgagcaccatgcagttgattactgcaccttgtttttcttcatactgagattattgcgcttttttgcctggccctggaactggccctcgagaagccaagattattgcatcgggctcgtgtttggttgcaggatagtggagcagcagttcgtgcgtgcggcctccaagcgtagagtatactagatgattgttataaaagaatttgtgcgatattaaggtcgataataaatatgatgttcattcttatgtaatcattgtgcactatcattttgtcgaatattttatatatcgttgcaacacacatgcatctaactatcataaaatttatgtatgctaggatcacaaatgaattacaaaacattttcttctaacaatataacacacatttatcgtgatattatatactcccgttgcaacgtacgggtatttacctagtaaaatgatgatgagttgtgtacaatgtaatcacggttaactattttgccatgaaaaaatggacgtgttgttctgtgacctggtcgacactaatgttgtcagccgaaacttgctgccccgaatgtctttcatgacgagctttagatgaacatctcctaacgttattttcttggctcctaatttctcttccatgaccgagctttagatgaacatcccctaacgctattttcttggctctgatgcaggctagtggctgcaggagtggaca

SEQ ID NO: 908 - DNA, 827 bp, Zea mays
  Intron number 9 from transcript GRMZM2G061988_T01 (locus G RMZM2G061988) derived from phytozome v7.0 (chr-ID 1; pos 1 40050609 to 140051435 reverse strand)
ttgctggattgagcgttgcggcagcccttgcggaggtaaggccatcgggcactgcgtgctgctctccaactgaatttgcaatgttttattagtttcttctgtttaatgtgcctcaacctcagcaaatcaggagatttggcaaacggaccaaaaatatccatgtccatttaccatttttaatgttagtgatcctggttcctcgattatgaggtttagtttggaaatcaggcttctgtaggttttgcaaattgtatcgtatacatgctgtcacttgtttggtactctcctgcctgacttgatcaagtagaaggtagttattttaggggcaggctcgtatcaaggatcctaaatctattctatgattgaaattgaatatagtagctgttttttttgcgaatgtattagtgatgttgcatagttgatgtgtgctactctgcaagtcataaaatttcacaattaaattttacacaaaattatcaggatttgagtttagatatagatttgttttgctcttgttgagtgaaattggaactagcatttcttgttaagtgattcgagataccttctgatgatacctaaaagtgcataaaagaactacttactgtgtctgcttagatgcgatttaagaacttccactaagtagtatgaatggagggaaaaccatacaatgtgctgtatatgttctgtaggacctcatattctgtgcttacatatattagttttagtttcccttcttaaatctatctttctttaaaaatataagttttgtgcctgctcacttgctgttttctgcaaatgttcataatcaacacaggtttacaagttga

SEQ ID NO: 909 - DNA, 12087 bp, Zea mays
  Intron number 3 from transcript GRMZM2G142697_T01 (locus G RMZM2G142697) derived from phytozome v7.0 (chr-ID 2; pos 1 24059150 to 124071236 reverse strand)
tggcttccaggtaataatgagatggaatgaatgtttctcttcactttagcttgtgtatggctgtttccttttttttggttctgggtaagttttttcacatgatatttttacggtgcatttcatgcccctggtgttgaaatactacattagcgtcataggtggtctgagaatgctcagtcagaagtgcctagcaaaatcttgtgctggaaaatggttgctatttttgttgagctgaaagaatttagcatgtagtagcatttattaccccttttttgtgggtttggtaaactggttactggtattaatttgagatggaatgaatgtttctctttactctagcttgtgtatggctgtttccttttttttgttctgggtaagttttttcacatgatatttttacgttgcatttcacgcccctggtgttgaaatactacattagcgtcataggtggtctgagaatggtcagtcagaagtgcctagcaaaatcctgcgctggaaaatggttgctatttttattgagctgaaagaatttagcatgtagtagcatttattaccattttttgcgggtttggtaaactggttactggtattaatttgccacttgctagtatcggtccaagttatgatagaatatgagctgccagatgttggattaatggtagaggtacaagggtgtacaatgtataggcaaggatcacccaatcaatggagatccttgtttaatctaaagcacccaatcaatagagatccttgcttaatctgtgatcaactaccataaacaccaaggcacatatgaccatggtttttaaagcggtaaggcggtccaaggcgttggaccaccgcctggacgcctaggcggcgcctaggcgttagaccaccgcccggacgcctaggcgacgccttaagaacagagcatatggcagacatgaccaacacatatgagagacataatcagcttaattacatagtctaacacaaggctctagctactccctgcaatccaacttgtatggcattttggtttttctagctatgtagcttttgctatgcactttgatatatactatgtctaggtacatattaagggagtgtttgaagtttgaatgcactagagctaatagttagttggctaaaaaatgctagtggaattggctagctcactattagctaatttgctaaaagtagctaatagctgaactatttgcttgactgtttgcatgtcttcagctaattttagcagctaactattagctgtagtgcattcaaatatagcctaagttcaatctaatctagaaactagaatagataaaacatcttacaatttggaacagaggaagtactttctaactcatttatgctatccagattgaaatgttggactaggactttggttgtgtacttgtgttatcttattatcttcgtataagacggaggagaattgacccagaataatctactctagagaaactaccgactactaactgagaaccaccagattggttatcctttagagaaggccgcccccaccactgccaacaatgaagccttttattccaaacaagttgggttaggctagagttaaaaacccaatagaactcacaagtcatggtttagtcgtaagatcagagggcgctcatcccttgctcggtccatgaaaatgagataacataggcttttgatatctactctgtaaacaagcctgggttcaatccctgcttcttcgaggccttatcctgaaagaggtcaacaactcttttttgtaaagccttttgttcactggtcttcacttcaagcaattcctttagttcaagtctgctgcaattggtaataggggataagcaattggtaataggggataagcaattggtagtcgtaggctcactcacctctagctctttccctatgatgaccccatccttgtatcaccaaaatgttccatcttccagaaaagatgattcattccagaaagattccagaatatgttaatctttttcgaaaacgcaggagagctgcgtatcattatattaagaagaaaaggtgaggcgagaagaaacctcgtacaacacacaaacccacatacagtaggctagagggagaaggagaaaattaacaacaaaagacatctagacccgtgaccatggagactcaaaataaagattaccgactgaattactggagcataaggatgctagataaatcactggctccagccctacaccagagatgagactcatccttgacccaattgatgaccatgttgggactaggctgcacaccattaaaaacacaacggttgcggtgattccagatggcccaagcaccaataatgatcaaagaattcaagcccttgttcaaccctttgtttgttggatcaacaggagctgcggcaactccttcccaccaatcctcaaaggaagagcacgcaaggttaggagcaaggtgccgcaacccaacagatttcataatctgaaaccagactgcccgtgaaaaaacgcatgaaaccaacaagtggtttaacgtctcttcctcttgatcacttagggtacaaaattgagggtgaggcagtcctctctttgctaggcggtctgctgtccagcagcgatcgtgggccacaagccacatgaagaacttgcatttactaggagcccatgatttccaaatcctttcccaaggtttaaaagttgttgctccaagaaagaatccggtatatgccgatttggccgaatagaaacctgagcttgaaagccgccaactatgcttattctattgatctggttctaagacccagtctgcaatgaggtcccaaaccttgaggaagtcagacaaaacatttacagtgatagctcctctaatgtcatgtacccagttccttgaattgagggcatcgtggacattcctcattttagccctagaagagaccagcttgaccaaatgagaggccatctaacatagactctggccatcgatccaattatctgtccaaaacaaggtgttttaccgttgcccaccatcgaagagattgctgccgagaagaaggccttaaccgaaggatgaacatttattttaaaggatgcccaaggtctgccagtatcattttttttcagctagagccagcgtaatctaagagcccaactcataaatgcaggtttaatatacccaatcctccaaattcttttagtctagtaaccttgttccaagctaccaagcagtgtcctcccaaagcttctttcctccctctccacaggaaattccttctgatcttgtcaattgctttgaaaacccaaggaatgtccatggccatcattaagtaaatagtcattgaagacaggacagtctggacaataatcaatcttccagctctagtcaacagatcaactttccatcaggaggcgatgtgcaattttatcaatgaatggttgtaggtgctgtctgccaagcttctttaaggatagaggcacccccaaatatttataggggaagttggcaacaacgcatgacaacagattatgaatggtatctagatttccaacagcacagtggatggggaaaacgctgctctttgccatatttactttgagcccagattcctcaccaaaaatcctgagaatgtccatggtgattactaaatcaagtgccaccgggtggaggaagatcaccacatcatcagcataaagagaaatacggttatgaactgaattttctgtcagaggctccagcaaaccatcatcagcagccttcttaattaagtagcacagtacatccataactaggatgaacaacattggggagagagggtccccttgccgaagacctcgtctatgaatatttttttgacctggcttaccattaagcattatttgagaagaagcagaagcaagaagaatgctaacaatatcgcaccaaatttgcccaaaacccaaatgcttaaagacctccaggaggaagggccacgagacagagtcaaaagctttggtgatatccaacctaaggaggatccttgcacattttttctggtgaaacatctttgttgtctgttgcacaagcatgaaattgtccaggatggatctgcctttaataaaagcactttgattctgagataccatattatccaggtgttccgtcagcctatttgccaaaagcttagtaatgagcttagcaaaggagtggaccaagcttataggccgaaaatctttgacatgacatacttcatcttttttgggtagaagaatgatgtaggctgaattgagaagttccagatttccccgattcctgttccaaacagccatagtagctgccataatatctcctttaataatatgccagcacgacttataaaatttcccggtaaaaccatccgggccaggagccttgtttgaaggtagagataagactgttttccagacttcatcttccgtgaaagggctatccagcgaagagagatcatgagtaggaatttggagatgatctaaatcaatagtatgaactcggtcagacgaacatctcagcagattgtggaaaaatcacttagagtttcctccttgtcctcatgccttgactttatcaaaccattgtcggataacaagttaccaataaaattcttgcctttgcggtatgggaacatatctggtgctcaaaggggtacggtgctcacgtgcacattttaaatctggaacatccatttcgtatctaacagcagcaccaattttgtgaaaaaccccttccacctttcctttcctggtgggagttcttcctaaaattagccggtttcgtggaaagcaagatggatgcaccagatttaaaatatgcacatgagcaccgtacccctttgagcacctgatacgttcccttgcggtatttagcgtggaggtggaagaaggcagtattaacatccccctcaaccaacaaggtgatcctagagcggctccgagccatagaacgttgcaaggttgaaagggccacaatgtgacaatcaagctgcttcaacaaccaattttctagcacagacaagggtctgttatcttgagcagactgcagcttgtgcataatttcccgcgccatcccaagctgagaggagatatgacccacccttttttgagaccacctttggagacgcctgacggtggctctaaacttcttggaaagggtttcaaaagggcaaggggaggaaggaacagaattccaagcagcctccattgtcgtaataaaatcaggcaattttgtccaatgggattcaaaatgaaatctgctgcggccatgcgtcaaaacctggagcccaagaagcaaagggcaatgatccgaacctgtgctagcactttgcagaagactattaggaaaaagctgctcccaatctgatgagcaaaacattctgtcaagtttgacgagagtaggcgtatcttggcgattagaccaagtgaatttccgaccatgcagagccaattcttttaaacctagatcattaatgaaccttctgaatctctccataagctgcctgttaaaattgccagagctcttgtcttcatctctgtagatgaggttaaaatcacccattaggatccagggtccaggacaagcagatctcacatcccgaagttcttggcttcttgcataaactgaattttgttactgtcgccttgaggcccatacacgcaagtcaaccaccaaggaggatgatctcttggactaaactgaattgacacactatgctgatccacccgagatgcgctggctggaccaatttcattcctccaggccacgagaatcccaccactagttccaactgagggaagaaacaacttgtgcacaaaattactcccaagtgcagatagggtagtatgcatagggatttcagccatcttggtttcttggatacaaaccacattagcattaaaggagtttaccaaattacgaacagaatcctgacgagctctagagtttaggcctcgcacgttccaacacacaatatttgaaggattcatgataacaaatagaagaaaatctcgaccaacaaagatagaggcatgatcaaccgctcaacacacacctaaaccagggggtgtccatccgaaaagggcagcaagggcctggacatgagacggagggaggggctgatcaaaaagcctgctataattatccaaggcctcctgactgatgccttcgctttcatcaatcacatgcagtgttctcattattttcttcttaaatttgatctgaccgtcactgaaggtagactggaattcaactccaatcccagcaatgcgcctactacggcgtggaggttctgctgaagcaattggggtccccggtctgacggccagaggagctggtaaaatgtgaacaactgtttcacaaccttgtcactgaaagaagatctaagcctgccaggggaatgcagttcagaaggcatggaagcatcagcatcacagacattgtcattgccattggtagggacagactgaactacagccaatgaatcaagatgatgttgcggtctctggtcccttcttgaataaaccatcaagggcttgcaataccgagggcaagagggatcaggaaagaaaacaggtcgaaccaatggcgctgcagactccgtgagggaccaattcatcagagccgaacagtccataagtgaataatccgtagaatccagaccatcatatgagaggagaaccgagccaggcacatccgacactgcccccgaagcctcagggagtgttggcgcagcagctggcaacccctctgcaagaaacgaggtagtcctaggcgccaccagctctactaccgaagcatcagggagggctggcgcatcaactggtcccaccaacgtcggaaatgaggcatccactgccattaaggaagaaaccgaggggttagcaggcgccaccaaagcaataaccccaccagctaggagaactggtttattaactggtctgccagccgccgagcataaatgtacgcgtgtccctaggcgagattgaacaggtgtagaagctgatatctgggactccgtgagggagcagctcaatagagccgaacagtcttcaaggggtaatctgcggcatcaatagagacgagaaccctccacacgcggcctactctgcacccgaagcatcaaggagatttgacacagtagctggccccaccatcacaggaaacaaggtagatccaggcaccgccagctctacaaccgaagcatcagggagagctggcgcatcaactggtccaaccagtgtcggaaacgaggcatcatcaactagtgcaatcaacgtcggaaacgaggcatcaactgccattaaggaagagactgaggggtttgcaggcgccaccagagcattaaccgcatcagttgggagaactctgccagctgccgagctgaaatggacgcgcggccccaggcgattgtgaacaggtgcacggtccgttgaagactgggaattgaaacgacgcttctgcaggctcttggaatcctggtcactttcttcattccgacggtctggcggcgacgacgaaaaatggggaggaggaagtacctcaggcgaactcctagggcgggaaacaaggattgaaattgggtaaaccactgtgcgcgtgggagacggttcgtcgcctaactaaatcggaggctcctccacgtggagatccaataatgaaggcagatcgccaggattatcacaccaaacactcagtttgaacgcagacagatcagaaccgccaacagaatcaaggtgcaactcatgaacaaggcaatgttcgacgagaagttgctcatctgtatgcaaaccccaaagatgaaacggaaggctgcggagctcaatatctagccgatgaggcagtgtccctcccccattagccatgaactgacgggattacctcttgatgtgcatccgaagaggagaaacgtagaatgactgacccccacgagcatccgatcagccatctccacgttgggaagcaaggcgacgaaagtgttcggtgcaacccggcgaaggtcgagcgcatcatccttaagatcaaatctcgaagtgagcgcatcatagacttctacggcacagccagaacgccccatgcccacaacggagataacaagagcacgccagaggtcatcttcagcttgggcaatcctcctagaacgtttgaagaagcgccgaggcggggaacggggcatagaaatggcgcggacagcctccggtgggggtcgaggtagcacaccggaagggacgccgtggccctcagcaccagccgcacaattgggtcttcgccgtctatgcccccgacgagtgcgcatgtgtccgccgccgccagagcccgcaccaatgccaccaccagaacatgcgatgttgccaccttcgtggccgtcagcaatgcattccgaggcacccatagaaggcaaggcgtgggagacaggccgccacaccttggaccgcagaggcttgggaggtgtcgtccgccggtgcgggcacacgtgagcacggtgcccttgcagcccgtaggagaagcacctcaccggacaacggcacaccgccgcgcaatgggagggggagaaatagttgaagcacttcccacacaggtcgacaaggataggtctgggtggaggcttcaaagggcggggacggcgccagcgagcacgtcgactaacgaccttcacccagccatcgccggcaacggggtgagagaccaacggtgtggaggagacaagcacgtccttatacgaaggcaaccccccaggttggtcaccgccatcatcgcgccatcgttgggcttggaacggccagcaggccacgaagttggagaggaagagaaggatcctgacgccggggaggggagggctgtggtcgccgggcctggagtagacgtcggcgtggggctctgggtggtttggtcgccggggggagggggtggaggagggcagggggcgggagcattgtatgttgtccctagaagatgttaatcgtaagcaagaagattgtttatgaagaaaaaacaaaaattcatattctgatacataagaattatatacgaatcgaaataatcttattttcttttttcaaaagaaaatggatttcattgaagtaataaaactattccaattcgaataatagtggggaaagaatcacatgtcatatggatagctagtttccatgcacttctattcaaggctaaacttttgggtatgttatatcatttcaagtttccttttactgcctcttcccatgtcaacttcggtctttctttttctctcttctcattactatcacatcttgatcttggccttctgctaggaccatccgcaacaactgatttggtggtttacactgatgctaattgggctagctgccttggtacgcgcaggtctacctcgggctatgctgcgttccttggtgacaacctgattttctggtcttccaagcgtcagaacaccttctcgaggtctagtgctgaagctgagtatcgaggtgtggcgaatggagttgccgaagctacgtggctgcgccaactcctcttggaactccatgccctctccgtcgcgctactctagtgtattgcgacaacatcagtgttgtctacatgtcttccaaccccgtcgagcatcaacacaccaagcacatcgagattgatcttcactttgtcagagaacgagttgctgtcgttgatctttgggtcctacatgtgtcgacgacatcatagtatgtagacatcttcaccaagggcttcctatcctcagtctttaccgaattcaggactagtctgaacgtgcgcagtggttgacgatctgactgcggggggtggggggtagcatgcgctatattaggcatggaccttcctatgtttggtaggtcccttgggtttggtagtggcagcacatgcttgttgccttgtgcgcctcctccctgtttggttgtgtattaggcaaggatttcgtttcctattccagtgggcatccttgcctatatgtactcgactcgagccttgctctcaataatcattcaccaattcccctagtccactgtctcactatatatatatatatatatatatagttgtagcagcatcatatgttcaaaattcaaatgcaagtcataagattaaatcaatcgaagagcagctcaagatgaggccgaggcaggcacaatactgctgaacaagtaaacaaccaaaagaacagatggattactgtctgaagaggtgttcatctccgttggagtctgaactctggacagaggaggacgatcggggttgatggaggagtggaggatggctgcggctgcaggagaatggtcatgactgcagaaggccgtcgcacattggagcagaggcgccgcacaatggaggctcgaacagagagcctctgtagccgctgcgcgatggagcgacagacgcacagcagggcggcgggagaggaaggcggcgacactggagaaggggcaatgtagcaagggcgctgagcagggcgcatgccacgtacaggtgccggcggctacaatgctgtgtatccaggactacaggtagggcaaaacaatgtatttagacctttagagatggtgggtcgacccatacaaaagagactggatactggcccaaaaaggacaaaattagtcggtcataaccctagtgggacgactaatcgcgattagtcagggaataggacgactaatcgcttcctaatcgccctagtcgagtcgaagaccctgatcgagcttactccagtcataaggccgactaatcgtgattaatcagacgactttaaaaccttagtaaagctccaatagtacttatgtatctcgttgagtcttttgacggcaacaactctccactattgttttttaggggaaactctccactattgttgatcagttttttcaaggtacaaagggtgaggaacatgtttatagtttatcatactaactcttttgagaattcagtagcatatttacttcgagaggttgatgccattgctgacctgcacttcaataccaagaaaatagtgaagtggtccaagatctttgagagcaaaatctgttctcagatttttgaacaaggatgaaacagcaacctgtgaagatctcgctgcaataatattatccacatataccaacaaaacccaaatacttgctgctcaataattgctgaccacagtgtgaactcagggtatctccgtcttcttgtcaccctcgtcaccgtcgaaacttcaatcttctctgccggagtaccatatgtgccaagataaccttgcagctgggtgtcctggaggatgggcagaacttgcgccctccagatcataatttctcttgttgagtttctctggaattgtttgtcccagcagaagttgtgaaccgacagagaaagttgaagaacttgccatgacagattgatttttggcggctagggttagggtttctggatagtcctagcagctagggtttaggaggtggctctaatagcatgagagaaaactaccagattggttaagcttatatcctccataagatcccgtgtgatgtatatttatatgggcataaattgccaacacggtgttgtccaactcagttacaatactggtaacacggattaggatcctatatctagtcttgttcggttacaactctatctataattagagtacatatttatctttacaaaaaaggcatgcatacctgaataattaatccttctatattctaacactagctaatctgtaagaaacatttgcttttaagctttgaaaatttattctaaaacgttcattagttcaaaaagaactggtgaaaatgtggaaattttttcaacaaatttgaacacccgttgttagctatacaatttgcttgtagtttctgaaactgtgttatgtgcttggtttagtttaaggataccataatttctctgtcacatcgaggacttgtgcttatcttcaaaactgcagatcttctttgtcttctcatgtaataatggtttattgatgagtcatttagcatggacattgaaattatgtttgattaattgctaaaatggttagttttctatacatatatgttcttgattgttgacattcttttcctggcacttttcagtgtgcacttctctatactactgtat

SEQ ID NO: 910 - DNA, 871 bp, Zea mays
  Intron number 17 from transcript GRMZM2G300709_T02 (locus GRMZM2G300709) derived from phytozome v7.0 (chr-ID 7; pos 168681911 to 168682781 reverse strand)
aactagaaggtttggttagttgcaaacagaaagaggtaagtaacatgtgttcctttgacctttggttttcgtagtagtctggatttaattatttagcactggtcaatcatgaattcatgatatattgttaaccaggatgcattgtctcacgctattcacaatgttgctgttgtatatgtactttgatgcgaaaggacctctagctgagttggttaggtggtttaagtagcacttctcaggtcctgagttcgaatcccagtggaaacaaattttagattgatgtttaaaaagtgtcactcgttggttctcttggttgtgtgcacatgagatgaattgacctagggggaatcctcgtgtagggactgagagtgctcaaatcacaagtaaagatctggcttataggggcagactctcatgctttcttggtcgggccaacttcttcttaatataataccgtgggggcggtctttcccctaccggacgagtatatgtcctctgattgcaatgaggttcagcatttgtaccgaattcaaatgtcatgctacctagttggttttcctcgttaggctattattcaatacaagaactattatttatgctagaaaccatagcttatgctatgatacatcagatgccatctatttacttaaaaagaaaggattaatgacctgaacgcttaaattttgtgctgcactgtgatagattatttccttgaagaaattttgacagcttatcatttctctgggaaataagatacaagtgattatgctgtgttttgtcatgcttaactatattctgtactattttttgtccaatatccatctacttcctgtaaagtttatgtttttttctctctcctttgaccacagat

SEQ ID NO: 911 - DNA, 1577 bp, Zea mays
  Intron number 2 from transcript GRMZM2G119916_T01 (locus G RMZM2G119916) derived from phytozome v7.0 (chr-ID 2; pos 3 182724 to 3184300 reverse strand)
caagaagaaagaggtttgcccttgtgtcatcccggttcctctgtaattttgtgtgacggtacacgatacttttcctctcttccccgttcctctgtaagtctctagttaatcttgggaggtcaggtgatacatatacggatgtaccgatatacgtcagtttctgtttggtgtccgagatctctcagttgagcaagtttaggacttcttttttttttctgggttcacattcctgtttcaaggatgattatccttcggtttaagtttttttcttcatctacatataggttgaccccctgcccatctagtatcctgactgcagaagtgattctaatgatatgagtgatgctcatttcttcgtagatactagcagttgcatgcacatgagcaaaggactagagttttcgaacttgtagtgataaaatctccaaccaagatctgctctgctccaatgtctgcattcttgactattgtggcctgagtactactaaataatcatacatatggtacttaccattttacaagggtcaaataattacatcctctcactaccattttttttatcgttgccctgtcttatgatttctgaaccttccatagtagtatagtacttactgaccttcccaaattacaaaggccacacacacatgagcaaaaagatgaattctcctattatgataataaaagtagtaaatcattgtgtcttgaaacctaaatagggttacatactactacaatcattatataaatttggataaggtctctagtcacagatgaactcaatgtgtcccactcatgcactttagcaaatctgataagtttttttttaccgggaaactgtaggggaaaccctacagcagaaattttattgaaaagagagataccctagggcagagactgtacagaaaagacaagctataatacaagcaaactagagaccagaaagccaagaatttacagcagcagcagtcatgggattagatctgagtaagttaagcctaagagtgtccacgaaatttttctttcaagatgtgagcgctggggcctctcctctaaagattttaccatttcttttcttccaaatctcccaagctgccactgagaaaatttccatgaagaatggatatccaaataaacctctggccttttccaacatctgaaagaaacccgtcgagtgatcccatataatccccgcgtagcgccagcaagcattgctatattgacattcaaagaattgtatgtgccaacaaatagtaataaaaacgcacatgtccagtgagccttattttattttaacaaattgaaatggctcctctcttattgaagtactagaagtccaggctatttgattcattaatctgaactagcgcgcgtaccgtgtaccaagattttgcttttaacttgagtgcttcttttggtactattttcttgataccggttagcactctataactctatatatagacttggttgccagatttttctttccatgttatttcatttgtgttaggtatcttatcccctttgtgtttcaatgttttgcagagggaggctcggctggaacggaataaaaccagatc

SEQ ID NO: 912 - DNA, 428 bp, Zea mays
  Intron number 1 from transcript GRMZM5G885982_T01 (locus G RMZM5G885982) derived from phytozome v7.0 (chr-ID 2; pos 1 7075986 to 17076413 reverse strand)
ctattcaggttgttcattcgtgcagcctactttcacagttttaacacttgcgatcttctagtttctacaacatagaattagtttcattgaacccaccatgaaatatgtcttaattgtgccttttgtttagttttgtagatgctaatagattaataaatttttctatgagcttgatcaaaattagagtaattaatggccgctaggctgctgcaaactcggtaacaagaaaatccaaattgaagttaggattcatccatttaattcttcctgtctcttttttacatgttcatgatttgccattttctttcttacccacaatagtgttgtctctgcaccttatcatacatggtaattaacattagtgaagctgagtcttttttttgtggaactctgtatcctatcctattttgacatgcccatggtgtagt

SEQ ID NO: 913 - DNA, 3006 bp, Zea mays
  Intron number 2 from transcript GRMZM2G018619_T02 (locus G RMZM2G018619) derived from phytozome v7.0 (chr-ID 9; pos 7 6756544 to 76759549)
agcaggtggcgtggactgaataagactttctgaaggttagtaggtttctttgttttgactcacgttgatcatttagcctgggaggagcagatcggccatttttcctttctcttgtttgcatgcagacttcctgcccagttcagttaatttagtagtcaaaaccgtaaaatgcacacaatgcaatatatagctatattttgtacacttattgttttctaaaatttaatcgtcttggaccctgctataaataggtatttatgtcaaaaacaggtttatcgaacatggtcacctcaaattagaactgatgcttatgaaattgatttttgcactcttacacttagcccataagtttggctattcgtcttgttctactgcactgaatttctgaggagtgaagagtcttcactccatttttcttttcttcattccaccattttgtaaacttcttgttagcttgttctgccagttatttagatggacatgtctatgattgggaccaatcattgtgattgggattttttgtcatttgtttacatacttgcagtgattctttgttttatatgctgatcatgtatccatgtcatctatattactgtctcaattgtttacaaaaaatgatgcttcaagatgtgatgcaccagcaccttgtattatcgataaattttcttcttcaagagtgttaaggaaatgacctgccacaatttgtattaactagtgcttgttagtgacataattatttaagacaaaactccaatagaaaaggctgccaaaataacacctaatctttgaagaatggctgaattgattaaggcaaaacaaagatatactaattgcttaaactaatggactttacaataatgtctgagcacctttctaggtttttgttgtatttatgtgccatggaactagatttttcaagcttgggtgtgatggggattctaaggggcaggtgggttctgtgtaagaagtctagacaactttgtagagcaattttggtggcattttgttaatgcaacaaaaactaattagcacaaatgaggagtccatgcaaagtacatcgaagtgatttgacacttgtgatcatggaagaactagggctagaaatcaagccaacacaagtggaggcttgttttgctgacaaatgctagctcattcgagctaacgagctagctcgttaacaaatcgagctgagatgctagctcaactagtgacaaaattgaaatgagccgagccgaccacgagccgagcgagctgacgagccacgagtattttgtccagccctagacgcctgtggttaacattgtgcactgctgcatgtgacttgttcatattgaagcactagagtcttgggttggttccagcccttctgggttatctatcggcacatcagctatcgaccaatctataccgaccattgttcgcccttatctaccactctatggcaacatcctttaccatcaatctacatccacctcatcgccacatcaacttttcttctatagttttttagttgaaatgaaacattgtgatttactctagttcaaatacatttgtttacataattaagtaaatgaaataacataatttgagacaacaatttaaaattacatggctcaagcataataataatagatacatgaaactacataacttaaacattaaaacaaaaaatcataaatacaatctaattatagattaaatttcaagtttttttcaattcaaatggttaaaaaatagctagctgacttgacgcaggcatatatcaatcagaacacaccatgttactaaaggcggacgttaccgagtaccgaccggttcggtcccaacacaggtaccaacttgttaaggtggatggcagcaccaccgaccagacggtccaaccgacccgcactggaaccgtggtggtcggtagcgtccgtgtgtcaggggttggtagtgccctgggctggaacccgccttagcacgaattgtacaggatctgacaggtgcacatagaaagtctgcagctttgcatgtagcaatgaaaacaagggtctattcaaacaacaatggctaatcgtagtcaagaattgtattactacctccgttctcgaatatttgtcgccggctagttcatttttgaactaaaacgcgacaaataaaaaagaacggagggaatatttaacagtggttggtacttcctgattagtgattttatatgagactagggcttattgactataataacctgcatgtagttgtctgctgtcttaactcttatgctgttccttccaccaatatcccactacaacacaagcaatttgatgcaatgaattccatttaacaacatgatgacctagtggatggtcgatgagctagtaatgctttttgttgagtgctacatctatcactattgttttttttttgtaagaaagttgacttattgttttttttgttagcattctgtataataaagtgacagtgatctaatggtatccttgtgcttaagtggagttcgttattactttttgttttggctgtaccgctgtagcactgttgttgctgttaggagtgaattctatacttcccatctcaagtggagtaattgccattgtctcattggtgcttgattattttaatatatcatttagcaaattatcctaagttcttttcaattatttacacagcttgggttccctgtccaccatgcgtccaaaataaagggaatctgtcgcccagacctttagataaggaaaacaccagcactctctctgaacagacaacctgagtacctgaccaaagtttaggacaagactgttgcagatgagcaaagttttgaataatgcggtagggtgcacatatttgtttgttgacttgcttggtcagttgtcttaatgttcttttatcagcgttaatggaactgaatttccttgcaattcagaattctctccatttggtttacttatctcactgcagttcaatatcactgcagataccgtgcaatcactagtgcgtattaccgaggcg

SEQ ID NO: 914 - DNA, 409 bp, Zea mays
  Intron number 3 from transcript GRMZM2G162531_T01 (locus G RMZM2G162531) derived from phytozome v7.0 (chr-ID 6; pos 9 7611073 to 97611481)
tatcaattgtcaagtctacaggctctgaaaacaatgtacgagctaacacttttttctgaacatgcaccttgcatgtgtttcattaatagagtagcgaagtttacaaggatttgctataaaatcggcgaggtgcccgcgattagacaacactgaacaatatgagctaacagttggtagttggtactatagttcttcagttatgtgtgtccttttcataatttatatcttctgtttctaaacatgcagggacttaagcaacaaccacttgcatgattcaatcccttaccagttgccatcaaaccttacctatctgtaatgtctcccaacctgtacatattattcatgctattcgattcttgaaatttgattcaaagcgaatacaggaatctggcaaaaaataacttctccg

SEQ ID NO: 915 - DNA, 7717 bp, Zea mays
  Intron number 1 from transcript GRMZM2G160032_T03 (locus G RMZM2G160032) derived from phytozome v7.0 (chr-ID 3; pos 2 16345876 to 216353592 reverse strand)
accttgggaggcgacgagcatcaccaggacaccaggtgctccctcccctttcttccctttcttcccttcgtgatcggacctgaatctaattacaagtgtatatgaatgtatcatgtctaccaactttgtttgctttgcaaaaattattgggtgtatatccatgccctttactgggtccgccccttggtttgaccgtcctcaccttttctttaaggactttcttcacgctgaagttcgcaaacagagaatagacgagaactactgaactagcaaatagagattgctgcagtctcgattgtgttgctttcaacttctctatgcatgcaaagcgcactgcacactcagtgactaaatatagaagagaataaataaaattataaagaagttagtattcaacaaagattaacaacttacagattcttcaacaaggattttataggaatgttagtaagccagtgctgtataacaccaactggatttgatcaaaatgttagcagatctcctacaacaacacctgtctcttggaaccagaagctatcttcaaaagcaagtgaacaaattttgaacactcatagtcagtaaatgttatgtttccttgcataaacatggaagatttggtcagtgaccactatcctcaggaaggctaatgaagtctgctcttagagtattttcatgcaataattcctaatgattttccaacaacctgagcttagacaatgggtattgactttctgagcaatggagtccaacttgacaacatccttctttagtaagagcgcacctgagatatccgaggattaaagctcagaaaacaagttaccaatatcaatcagttaggaaagaaagaaccgtttcatcggctttcaataaaagctggaccaagaattttgttctctaaaaaatcagttaggaaaggaagatactgtccaagctgaagggttttcacattgacaacatcagaaagctcacatgattctgatacaattagcattaatcaagtatctggaagcttattttattagaaatgcatatagtcgcgccattgtatttgaataggtcttgtcgtatttttgtaacctaagcctactcggttctatatatgaaaggtcacaccctctgccccattaagggcgtgagatgtttctccaattttctccgattttgtacacattttttatccatcttgtgccactggctgaatacaagacaacattacatagcgataaaaaacaagaaataacagactctttttgttgcctggataccatcagctgaaaccgacaagtacaccttaagcaaggatttggttccaggatagttatccaccctatcaccaaaattgcaaaaacacacatatgcatatactgtgaagtagtctccaaatttatgacaatgccagcactatgcctgccaagtaagtatagtgtatcatcatactactacctaggagcaagacaaaggtgtctcaactaacaacaaacagatgccagttgccacaacaagaggaacaaggatatgttactactgtattttctattcgtacttttatcaattaattaatcacatgattgaacaatccatagatggatacacattacaggagctgaactgtgctaacatcaatggatgcctagttgatagttcatctagaaattgcataaaaacgaacaagaaagtgtagcattgacgggaagtaaccaaactgactttgcctggctgtcctcctggcaatggtcaccccaaatgaacaaaggttcataacagaaaggaaacctgatcctcagtaaccaggttctcatattgataaggtcgaggaacgagaacatggttcatggtatgatacttaaaagacgattttaacactacagggacgagattgtttccgcgttcctgggacggaacgaacgttctcggaacgaggaacgtggacaagttctatgttcctggtttatgagacctgatctacacttacaatgggtgtcattgtatgcacttgatcaatttggccacttgtttgacaccctgcatatttagtctaagaaaagggcagccagcctagggaagtcgggttgaatatgattaataatagctagataggcggtattggtaaacacaaaggttactcaaacatagcctgctataatgcatgacgatgtgcagtacacactacagaaacacatgctcaggagaaacggacttgcatgccaactagcagaaacaataattcatacatgctacaaatccttcatgaaaccaagtgcaggcctatgatgcgcggatacttttcaaaattcacgtaccggtgtcggataccgtatcagatatggatacttcgcggatacttctgaatacgtatccgagacgtatcggaaatttaaataaataaaaaaagacggatacttctaggacacctctcgaacacatgtgggataccttatatccctaatttccgtgcgcaccgcttctccccacggcgcacacgcgcaacttctctgcgcgacgccagccccgcttctccccacggcgcgccgccatccccgcgcaccttcctgcgcgccgccagccccgcgcttccctgcgcgccgccagccgtcagcccgcacctgcgcgccgccagcccgtcaccgcttggagacgcgcgcagccgcgcttccctgcgcaccgccactccagccgacagccgcgcttccgtggccgcgtccaccgccgccagctctgtggtcgcgccgtcagccaacccatctgccgtcgtgaggtactgaggtacgtgatctgctattctgctgccatctcccatctgctctgtctgacgctgcggttgtccattctctgttcttgttagatcccaatatcccatggcaacgagtgcatctactgatttggtgaactagtgattattttgcgagtctgctggtgtagtgtatctcccatctgttgttgtctcatgtctggtctgtggtctgtggtctgttcgaattaaaacttagaacttgtgtggtgatttggtgaactagtgattattttgcgagtctgctggtgtagcgtatcgttacacatgtttttgggcttttggcatgctggattcattgatttgagtccagataaattctggaagaggaagtagatgtttactttagtcaaagttgttgaacattaacttctaacgtccttaaattgaactgatcggctgtggtccatttcagacatttcagaatttaattttatttataatatatattgcgtatcgccgtatccgtattttttgagaaatggcgtatcgcggtatcggcgtatcgcgtatccgtatcaggtcaacataggtgcaggcgcttcagatattcactacatatgcttaatgtaacctattagaagttttgtccccccccccccccccccaagaagttacagtctgctaatagctgagagcgttaccaaaataaaaattcatggcagcttgctaacatgcctttatacaaacatgacttaccaaaactgaaatcaagaataatccaaccagacatgacacacattgttgttagatgattccaagcaagatattacttgtagagaattttgtttttccctgacaatggtgaagctggtggatccccttcaaagaaagctggtaaaatccaccaagaaatctagaaatgaaaacctagcatctctactaatcctctaatcggaatcaacctggcatctagaaacaaaacgaagcatgttttagatcttcagggtctcagggtatgagagggtggaaaactggaaataggcaccctttggacatgttcggtggtgattcctgtgtttagggtcaccactagtgccagcatctgcatgggcatcggtactgcatctcttctcagaggtcacaagtgaggcagaggtgagtggatggcaccactcatgagcggggcggccctagggtgtcaaaatggttcctaccctttgaaccctcttcctgttaaggtcagcctgctccgaactgtgggctcaatctaggagcaatgtgttttgaatgggcaaacctgttccccttgcatgatagtatttcagtgttccatgcttgctgttctctttcccaagtgctcattcctacttcataatgaaaaattagttcaaaaaacaaactttattgttgtgttctcagtgttatttattttgccttgctaggttgcctatattttcttccccttcttgaaaatggatcatagttctgacgaagatacagaaatcagtgattctgagattgatgattatgaaggaaaaatttatgcaagactgatgtcaggagatttaaaattaaataagaatggagaaaattacatttgtcccttctgtagcagcaagaagaagaattacagtaaaagtagcctggttcaacatgcctcaggagtcagtgcagcacctaatcgggaggcaaaagaaaaagcagtccatcgcgccctcttcaaatatttgaagaatggtcttgctaaatcacctgaaccagggtcacatgcaactcctgtggagccacaacctcttcagaaccgagacgagaagtttgtgtggccctggatgggtgtcctagttaatgtgcctactgaatggaaggatgggcgccaaattggagaaagtggaaatcgtctgaaggagcaactatcacacttttgcccactgagggtcatcccgttatggacttttagaggtcatacaggaaatgctattgttgagtttggaaaggactggaatggtttcagaaatgcgcgtacctttgaaagtcactttgcggcaggaggattcggtaagaaggactggattggaaaaaagaatcaaggatccgagctctatggatggcttgcgcgggctgaagattacaattctccaggaataatagcggaccacttgagaaaaaatggcgacttgaaatctgtcaatgatcttgcaaaggaaggagcgcgtaaaaatgacaggcttgttgctaatttagctaaccaaattgaggtgaaaaataggtatttacaggaactagaatgcaaatacagtgagacaactgcatcacttgagaagatgatggggcaaagggaacaacttctccagtcatacaatgaaggtttatgttattctttttgttgattttttccgcatgggtttagttatatttccagttttctatcatcagcagctgtgaagtttcatttgaaagataaattaataagcataaccattaccagaaattagcaagatgcagcagctagctcgcaggcattctcagaagatcattgatgagaatcaaaagttgcgttctgaccttgaggcaaaaatgaatgatcttgatgtgagatccaagcaactcgatgagattgcagcaaaaagcgattatgacagaaggagccttgagcaggagaagcaaaaggtgtgtgatttcatccatctcatcctttgcctctataaaagaatggaaagagttgatttccttagtgtcatattagtttgagacatgttagatgacatttattttttattagtaacttcttcatattccaatttcgataaagttggatcatttagaaatatccatgcaattatgtgcttcgtttttgctttaactcagaatgctatcaaatcgagtcatcttaaattggcaacattagagcagcagaaagctgatgagaatgtgctgaagcttgtggaagaacaaaaagtatgtaccttggctcctgtgatatgatgctttaggtttcaaacaatgtgtcctatggtagtcttactgtatggaaactacagagggagaaacatgctgcgttaaagaagattctgatgttggaacaacaattggatgcaaaacaaaagcttgaattagaaatacagcagttgaagggcaaactaaaagtgatggagcatatgccaggtgatgaagattcagcgtcaaagaataaaattaatgagctgagtgaggcattgcaagaaaagatagatgaactggatggaatggagtcacttaaccaaactctggttatcaaagaaagcaaaagcaacattgaactgcaagaagctcgcaaagagctagaaaatgtatgctattttaccaataagatctatgtgactaatattgtccatcagatttcattgttatccatcttttgttctatggcatgctccacagggcctgcttgatctttcaggtgggcagacacatataggaatcaagagaatgggagagcttgatctaaaagcattttcaaaggcatgccaaaaggagcgtacagaaaatgcagaagttactgctgcctttctttgttcaaagtgggaggctgaaataaaaaatcctgactggcacccttttagggtcgtcacaattgatggaaaggagatggtatgagtcttcacttgaactacttccatgtcatgtccttagcttaatagccttctccttctattccacaataagtgcaattctagttttcaaaatttgcctgaacaaagtgtctttctagcttgtgggccacgaagcaccaggggcagacccagaaaaaaatgggactgagggcacacttgcaaggatgagcgccaaaatattaaagcaggggtctctaagttagtctgagcagggaacctcataatgaaaatctagacactactacttacagtagagaaatgagcgggagcctatgcccccatgaatgtcaacgtaggtccgcccctgcgaagcactagaaggctcagttgcctccgtttccaaagaacaatcacttcatgttgggacactttttattggggcacggcatatatgccatttcagccatatattttttctagggacataagtattgtgggatggagtataattgagttgctgaataatcctatcctgtctagtagaagctgttaagttccttcctgaatcatcagatcccatatctaatatcttgtatggatatagtttggtgctacatcctgtactttatctcgccctccctccctctctttctcaaaaaaaaaaggaaagaaggggggataccttctgtttcagttgtaactacttagagcatctccaagaatctccaagagactctttattttttactctttatttgactctttatttgtctcttcataaatattaaactctatatataacattttattccaacagactctccaaaatgtaatttagcttggctaacgagagttgctagccaaatttggctagcgagggagataatttagagagtgagatagcttagcaacttaaatagctactctgttggagagctattatgctattaattatctaaaatttagcttgacaagctatttagctagtcttttggagatgctcttatagtcatgtacaggcaatggtatggatgctgacctgtaagctcattatgggagtactattttgtatccttcgtttcctgtttaatttagggggtgtttgaatgcactagagttaatagttagttggctaacaaatgctagtagaattagctagctaactattagctaatttgctaaaagtagataatagctaaactattagctagactgtttggatgtctttagttagttttagcggctaactattagttttagtgcattcaaacatggcctagtgaatgctaaaccatcgatctatccaattttatagataccttgcattttgtaacatgcattgtgtcatactacctttaagtggtgcatgctgctgtgatgtaggcaataatcgagg

SEQ ID NO: 916 - DNA, 9802 bp, Zea mays
  Intron number 6 from transcript GRMZM2G472276_T01 (locus G RMZM2G472276) derived from phytozome v7.0 (chr-ID 6; pos 1 61514688 to 161524489)
gagcagcttagagatactgtaacgaggttagttgctcaagtagactgtgccaagtttctttgattctagccaagggttctgaattacatatctttaagttgccaatactcaaaactagcattactttccgaatagcacttcaaaattctaaaccattcagtcattcactgtaataggacgtatcccttaacacagagagtttgtctggatctccggccaagatctgccaggaacataagcaattcctaggtgcgtaaacttggcagtggcagaacttcggtaagaggaggctggtctgctcgacctctggaggagaactgagcagaaatctcagaagaggattgcagcttgcttgcaagcccgtgctggctggggaagaaggtgagcccaggaggcggaaccgcggaagtcaacgtaaccaagcgaacacatccatggccttctgttggggacttgttctcaaatgctatgagttaagaacaaggcaacacagaaaatgttaaacattaagatccttcgtccttcgaagcattatttcccttaggatataacgatctccggacgaaggtcatgaaggattaaccttcatcactacaatatacattagtaaaagacgaagcatatgaaacataaaagatagcgtgaataatcatataacattattcatttaactttattaactcatcataaagaaatagaaacaatattgaattataaatgtaccttcggcttggaaggagatgaaaatacaagtgtgacgcaaaagtaaatgccaagtcagcgtgaacagtacgggggttctgttcacctatttataggcacggggtacaacccatacaaaattacatacatgccctttacatttggtgataattctatagcattctatcgaggtctaaatggccttttcatctttaagtcggttcccctttctgcgaacatgccgaagctttcctgcttcacagcttcggcactgtgtcaaccttcgtatcttttgagcttctccctttctgattcaagtccgaagatacctgttcacacattatactccagaaacattgttaaatcatgtttttgaggaccttcggaagccgaaggcccccaacagtagcccctcgcaatattaatttgtttgaaataataaattcagattgcgatatgaacgaaggctttatgccgaaggtccgaaaaaacaccttccctttgctagaatagcaacattcaatgacaagtggggtctttcaactttcaacgcatcaagcgtataaatacggccataccgcaaacttattttgcacgctttctggccaaccactcctgctcactcattttttagctcttgtgcactgtgatctgctaagtttttagctttgaagcttcggcttttagaaacagttttttagcgcttccgaagatgtctgaagctgctaagaaggctgctgctgagatgaagctgagtcttgatgaagagaagaacctagggtttcttatagcgatgtcgaagtccaacacagaaaagattaccaaggaaattctggaagggctgtctgaagatactggtgacagtgaaagttatgatatggacagcggtggcgaagactccgaagatcgcccctggcgaccaagccattcagtttatggtaaatcaactatcaaagagaatcatcttgttaatatgagaggaaggtatttccgggatctgtccattgtgagggcggacgaaggggaaaaaacttgtccacaccctgaagaaaatgaagttgtggtgtaccgaagctttttgaaagctggattgcgattccccttgagcagcttcgtcgttgaggtgttgaaaatcttcgaagtctatcttcatcaacttactcccgaggcaattataaggctaaatatcttcgtgtgggccgcgaggagtcaaggtctgaagcctgacgcaagaagcttttgtaatgttcatgaattattatatgaaacaaagccttggggcaaagaacagtaccataacaactttggctgctacagcttcgtttctcggtccggggcaagctgtcccgtaccaacctttcggaagagatggcccggggattggatgacagaatggttttatgtgaagaatgacttatcagcacgagaagacatcaaaggtataattatgcgtcctatttggcaaagcttcggccttcggaggccgaaggttgaaatgaacgaagccgccgaagagtgccaaagagccttcggcgttgtctgctcttttataggaacaagggacttagtacaagaacatatcgccttcagggtgtggccgcttgctgagaaatgggaaatgccacaagaaaccataaaagaggccgacgaaggtgagcttgtgagactgaagtacaccttcaaatttggagataaatttattgagccagatgatgagtggttgaaaagcattgacaatttaagtgatgagctactcgggacctactcgaaggctgaagataatgcaatgtcagcagccttcggaggccgaaaaaagaagagactgaatcgggtatttgatgccattgggtttgtctaccctgattactgctatcccattcgaaggcagaagagaaaaaacacaatctctgcaaaagaagaagctgcagctgctcctagcgagccagaaccgaaaaggaaaaagataaaggttcttacgcaacggccgcgttatattgaaccagcttcggtgtcggagtttaccgggaaaacttcttcagccaccgaagctgaaaaactaatcgagccagccttgttgccagagatcgcagaaacggccgaagtgccaccaaagatagaatcagaacaatcaaacattttgttgtcagaaacaaaagagaaaaccgaagcgccgctcacagaaaaaattgaggaggtaagagaagcaactgagggctccaaaacatcagaagttttgagtcctacagcaatcattgggacagcaaaaaaccaaaaggggccatcagtgaccccaaaaaggaaaagaatggtaaatgtactagacgtcttggagacaattaagtcttcaagcacaattccaaaaaagagtgttgaagttgctgaagcttctactgaagcttcggctcaacaagctgaagctgaagctgggccttcagagccctacaaggagcaaccttttgaagccgaagcaataaaaattccagaaccagtattagttgaagaaactgacaccgccatccccgaagcacctgccagcacgcgtgattacatgatacgacatgcttcggggaagaagctatctgaagaagaaactcatgaagccatccattatgcaaaggaactaaaatatccgaagggggcaataatattcaatggaacgaatgaagatgacttcttatactgcctgcctgacaacaaagagctatctgtctgccgagaaatggccagaagtattggtttcccgaagcttgaatctggattaagcgccatgacgaaagaagatctcgcagacagtcttgcgtacaacagcctgaaggtataggaattgaacacttgaaaaacccccttatttttacgcaactcattccttttttcttatatgaattctttttcgtatagggcctgatcctaagcaacgcactaagagcccaaaagagcgccgaagatgaaagctatgacattgcgtttaataatttacgctccaaagttatcagactgagaaacgaagctttggaaaaagataaaattctgctttcactggtagataaagtgaaaaaagacgaagctgcttcaaaggcccaggccgaagctcaaaaacgcgagattaaagatcttcagaaacagctggctagagctaaagaggagcgcgcgcttgaggaaacgaaacgagaacttagtgattttatggtcaacaaattggaatcaaaagttaaggagcttcgcacatctcaggggaaatgctatgtcaaatctgtagaatgtgtgaataaaattaaatccagcttcgccagcgtaggcgccttttccagcgaagagaatttctctcgaggcaatcccgaaggtccgctggaatggattagccacgaagcagaggccttcgaagagattctgaacagtcgtggcgacatatgcgctttttcgggcgccagaggaattgcttctgtcttagagaagaaaggttgcgggcatgtaaaatttttagctcaatccgaagctaccttatcttccgaagacgtcaaggacccctcggccgaagcaagcgtggttggtggcaaattttttactgatatctggaacgacggcggccgaggaatggcgcgagagatcattgaaagaagcgaaaaaggcattcacgatgctagaagagtagcagacgctgccgaaaggagtagggagcccgaaagacagttaggtaccaactagtcgttcttgttgcgttgtaattttcattttaaactttgctcgcgatttgtaaaagtactgaagaagtgttctcttcgcttagaaactgttggacgatctgccgacccccacacaaaaggggatgaagaaattaatcaaatggccgaaactatcatggacaaggttgttgaccaacttctgaatgaagccgccgaagcagtattgagggaagattaggtgctatttggaaaaaacatttaaagtgtaatctatgcaacactttgtacatttgaatgtaatatacaagtctcttttcattattgaattctttacgatgcatgaaactttaaatacataccacttttgagccttcggcgaaaaaacaccttcccttcttttcatgcgtcgtgaagaagatagccttcgtcaaaattattctgatgaatgacatcgatgcctcgtgaaaacattttccgaagctattttccgaagctatgcaactttgatattgatctgataaagttcgcccatgtttcgtgaaaatattccccgaaactgtattccgaagctatacaatttcaatgtcactttttcaaagcatcccttcgaaggttgagagtgtccccttctcttgccaaatgcgatatgatgtatgatgcttatgctatgcaaaatgatgtgatgatgttatgttatgcatgtgacatttgttccgaagatacacataaaatatattcgtaagctctgcattcccttaggaacgtctttggagcttcttcgtcttttacttagacggcatcagcgttgacttttcgctgtaagcctcccttaggagcttcttcgtcttttacttagacggtatctgcgttgacttttcgctgtaagcctcccttaggagcttcttcgtcttttacttagacggtatcagcgttgatttttcgctgtaggctctgcattcctttaggaacgacttctgagcagaaaacttacgctgcgctccctttggaacgactttttgtgactttataaactaactctgcgttccttagaacgactttttgttactccgaaggatttttagtccgaaggtccttcttggtaacggaagaaattttaggcttcggcaacttaggcctgtgaatcaaataaatttttctcgtggaaacaacgaaattattacatggaaactattaatgttttttgcttcacagaaaataaaactgaatagaaaagactgctatcaaaggtaggatatgtcaataaatgtgcttcgactctggcacagtgctgttgactgtgcgagcttcggactgttctctgaagtccctctgctgtggagcgtattgactcccttctggctgttgaccttgctgcaatggaggtggaggcggaagctgctgccaggaagcttgagggttgacttgccgaagctacagaagccgcagggtggttgtctatgtattgtgggacataaggcggatgaaacgaagcagtatgcataacctgcttcgactgagcttgttgagatgcagcttcggctagttccttttgcttctggattgtaacatggcacgtcctagtggtgtggcccttgccctctccacagaataggcaaaacagtctccttggctgatctccgaatcttccgccgaagcccctggcgcctctgcctcttggagctggtggccgaaaggaagtttgttgttgccccgaagcctgtgaggagcactgcggcctgttttgctgactccccttatcatcattctgagtgctgtgaatggaacggacatgcctcgggtagtatcttcctccgaagcccctggtcatctcagaaaatctgaaggcctcctcccttctttggcgaaagtcattgtcagcacgaatgtactcatccatcttttggagcaatttctccaaggtctgaggaggcttccgagcaaagtattgagctacaggtccaggacgaagccccttgatcatggcttcgataacgatttcattgggcaccgttggtgcctgcgccctcaatcgtaagaaccttcggacatacgcctgaaggtattcttcgtgatcctgaatacactggaagagagcttgagctgtaaccggcttcgtttgaaatccttgaaagctggtcagtaacatatccttcagcttctgccatgaagtgattgttcctggccgaagggaggaataccaggtctgagcaacattcctgacggccatgacgaaagacttcgccatgattgcagcgttgcccccgtacgaagacactgttgcttcgtagctcatcaagaattgcttcgggtcggagtggccgtcaaacatggggagctggggtggcttataggatggaggccaaggagtagcctgcagctcagcagacagaggagaagcatcatcaaaaacaaaatttccctgatggaaattatcataccagtcgtcttcgttgacgaagccctcctgatgaaggtctttctgatgaggccttctgttctgctcatcgtgagtgagatagcgaacttcctcagaagcttcgtcaatttgcctttgcaactcagctaggcgggccatcttctccttcttcctctgcacttgttgatgtagcatctccatctctctgatttcttggtctagctcttcttcctcaagcgtcgggctaacagcttttctcttctggcttctggcctcccgaagagagacggtctcctggttgaggtccagcggttgtagtgctgcagccccagccgctgaagctttcttcggcgccatagcgaaggtctatagcttccgaaggtgttcacgaagactcgaagtggaagtgagttcaccggaggtgggcgccaatgttggggacttgttctcaaatgctatgagttaagaacaaggcaacacagaaaatgttaaacattaagatccttcgtccttcgaagcattatttcccttaggatataacgatctccggacgaaggtcatgaaggattaaccttcatcactacaatatacattagtaaaagacgaagcatatgaaacataaaagatagcgtgaataatcatataacattattcatttaactttattaactcatcataaagaaatagaaacaatattgaattataaatgtaccttcggcttggaaggagatgaaaatacaagtgtgacgcaaaagcaaatgccaagtcagcgtgaacagtacgggggttctgttcacctatttataggcacggggtacaacccatacaaaattacatacatgccctttacatttggtgataattctatagcattctatcgaggtctaaatggccttttcatctttaagtcggttcccctttctgcgaacatgccgaagctttcctgcttcacagcttcggcactgtgtcaaccttcgtatcttttgagcttctccctttctgattcaagtccgaagatacctgttcacacattatactccagaaacattgttaaatcatgtttttgaggaccttcggaagccgaaggcccccaacaccttcgctgctgccgttaagccactcaagcggaggtggaagagagggaaaggacgtgggctgatgggaggagggggctggggtcgacgagtggaggaggaaggacgcacccgcaggatgggaaaagggctcgccggcgagacaccggagggagaccggggataaggtagtcgtcgtcgtggagggggaagaatgcgcaccgacgggaggaaggggctggggtcgccgcgtagagggggaagggctcgccggcaggaggagctgccaacgggagcaggtaggctctggcgcctaggaacatgggagggaggagggaagaaggctataccatgttgaacaggtaggctctggcgcctaggattcttctacaatgttttgtctttatggattgcagctgtaatccgtaccagcttctactgtttctacaatgttttgtctatatggattgcagctgtaacaatccgaacagctggttttaatctgaagcaaacaaccccttaacccaattacaatagaggtataaacaggtataaatagaggtataaacaaccccttagcctaagaactataattacaaggggactaacgctgtgtttggttgaggagcggaggggaatggaacggctccattcttatttttttgatgtttggttagcatggaggagagcggagcggctcctggagcctataaatagcaaatatttgggatgctctcgctccaccaaaacgaccggatgcgagcgctctcgctgacatgagcgctctcatccctctcctccactcaacagtcatatggctctctaaccaaacattaaacgaagcggttccgctctattctactcttcaaccaaacaaaaaatggaacggttccgttctgcttgccaaacacaaaatgaaatgactcaattcttagaaactggaatggagccgctccatcccagttggctcctcaaccaaacgcaccctaagagcatctccaacaactcccaaatcatactcctaaaactttattttgggagaataatagaaaaaaccatgttcaacagttcccattatgtgctcccaatttatttggtgtctcaaaactccagcttctttgcacaaatttccgccaacctccgaacgtcccaatccatgtttttctctttttccacgtcgacgaagccgtcctctctctcctagcgtacattgcttctcttcctcgtctgctcggcgacatcatcctccatcactgctgcccacacgcccacatgctatggcgcccacatgccactcgcaaggatggccaggagcctaggaggacgctcgccggcaacgacttgtggagatctcaatggcggtgcttatactgcaactctagcctgattcctccactgttgcaagagatgaaatccggtaattttgtcatttgcgagtacattctttttaattttcaaaacaggagagtgagagtttgtttggttgggttgtggctatgaaaaaagccgttgtgggctatgagctgtcaaaaaagctgttgtgggctgttaaaaatcctaaaattgtttggtagaacccactaaaagtccttctatatatattttcacagttccattcgaaagccgctaaaagaaggtccagaggtgctgtcagttttgtactgtgagaaagtcgacttttagaaaaagttgcttcctgaatccagccctttggtttggcttttggcttttatagtgcaaaagccaaacccaaaagctaaaccaaacacacccttaatatttttggataaaataaggagcagttggaggtagacatgttttttaggcctttagattttttgggagagccccatacagtaataatagaagaataaatattaggagttgttggagatgctctaactgatgcgcatcatagggttgaagaatta

SEQ ID NO: 917 - DNA, 837 bp, Zea mays
  Intron number 1 from transcript GRMZM2G445423_T01 (locus G RMZM2G445423) derived from phytozome v7.0 (chr-ID 6; pos 1 61484080 to 161484916)
gaattcatatttctagccttctaggcattgtcgtatgatggacttaatgcgtgcatataccagctggaacgagtaatatctgaaattttaatttggccatgaagttaatgttatactattgctagtagttaatattctcttgtaactaccttgaaaccaggataggtaccaccattcagcagtcaatatggttgtataagtaggtattgactgaatgctagcatttttttgttcatgaccgattgttgttttgcccaagattttatgaagttcatcattatcataatttattttaacagtataatcaactttcttaaagtatatctttcatggtttgttctgactttatgcttttttgcgcaaaataattatgtatcacttggtcttttcccgaatcgcaaccttctctcatcatttggcgagccatcagtagattcagccaatttcaccaatgttccatgcatcatgctatgtgccgttcattatgatatgtactttttctcaaacacattgtaatatgtactccctccattccagattataagacattttggctttctagatacatagttattactatgtttctggacataatgtacatctaggtgctagcaaaagctatgtacttagaaaagctagaatgacttacagtttggatggagtgagtagtcttttcctgaattttgtggtgatttgtccttttgcacttattctgtgcaactttaacagagatgtacattcattgtctatcaacatagacttttcagacatgctgtgtttttttgacttggcttgttttcaggctgccacattaaagattgttgtaggctctcatat

SEQ ID NO: 918 - DNA, 2799 bp, Zea mays
  Intron number 1 from transcript GRMZM2G052948_T01 (locus G RMZM2G052948) derived from phytozome v7.0 (chr-ID 4; pos 2 35556028 to 235558826)
tcttgggaccctgcgccggcgacgagcaccgcaaggtacgcccgccgcttggtcttcccttcatattgtgtgaaactgtgcatccaaaccataatttacaattcgtattcggatctgatctaggagtaattaagcgtatatgcatgtattatacctactaactttgattgttttgcaaaacttatcggttgttctttactgggttcgccacttctgagcctcatagatgagggaagttcttatttttagtagaagacgttccttgccacggcttctttggctgtagcaaggagttactgctgcaattttaagctagaattacatgttgtttggtggtcgccagctcacttcattaattttatcctgttttagctcatttcattgattttatcttgttttagctcagttcattgattttatcctgttttagagcttgtgagggggcagagaagatgacatttcttgcttgaggatgggaaacttgcagcagctctattagggcttgttcggttagctctcaatccatgtggattgagtgggattggatgggtttgaaacccaaacaagtcaaacctcttctcatttttttccaatcccatccaatccatgtgttttgggaataaccgaacaagcccttattaggattggatcctgagagatgaccgaggcggcgaggtttcatggtatgataggtggtggtggtggcaaggggatgcaagacaatgtgatcaatggcttcgacaacattccgtattaccaaaagtttggggagggctctcacatgtccgtagacagtgtcgatggcttcaacctgaccaattgtgctggtggttctgttgccatgtcagttgacagcagcagtgtgggctccaacgagtcccgcacggtcatactgaagcacccaggcctccgtgatgctccgactgcaagctattcagtcaacaatagtgtcttccgccccaaccgtgtagccgcacacactctaaatgaggatgcattggcccaggttttgatggacccaaatcatcctacagaggtactgagcagctatgagcagtggaccattgatctgggaaggttggacatggggggtccttttgctcaaggagcctttggaagctgtaccggggaatatataatggagaagatgttgccattaagctgctggagaagtctgagaatgatccagaaagagcccattcgatggagcagcaatttgtgcaagaggttatgatgctgtctaggctgagtcacccaaatattgtaaggttcataggggcatgcaggaaatcagtcgtgtggtgtactattactgagtatgcaaaaggtggctcagttcggcaattcctggcaagaaggtagaacaagtcagtgcctttgcggttggctgtgaaacaggcgttggatgtagctcggggaatgacatatgttttttttgaagtaaaggtactgtaggaaggtcctacagtaatattattaaatcaaaagaactgagtttagggaatgacatatgttcatgcattgggatttattcacagagatctgaagtcagataaccttctgatttcagcagacaagtccattaagattgctgactttggagttgctcgcatcgaagtgaaaactgaagggatgacaccagagacgaacctaccggtggatggcaccgtaagttatagtttccccttactgaagattctcctatgcagaaatttctttgtaccagtgtatcactgcatctgtaatgcctaacatttagtttattttgaaacacaatttgcatagctaacaagttatcagaccttcacactaaaacagtactgtagttcaatattatgttgaatagatgcaaagttcctgaagtgcaggtattcaaaattttcagacactttgatagtcttactgattgtacatccaactttacataattactggaaaactcaagtactcgactgtacatgctatataccagtcttttggattacttaatcgtattattgaatgttccattttatgcatcactgtccaggcttttcattgtattaacaatatattgtttcatattcagtaattcaaatcatgttaatgggactgagttgcatgcttacgcacaaaacagtgtatagactaaggccatgtttggtttctttagtctagggactaaagtttagttaggggactaaaatttagtccctaacatgtttggttctaggggctaaaaatagtaagaatatactaaatgactcataagaagactaaaatgacctttaacattcttctgctattagtacaattgaactaaatgaggggtaaatatggaattaatatggtttagtcccttttagcacatatgtgaaggactaaagactaaatcattttagtcctagtgtttggcaaaaaagggactaaatgggactaaaaactagagactaatctttagtccctctaaccaaacaccccctaactctatagttgttaatatgatggaactactggactattgtgtccagttccaatttttttactaaactattgctgaggttgcacacttgcactttttttgtccacagtggggaagggtgagtgtgtgattataccagtatataacaaaaataattgtatagatgtttcaattttctatacatggtctaatttgtttttggttacaatagaaatcagagacaagtcttcaacttgctattgcctcactagcaaccagttgcttctgtaatttggatttttttttaatgccatgcgcatagtagatgattttggccttctatttttatttgcagggaa

SEQ ID NO: 919 - DNA, 8997 bp, Zea mays
  Intron number 1 from transcript GRMZM2G172431_T01 (locus G RMZM2G172431) derived from phytozome v7.0 (chr-ID 8; pos 1 3228515 to 13237511 reverse strand)
ggagagggcgcaacgacgaggaaggaggcagtgcggcggtgaaagtcgcctagaggggggtgaatagggcgaatctgaaatttacaaactttaaacaaaactacaagccggggttagcgttagaatcaaattcgagtccgaaagagagggcgaaaacaaatcacgggcaaataagacgaatgacacggtgatttgttttaccgaggttcggttcttgcaaacctactcctcgttgaggtggtcacaaagaccgggtctctttcaaccctttccctctctcaaatggtcacttagactgagtgagcttctcttctcaatcaaacaggacactaagtccccacaaggaccaccacacaattggtgtctcttgccttggttacaattgagttgaacacaagaaagaatgaagaagaaaagcaatccaagtgcaagagctcaaatgaacacaagtctctctctcacgagtcactatttgattggaatgatctttggacttgggagaggatttgatctgtttggttgtgtctttgtattgaatgttatagctcttgtacccagggtaaaaacccccaacttgtatgcattgaagtgtggtggttgggggtatttatagccccaaccaccaaaagaatcgttggtgagggcttctgtcgcatggcacaccggacactgtccggtgcgccagccacgtcacccggccgttggattctgaccgttggagcttctgacaactgggccaccggacagtccggtggtgcaccggacaggtcctgtagactgtccggtgcgccttctggcgcgtgcctgacttctgcgcgcactgtagcgcatttaatgctgttgcaggcgaccgttggcgctgtagtagccgttacaccgctggcacaccggacagtccggtgctacaccggacagtccggtgctacaccgggcagtccgatgaattatagcggagtggctcccagaattcccgaaggtgagtagttcggagtcgggttccctggtgcaccggacactgtccggtggtgcaccggacactgtccggtggcccaccggacagtccggtgcgccagaccagggcacaattcggttgtcttttgctctctttgtttgaatcctttcttggtctttttattggtttgttgagaacctttggcacatgtagaacttataatctagagcaaactagttagtccaattatttgtgttgggcaattcaaccaccaaaatcaattaggaaaaagtgtaagcctatttccctttcaatctccccctttttggtgattgatgccaacacaaaccaaagcaaatataaaagtgcagaattgaactagtttgcataagtaagtgcaaaggttgcttggaatgaaaccaataattatttcttctagatatgcatggaatgattttcttctactataaaattttggaccacgcttgcaccacatgttttgttttgcaatgttttggaaactctttttcacaaatcttttgcaaatggtcagaggtatatgaataagattttgagaagcattttcaagatttgaaattttctctccctgtttcaaatgcttttcctttgattaaacaaaactccccctcagtaaaatcctcctcttagtgttcaagggggttttagatattaattttgaagagggtataccaattgaaattatatcacaaataagataccaatttgaaaaaacacttcttaaatacaagttgaaagactaattttttgaaattagtggtggtgcggtccttttgctttgggctaatactttctccccctttggcatgaatcaccaaaaacggatacttatgagtgaaatataagccctttttactttctccccctatggtaaataacatatgagtgaagattatatcaaagttggagagtggtgtggagcgacggcgaagaatgaataatttgatggagtggagtggaagccttgtctttgccgaaacctccaattccctttcaatctatgacttagcatgaaatgcacttgaaaaacacattagttatagcaaatgaaagagatatgatcaaaagtatatatttgagctatatgtgcaaaacatcaatcaaaattcctagaatcaagaatatttagctcatgcctaagtttggtaaaagtttgctcatctaatggcttggtaaagatatcggctaattgttctttggtgttaacatatgcaatctcgatatcccccttttgttggtgatcccttaaaatgataccgaatggctatgtgcttagtgcggctatgttcaacgggattatccgccatgcggattgcactctcattatcacatagaagagaaactttggttaatttgtaaccatagtccctgagggtttgcctcatccaaagcaattgcgcgcaacaatggcctgcggcaatatactcagcttcggcggtagaaagagcgacagaattttgcttctttgaagcccaagacactagagatcttcccaagaactggcaagtccctgatgtgctctttctattaattttacaccctgcccaatcagcatcggaataaccaattaaatcaaatgtggatcccctggggtaccaaaggtcaaacttaggagtataaactaaatatctcaagattcgtttcacggccctaaggtgaacttccttaggatcggcttggaatcttgcacacatgcatacggaaagcataatgtccggtcgtgaagcacacaaatagagtaaagaacctatcatcgaatggtataccttttgatctacggatttacctcccgtgtcgaggtcgagatgcccattggtttccatgggtgtcttgatgggcttggcatccttcatcccaaactttgcaagaatgtcttgaatatactttgtttggctaatgaaggtgccctcttggagtttctttacttggaagcctagaaaatacttcaactcccccatcatagacatcttggatttttgagtcatgatcctactaaactcttcacatgtagattcgttagtagacccaaatatgatatcatcaacataaatttggcatacaaacaaatcatttgcaagtgttttagtaaagagagtaggatcggcttttccgactttgaagccatttgctataagaaaatctgttaggcattcataccatgctcttggggcttgcttgagcccataaagcgccttagagagtttatagacatggttaggatactcactatcttcaaatccgggaggttgctcaacatagacctcctccttgattggtccattgaggaaggcactcttcacgtccatttgataaacttgaagccatggtaagtagcataggcatgtaaaatgcgaattgactcaagcctagctacaggtgcataggtttcaccgaaatccaaaccttcgacttgtgaatatcccttggccacaagtagggctttgttccttgtcaccacaccatgctcatcttgtttgttgcggaagacccacttggttcctacaacattttggttaggacgtggaactaaatgacataccttattccttgtgaagttgttgagctcctcttgcatcgccagcacccaatcctaatcttgaagtgcttcatctaccttgtgtggctcaatagaggaaacaaaagagtaatgttcacaaaaatgagcaacacgagatcgagtggttacccccttatgaatgtcgtcgaggatggtgttcacggggtgatctcgttggattgcttggtggactcttgggtgtggcggtcttggaccctcatcatcttccttgtcttgatcattagcatctcccccttgattattgccctcctcttgaggtggctcatcttcttgatcctcatcttcatcatcttgagcttgatcctcatcttgggttggtggagatgcttgcatggaggaagatggttgatcttgtgcaggtggaggctcttcggattccttaggacacacatccccaatggacatgttccttagcgcaacgcatggagcctcttcatcatctagctcatcaagatcaacttgctcggtgaggagttcataagatgtcttcttgaggattcggtgaagatataaccggttgatggcgtagcaagcggtgttgaccgcctcggcccaaaaccgattcgaagtcttttactcatcaagcatggtccttgccatgtccaatagagttctattcttcctctccactacaccattttgttgtggtgtatagggagaagagaactcatgcttgatgccctcctcctcaagaaagccttctatttgagagttcttgaactccgtcccgttgtcgcttcttatcttcttgatccttaagccgaactcattttgagcccttctcaagaatccctttaaagtctcttgggtttgtgatttttcctgcaaaaagaacacccaagtgaatcgagaataatcatccacaattacaagaaaatacttactcccgccgatgcttatgtaagcaatcgggctgaataggtccatgtggagtagctcaagcggcctgtcggtcgacatgatgttcttgtgtggatgatgaacaccaacttgcttccctgcttgacatgcgctacaaaccttgtctttctcaaaatgaacattggttagtcccaaaatatgctctccctttagaagcttgtgaagattcttcatcccaacatgagctagtcggcggtgccagagccaacccatgttagtcttagcaattaagcaagtgtcgagttcagctctatcaaaatctactaggtatagctgaccctctaacactcccttaaatgccactgaatcattacttcttctaaagacagtaacacctatatctgtaaagagacagttgtagcccattttgcataattgagaaacagaaagcaaattgtaatctaaagaatctacaagaaaaacatttgaaatagaatgatcatatgatatagcaattttacccaatcctttgaccaaaccttgatttccatccccgaatgtgatggctcgttggggatcatggtttttctcgtaggaggagaacatcttcttctcccctgtcatgtggtttgtgcacccgctatcgatgatctaacttgtgcccccggatgcataaacctacaaaacaaatttaggtcttgttcttaggtacccaaacggtcttgggtcctttgatattagaaacaagcaccttgggtacccaaacacaagtctttgaccccttgtgtttgcccccaatatatttggcaactattttgcctgatttttagtaagcacatatgatgcatcaaaagtcttaaatgaaatgttaggttcatttgatgcaataggagttttcttcttaggcaatttagcacgggttgattgcctagaactagatgcctcactcttatacatagaagcatgattagagccagagtgagacttcctagaatgaattctcctaattttgtgctcgggataaccggcagggtacaaaatgtaaccctcgttatcctgaggcatgggagctttgcccttaacaaagttagacaatcttttaggaggggcattaagcttgacattgtctccctgttggaagccaatgtcatccttaatgctagggtgtctcccactatagagcatgcttctagcaaatttaaatttttcattttctaagtcatgctcatcaatcttggcactaagttgagctatgtgatcattttgtttcttaactaaagctaggtgatcatgaatagcatcaacattaatatctctacatctagtgcaaatagtaacatgcttaacggtagatgtagatggtttgcaagaatttagttcaacaatcttagcatgtaaaatgtcattctcatctctaagattggaaatagaaacattgcaaacatctaattccttagccttagcaattagtttttcattctcatttctaaggctagcaagagaggcattcaatttttcaatcttagcaattgaattagcattatcatttctaagattgtcaattgaatcatcacaaacatttgatttctcaaccttagcaattaatttggcattttcattcctaaggttggaaataatatcatggcaagtgctcagctcactagataattttccacatttttctacctctagtgcataagcatttttaactttaacatgctttttgttttatttaattaggaagtcctcttggctatccaagagttcatccttctcatgaatagcactaatcaattcatttattttttccttttgttgcatgtttaagttggcaaagagggtgagcaaattatcctcatcatcactataattatccttatcactagaagttgcatacttagtggaggattttgattttaccttcttccttttgtcgtcctttgccatgaggcatttgtggccgacgttggggaagagaaggcccttggtgacggcgatgtttgcggcgtcctcgtcggaggaggagtcagtggagctctcgtcggagtcccactcccggcatatatgggcatcactgcccttcttcttgtagtacttcttcttttctcttctctttcccttcttgtcgtcgcccctgtcactatcacttgataatggacattttgcaataaaatgaccgggcttaccacacttgtagcaaactttcttggagcggggcttgtagtccttccccctcctttgcttgaggatttggctaaagctcttgatgatgagcgccatttcctcgttgtcgagcttggaggcgtcgatggggactctacttggtctagagttttctttcttctcctccattgccttgaatgccacgggttgcacatcgggtgtggaggaggcgcgttgctcgatgattttcttggagcctttgatcatcaactcaaagctcacaaattttcctattacttcctcgggagacattagtgtgtatctaggatcaccacgaattaattgaacttgcgtagggttaaggaaaataagtgatctaagaataaccttgaccatttcatcgtcatcccatttggtgctcccgaggttgcgcacttggttcaccaaggtcttgagccggttgtacattgcttgtggctcctccccttggtgaagcatgaagcgaccgagctccccctcgatcgtctcccgcttggtgatcttggtcacctcgtctccttcgtgcgcggtcttgagcatgtcccaaatttcttttgcactcttcaacccttgcaccttattatactcctctcgacttagagagacgaggagtatagtagtggcttgggagttgaagtgttggatttgttcgacctcctccgagtcgtactccttgtctcccttctttggtacctgcgctccatactcaacaatatcccatatgcttttgtggagtgaggttaggtgatgcctcattttatcactcgacatagaataatcttcaccttcaagcataggtggtttgcctaatggaacggaaagtaatggagtgcgttttgaaatacgaggatagcgaaggggcatcttactatacttcttgcgctcatggcgtttagaagttgcggatgccgattccgatccaaaggtggagggtgacgaagagtcggtctcgtagtagaccaccttcttcatcttcttcttgtcaccctttcgttggaacttgatggaggaagaggattcctccttgtgcttgtgggtagactcccttgagtgcgttctccccgagcttgcggacttgtcgccggtcccgatctccctcttggcggatgctcccgacatcacttcgagcggttaggctctaatgaagcaccgcgctccgataccaattgaaagtcgcctagaggggggtgaatagggcgaatctgaaatttacaaactttaaacacaactacaagtcggggttagcgttagaatcaaattcgagtccgaaagagagggcgaaaacaaatcacgggaaaataagacgaatgacacggtgatttgttttaccgaggtttggttcttgcaaactttctccccgttgatgtggtcacaaagaccgggtcactttcaaccctttccctctctcaaatggtcacttagaccgagtgagcttctcttctcaatcaaacgggacactaagtccccacaaggaccaccacacaattggtgcctcttgccttggttacaattgagttgaacacaagaaagaatgaagaagaaaagcaatccaagcgcaagagctcaaatgaacacaagtctctctctcatgagtcactatttgattggaatgatctttggacttgggagaggattttatctctttggttgtgtctttgtattgaatgctatagctcttgtagggtgtttgaaggctgaaaatttggatgcattgaagtgtggtggttgggggtatttatagccccaaccaacaaaagaatcgttggtgagggcttctgtcgcatggtgcaccggacagtccggtgcgccagccacgtcactcggccgttggattctgaccattggagattctgacaactgggccaccggacagtccggtggtgcaccggacaggtcctgtagactgtcctgtgcgccttctggcgcgtgcctgacttctgcgcgcactgtagcgcatttaatgctgttgcaggcgaccgttggcgctgtagtagcctttactccgctggcacaccggacagtccggtgaattatagcggagtggctcccagaattcccgaaggtgagtagttcggagtcgggttccctggtgcactagacactgtccggtggcacaccggacagtccggtgcgccagaccagggcacacttcggttgtcttttgctctctttgtttgaatcctttcttggtctttttattggtttgttgagaacctttggcacctgtagaacttataatctagagcaaactagttagtccaattttttgtgttggacaattcaaccaccaaaatcaattaggaaaaggtgtaagcctatttccctttaaggcggccccggcctggctgtggcgtggcgaaggcaa

SEQ ID NO: 920 - DNA, 9603 bp, Zea mays
  Intron number 1 from transcript GRMZM2G070937_T01 (locus G RMZM2G070937) derived from phytozome v7.0 (chr-ID 2; pos 2 25771628 to 225781230)
tacctgtaagtcacctctctcacttgcagcttctccagcctctgaatcacatcattagatgcaaggcacgatgtacccgacgtaaggttggacgatgctgttgcgtttcataccattcagggtagaaagattttgaattggtcagtcagagcggataacacttctgcatctaggcttgtagttactctgtaaactgtgaactctgctttcttcagacttcaccggtcaagatgaggcttatcaattcaattttggcatgactaatctagtaatctggttaagtaccatcaccatggactagtccctaggttctttcggtaataaggtctggtaaccaaaaatgaaacaagatatgcatgaacgcatactataataatgtgacagaaatggtacgcggatgttatatctcacaatgtatactttttgaaatgaaccaggcaaagcttgccggttatattaaaaagaagaaacccagactggttaacacaataaacaaaactgggcagttggattgggacatcaacacacactatataacacttgcacggttaaggaccgacaggttggattggggcatcaacacacatcgcaccacactagcacaacacaccacacgactcccagcagccctcacagcccggcataggttatcgttgccgagcatggcaccaaaccaagcaactcctattatgttcaaaaaaaaaaaaccaagcaactccgatttccccaccagactaagccaacagcacacccaggagagtcccaagatcaacaccgtgcgtcatcgttgccgagcttgcctcaaaggtgtcaagcagctccaacttgccacgacgagccacaactagaaacccaaggcatccccacctactgccagcaataccaccacacctggcaagagagtggcagcacatcgtcgtcgcccagcttcactgacccccgtaggaagcagctccgacttagcacaagcaagctcaaccaacgacggagcagcgcgctggagcaaacggcgacaaaggaagcaacaacctcggtgaagacccagacacaccctaggcaccaacggcgcaaaagcaactatcagttacgacttccatggtgggccttagccgacagtccaaggcaccccacctacacacatcaaacaccaccacacctgtgtaagcaatgggacacgggactctttactctcatcgagacgatgatactatgagttaaggtgattttctgtttattttctcaaatactacataatgtcatgcccatataaggattatagatacatatttatagccttagggactgcactacacactacacactacacagtgaacacactgcactacacaccactctgcagtattagagatgctgttatctctgctgtcctctagatgctaaaggataatcaaaaaagtttctgttgtcctctagatactaaaggagatgttgtcttgcaacatgctgtccttcacaagaccatgcactgtcttctagtctaaagaccaacagcaacagtagatgccgttgtcgtaaagcaaacctactgtcctcaaaaaaaaaaaactacagtaaagaccaacagcaataacagatgccgttgtccttcgctgtcctaaagcagtaaaaaaaactgccaagacgacgagacttttttttttgaaaaggcaggaggtctgccaagatatattgataagaagaataacaagaggtttaagtcaatacagtgaccgaagtactaggcaaagatccaacctgaagagaagtaaacaaaaataaaaaacagaccccactaaatagttgttaaggggtaactaggtgcttggcccctgccaaaatccaggctgctgtctcactcttgattttggcaatgatttgttggcagctcgagaatctgcgatcaaagattctcgcatttcgttctcgccaaatctcccagtttacaaggatcaaaagtgatctgatgccttttctattgcatcccggcaaaaaagccagcttttcccaccaatgccccagctcggggggtcgcccccagttagacggcttcaggccctgaacagctacccagacagcaacttcctcccaaattcttttgatgaaacgacattccacaaaaagatgaagccccgattcctgggcagcacgacacaagacgcaagttggttcatggggccaattcctggcggctaatcgatctgctgtccaaatgcgattttgaattgctaaccagctgaaaaacttgcattttggaggcgcccagttcttccagatgatgaggtcataatttgtgtgaacagagcccaaaaattgtgcctgatatgccgatttgactgtgtagcggtgatccacagtgaaattccaggtgatggcatcatcacgctctgggtgaaactggatcttttggacttcagaccaaagaatgcagaactcatgaatgtggtggggagtaatcggtctgtcgaacagcgcaagatccatgatccaggcattgtttgtgaccgcctccgctaaagatttcctcttatttcttgatatagaaaagagacgaggcgccaagtcctttggcctttgccccctcacccaagcgttgccccagaaggagattttagaaccatcaccaatatcaatggtcgtcgatgccgcaaaaagcagtctatcaacatcagagcaaggaatctctaagttgtcccaaatattctgtgatgaggtgcaattatgccagagccatcgcgcgcgcaaggcacgcgcaaaagcgcccaagtcaagaactcccaagcccccaagggattttggcctcgccacccgtttccagttgactttgcactttccgcccgtcagtcgttcagaaccagcccaaaggaattgtcttcttttggagtctagaaggctaatcgttgccttgggagcattaagggcggttaatagataaattggttgtgaggtaagcactgttttcaccagatttaagcgccctgccactgagaaatttctcccattccagctgctcagtttgttcaatactttgtccaccaaaaactggaagtgctccttcctgagtctagttgtggagagagggaggcccaggtaccggatcgggaaggttgctcttctggctgggaagcaactaaggatgtcatcaaggggtagcccctggcaacggattgggacgatcatggacttctgaaaattggtcatcagaccagaggcctcgccaaatgaggtgagcaacttgacaattgtctcaatatcctcttttttcggcttaacaaacaaagctgcatcatcagcatatagcgagatcctaatgctgggcgagctgtttcccaacttgctcaatgctccactgtccgcggcgatctttagaattttttgcaaagggtctatcgccaagacgaacagaagaggggagagaggatcgccttgcctgagacctctctcatgatgaataggagggttagggaccccgttaacgagcactcttgatgttgaggtggagaggatagaagcgatccagtcagtccacctcacagggaatcccaaattgcggagtaaggcaatcaagtaatcccagcggacggagtcaaaagctttttcaatgtctagcttgaggaatagcgtgggcgaattaatacgctggaagcgcctaacagcgcttctaactgcaaggaagttttcatgaatgctccttttttgaatgaaggcactttggcaaggtgaaactaactcattcattctcggcgccagacgaagagccagggttttggtgataatcttaatgaaagaatggatgaggcttataggtctgaagtccccagctacctccgcgccttcctttttggggattagaatgatgtttgctgaattgattaattggaggttgaggcatcgattattatagaaagcattcactgcagccatgagatcatgtcttataatggtccaacaagatttaaggaaaacaccagtgaagccgtccggccctggagccttatctcctggtaaaagatcaatacttctcttaatttcctcctcggagaacggcgcgtcgaggcttgatagatcaaactgctggtcagagataatgtcccagttaaggtcgatagatctaggggttggccgctttaaagcattatggaagaaattttgtagctcttgcgctttttcattgtgcgagaagacccacccattaccgctccgcaaccgttgaatgaaattttttcgcctcctggagccagctttccggtggaaaaatttagtgttggcatctccgaatttaagccaaagcatgcgtgagttttgcctgtttcgtgccctttcaattaccgcatagccaaggatgcgcatcttcaatctatttcggaggttcacttccatgtcggacagtcccctattttcttgtgccatgtccagtcttagaataacttctagggccatatacataaagagtctagcatcaggtattaacttggagctccattccttaagcgccttggccgtgaactgcagtttgtagtacagcctatgaaaaggctcacgatgttgggtcggtgccagccaggcttgctcaactgtatgctggtaacctggtaatttggtccagaaattctcaaatctaaaggaacgtggacgcctcggcatagtagtattggataggagcaacgggcagtggtcagagacccgaggatgatagtgcatgcagaccaaatattccgaacatctcctcccattcagagttgcagaagaatctgtctagtcttacgagagtgggatgtcgtctctcattgctccaagtgaacttcctgttttgcaaaggaatttctttcaagtcgcaaatgtcaagagcttgcctgaacagaagcattaggcgagggttgactctagaattgtttttgtcgcttgctttgtatgtgcagttgaaatccccaaggaccaaccagggggaaggtgaaggaggcctctgtgcactcatctctcttagaaaatcaggcttgcggcctctacaagatggtccatagacgactgtcaggtagaaggaagcacaacgatccttaagagagacatttgcagatatgtggaattctccgatagtaaaattggacaattcgagtaggtcgctatcccaaagcaaaagaataccaccccgtgttccactaattccttccgcaggtttaaaactgaatttattaagctttggtcctccaagcgccatcacaatggacctgtcgaccgttgataatttagtctcttgcaaacaggcaagatggcaagtggtggtggagatcatcgcgcgcactgcatctcggcgcgcttgcaaatttaaacccctaacattccagcacaggatgctaaagtcagacatggaggagaaaagcaccccgattaattgccgacagctggatgaaattgcagcactgcacaataatgacagtgaaacataaaggggccaccagggccaacacaagcatggctgttataggtctgaagcaaaacagcaacccaatacagtccagggtgctcacaaaagtagtagaaactgagctgagactcattgacataacaaaagcagaccctcatcatctaacatggagctaaaacagccatcaatcaagccgcagtaactgctctggcctctgcatgcatggcgtccacctcctcttggatctcagctatagcatctccagcaattcccagcaaggccttgtcgaggcgaactgtgtctggcgtatccagattgaacagagcatctagggccgtccccatctccacagtcagtggcttcttgaaccaatcctgaaattcctgcaaagcagtattaaaatcagcagcgtcatcttttgccaagagaccaagcttgcggcagaggacgcgctgggcccgttgcatgacattcgttcgagggccgttggcaagtctggcgctacgacgtaccgtcgaaaggttgaagccgtgtcgctgcttgattcttctagcaggtgctgcaggaatagtagacagagtggtcgctggtgttgttaccccctccgaaggatgtagcactggtcgctcgagtatggcaggcgagggcttggtgaatatggtgttgagtagatggctttgcgcggtggttgacaccgcagcaacatctgttgaaggttcatgcaccgcagctatcatccgagaggaagcgtcgacattggagtcctttacagcttcggcgttgtagcccgcagcaaccgtgctgcagggagagcctaacagcacatggtcctcctcagactgcaccaaaggcagtagctgcatagcagggcatgttggaagggaatcaagaatagttgtgaatgctcgctgcactgggatgagacttacgttgtctgcgaacttcatcctgctgccatcccagacagcaaggttgctgtcgccagcagcagccccagggaccggatcgacttggcccttaggcaccaagcgcggtcgccttcggtacacgcagccaacgcggtaacgacctttaggaagagctgcagccttcacagcagggcgcggagaaccgtcgttgccaccaccgcgtgagctgcggatgccgggactgcaggcgcttggtggaaatctggggcgagcaggatgccgtgggggggtcgctgaacggccacgccggacagcaacacgggtggaacggcgcacacggctgcgtccacgtatcgccgggtcacgaccaatcgccgggtcacggccaacatgtggcgtaaccaacgacgtgcctccggcatgacgaggctgctgatcgccatgaaggtggtgacgaagttgctgatcgccgtcgaggtggtgacgccgcctgggtgagtcatggcgctggccatggcgcgaccccgagcgctcccgctcgcggtccctgggagcccgcgagatgctacgaaagagccgggagctccaactgtcgtcgcgtcctgggcggcgaccacgacggtcactatcaccatcctcatccctgcgacggttgctgcgaggtggtggagggtcgtgacggtcacgtggttcgcactcgccgtcaacaacaccaagcctccaatcatacgcacgtgaatgcccatggccatccctggtaggggggtcttccaccatatcaaggtggacgatgaccctgaaggttaagccgctacgccccgccggtgtcgcgtcgtgggcagtgctgctcctgtcaacaatggtcagccacgttaccttaggtatgtcagacgggtttcgcgcccacgcccacagattgagcgtcgtagcatcctccattcgcagcgactgggcttcaacgtagtccagcacacaggacttagccaccgcacgcttggcgatgccatcgttccatgcgtgcagagggatgccttccaggcacaggcgcacgtgggagccgaagacgctgtggtcgccgtggacggggagctgccacggcctgacgcggatgtcgatgttgttgtaggtgaagtcgcgctgcgccacagccgtgtcccggtgatgctggtgttcaaaggtgacgaggaagtcctctggatagtgtctcaccaccttgatgtcttcttcgcgcatcctgaacctagagcagaaagcccttcttactgtgttggtgcttgtcgccggtcgaacgccgccgagccaggcccatgccgcgtgggtgctcaaccgcgccagctcgctgtccatgtcccgagaggacgcggcaacagcgaaagtctcctgcgggcgctccatggggttgccaggcttcaccatgttgacttggcgcagaggagggaagttgacgttgtcgaagcagggaggtggtgggaaggcagagggggtagaagcagcagcactaatcttcttgggacattgccaggctctgtgtccagggccgccgcagttgaagcatttcaacggatccctgcaatcaatggcgtagtgccctctggccagacatcggaagcatttacctctcaggcttaccttaagatttttgttgtccagatggcggaaccttgaatgctcggttgttggcttcaatgaagtcgcaggcgaattgaatctcttgcggagtcgccgatggaccgttgtccagccaggcaaatcttcagcgccggattccgcggatttgctgcgttgaggagtgatgggacgcaggcctgggtattgaagtcggtgggtagcagtcccatcccggccgtgcggagtgattttcgttggagcagcagacgcgtcaaagcaggaacgatgagattggtcggcggacagagctgattcggcgaacctaactctcctggtgcaggcggccttagctgtcgacgaaccggcggcaggcttgaggcaggaccgcgtcgaagaagaagtcccggagtcagatctgggaatgcgggcgtccgcgtcgaatgctggaatctccaccgaggcagggtggctctggaggatggaggcctgatcaatggggtgatggaggggttggggttggttttccggcgagcaggcggggggagcggcagcggcggcaggtgcggtgctagccgccgcgaggacggggagagcgtccattcccttttgatcaggtgctggccatccctgaagctcaaactagagaggatgatgtccgcaagacaggcagcagtgccgagaagggtgaccttagcagcactaagaaggcagcgtagtggggctccaaggcgacgcttccatggaggacaacgacattgcatgtcgccatcgcctgcccgagctagctcagtcgaggtttccctcggagaatccccacggtgaggaggaagcgccaacgacaacgcttctaaggaagacaacgacactaaaagtgccgccattgtcggctctggcagaagccaaccaaggctttcgtccaaagcttcacccctgaccaccatcggaagcacgcagcacaacagccacaggcccacagctgggtagcccgccaccaccgccggaccactctgtagccctagcaggcagcaacaacgctgtgaccgcatcgccagaactcctacgcagtcaccacccagtggtcttcctcgccgcagcccgcgtgccggccagctccaccattccaaggggccgccagagccccgccgagtcgtccatgccgccgtgcgacgtcccctgctcagatctgcccgctgacgggccagtgccagcgccgacacaggctgggtccaggtgaggaccccaagccccgctgcacgcacgtcccaggacctgcgccgtggagcgtcgccacgctgacgagccgtaccatggcgaccttggcggccgcgcccgcccagatccaccggtgggagtcggagaggccccgccgccgccttccccgcgagccgcgcggacttcgggcggcccactcaggcagcggcgcgacaggaggaggcccccggcgaggtggcgacggcggctagggttgctgggggcgtccgagtcgcccaacgcgggggcgacatggaccgcgtggctgattcctcacaatatatacttgcaatgatgtttccttcaacctcggtctcaatgatttggcatacagagttaactggttttgtagcacattctcttcggcgctgaattcaaacaggtttacaggcacaatatcctcttcacttggtttac

SEQ ID NO: 921 - DNA, 38874 bp, Zea mays
  Intron number 1 from transcript GRMZM2G155675_T01 (locus G RMZM2G155675) derived from phytozome v7.0 (chr-ID 9; pos 6 5009943 to 65048816 reverse strand)
aggctgcaaatcttaagggttcgaggccagccacggtgagactgaccagcgcggtggtagcttctgtaggggctccatggctggccccactagggtaagtgggcccacgtcggcgtgagcagaagcgagcacgagtggggttgtggccaccggagggcgcaggccggaaggagggagatctggcgactggggaagctccggcggagttggggccatagaccgctgttgtgcaaggcagggaaagcggcgagcgtgtgggtggtgttgtcgatgtcgtgaggaagaagcacttgggagggagaggggcgcacggcctgagattggcacgacggccatggcacacgggcaaggagcgcgccttagggcaggtttggcagcagtggagctcccatctagatcaagacagggctgggtggccggtggatgttgggggtctgcttcgtagccgaaggtcctgtaagaagaaacatcttcggaagatcagcatggaaatagtgtcgaagctaccttacagggaacttcggcataacgtcatgcctaagatgaagggttgcaccgacttaaagatgaaaagacagattgacccatgatagtttgtgtcatggatgtaattagttgtaaagggtataaatgtaatttcacacaggctgcgcccggtgcctataaatagatgaacaataccctattactgttcacgctgatttgtactcgcccgtgcattacgcttgtactacctccttctgtcaagccgaaggtacaaatgcaattctgtattatctctgtttatttatgacaatataatagaaaaatgagttaacaatgttacataatcattcatgttgttttctatgttttacatgcttcttctttcattaatgtatactgcaatcatgaagttatgtccttcatgaccttcgtctgaagatcattatgtcccaagggaaataatgcttcgaaggacgaagggccctaacctttaaaattttgtgttgccttgttcttaatttatagcatttgagaacaagtctccaacattggcgcccacctccggtgaactcacttccactcttgagctgatggcttcgttcaacaagctgatggcttcgttcaacaaccaagccgaagcatcgtcagctaggaagctggtgcttctaataacaggcggctcaggttcaaagccggctaacacgaagtagaagaaggaagcacagagaagggtgcagcatgttggggagcagggacccttcatcaagtcaaaatggtcccacatcccaatcaccttctcccaggaggaccttcagctcaaagattaccctcataatgatgctatggtcatatcttgtgtcattaaaggattttgggtccataatgttctggttgatacaggcagtgcagtagatatcatatttgctaaggctttcagacagatgcaagaaccagaggataagattcatgatgctacacatcctctatgtggtttcggaggaaggaacattgtagcacttggcaaaatcacaataccggtaaccttcggctttgttcacaacacaaggactgaacaggttgtgtttgacattgttgacatggagtacccctacaatgcaatgattggtcgtgggacacttaatgctttcgaagcaatacttcatccagcatatctatgcatgaagataccttcggaacaagggcccattgctgttcatcggagtcaggaagctgccagaaaggccgaaggaaactggatagattcaaaggcaattcataacatagatggagtcgaagcctgtgagcagtatcgatacaaaagagagaaggctgcttcggcggatcagccgaagcctatgctcctatgtgaagacatagctgaacaaaaagtactgctggggtctcagttattcgaagagcaggaaaagaatttgctaagatttttattcaacaacaaagatgtctttgcttggtcagccaatgatctttgcggtgtcaacagagatgtcattgagcattcacttaatgtggatccatctttcaggccacgaaaacaaaggcttcggaaaatgtctgatgacaaagctgaaggtgctcggaacaaagtgaagaggcttcttagcgctggagttatcaaaaaggtcaagtacccaaagtggctagctaatactgttatggtgaagaaggccaatggtaaatggagaatgtgcattgattttatagatcttaacaaggcttgtccaaaagatgagttcccattgccaagaatagattctctagtagatgcaacagcttcgtcagaactcatgtgtctactagattgttactcaggctatcaccaaatctagatgaagaaggaagatgagccgaagactagcttcataacgcccagtggcacatattgctatcttcggatgcctgagggccttaaaatgctggaggaagcttcagtagaatcacagccagagtccttcattctcaaataggcagaaatgtactaacttatgtcgatgacatcatagtcaaaagtacgaagcaagaaaatcacattactgatttgcaagagacatttgccaacttcaggcaagctggtttgaagttgaatccagaaaaatgtgtttttggggtaaagaagggcaagttccttggttgtctagtatcaacgaagggaattgaagctaacccaagcaagattgaagctatccttcgtatggaaccgccaagcacaaataaaggagctcaacggttggcaggtagattagcatcattgaatagatttatatccaggtcagtagaaagaaatctacctttctttgagatactaaagtcagccgaagtctttcaatggggtccggctcaacaaaaagccttcgaagagttgaagcaatatttgattgatttaacaacattaactccaccttcgccagggcctccattgctcttatatgttgcagcttcacattttgcagtaagtgccgcacttgtacaagaaaagctagatggccaagtcaaaaagcaagctccagtgtacttcgtctttgaagttctaagtctatcaaagaaaaattatacagaattggagaaggtgttatatgctatgttaatggcctccaaaaaacttcggcactactttcaagcatatcgcataattgttccttcgtcacagcctctgaaggacattatgaggaatagtgaagttactagaaggattgggaaatgggctgcagaactcaatgaattcgccatcgactatgtgcatagatcctcaaatcagtcccaggcgttagcagacttcatcgctgattggacgcaggggctcacaaagaagaaataaacaaggacgctgaaggttggacaatattctgctatgttatgcagccaaactggatttcagttgcaccaataatattgctgagtatgaagcacttcttttggggcttcggaagctaagggcaatgggaataagaagggccatcttaaagactgattctcaagttatttctggccatgtcgacaaaagtagcaaggcaagagatccgaagcttgaaagatatctagatacagttcgaaggttggaggcttctttcgaaggtttttctgttaagaatatcccaagaggtgaaaatgagcacgcagatttattagccaaatcggcggcccaggggctccctctaccttcggaagtattttttgaaacaataaaggcaccttcggttgaactcatggagagagcagtgcttactatttctcaggtacatagtgaagactggaggactgaaattatatctttcctccaaggtaattgtctttcagatgacgaagcttataataagagaatggaggcaaaaacaagaccatatgtgataatagaaggggagttatacaaacatggagtctattccccacttctcaagtgtttatctagaaccgaaggtatagagctgatgaaggaatacatgcaggtttgtgtggatctcacattgggtctaggcctttgctggggaaggtcttcagataaggattttattggccgaaggcagcttcggatgtagcaaatctggttcaaaagtgcgaaaactgtcaaaaatgtgtaggagaccagaaacaaccttcgtcgctaacccagttaatacagccaacctggccattacaaagatggggcctggatttgttaggtccaattccaccagcacaagtcaatttaagatatgttgtggtggctatagaatatttttccaagtgggttgaagcgaagcctttggccataataacttcggtcacagtctagaaatttttttggcaaaacattgtttgtcgctttggcgtgccgaaggccataactgtggacaacggaacacagtttgatgccaaagctttcaaggaattttgtgatcaaattggcacaaagattcattttgcgtcagtcaggcatccagaatcaaatggacttgtcgaaagagcaaatggtattataatgacaggaataatgaagctaatctttaatcagcctagaggaaaatggccagacgagttgattaaagtggtctggagccacaatacgaccgtatcaagatcaacatgttttatgccattcaagttattatttggtgatgaagctataaccccagaagaagcaaaagcggggtcaataagaacaatagcttcggcagaagacgaagctgattatcatgtgacaaaagacactatagaagggactagacttcaggctgtggaaaatatcaataaatatcaagccgaaacaataaaatggcgtgacagaaaagtccgattgaaaaatatcatgccagggcatttggtgcttcggagagtggctaatccggacacattaggcaaactacagctgaagtgggaaggaccttttctggtggtatcttcgtcaaggcccggttcgtacaggttgaaggatatggacggcaacgacattcctagatcttggaatgcggatgagcttcgacgatattatgtgtaatttgatgtaatctttcttcattttttctatggcacccttttcctttccaaagggggagaaaggtttttaatggggccatagtttgtaatttttcttttcttattcagctccatgagagcaaaatcccccaaaagaatgtaaaatgtaacatctgagcgagcaccatcgagtgcagagagaaaaaaaaccagggagaagctcaaaagccgtccctaaggggatgcagagcacgacgaagctacaaaaagtcattctaagggagcacagtgtaagttttctgctcaaaagtcgttcctaagggaatgcagatccaaataccgccgaaatataaggcgaagaagttcaaaagtcgttcctaaggggatacagaacttacaccgaaaaataagcggtgcagccgaaaaataaacggcaaagagatttcaggtattcctaagggaataaagagtttttgatgcggcttcgtaagcgtgtgtctggacattcatttgcacaatacatcgcatcattcattgcattcatatgcattcatttagacattcgtaggatcatcagcaccataccacagaagtatagacagttgcttcggctttaatgacaaggcttcagcaagaaaaaaaagagaagaagcaaatttatgcttcgttgtgtacgaaaagaagggaaggtgtttttcgacttcggctcaaaaaatacaagtttcgtccacatcaaagcaattcacacatggacagaaaaggtaaaagtatattacaaggtatgcacaaatttacagagtagtatctgattcttaaattacaatattttttacaacgataattcaagaatttctctagagttttttcatagcagtatcttcagcttcatcatcatccgtcaagcttcgaatcattgctcttcggcttcgtcatcctgtacataacaaaacgttataaggtaaactcaagtttcaaggagaaggtaagcatcaaatatggatttattaccggcttgaggtggcttctagcttcgtcaccagctaaatttcgcccgccctttgtctagatttgtgttatgaatctattccctatgcttcgagctaggcaggggatatcaatcagatctgctggtgataagctgaagtttggtctattaacgattttcccatgcgtgcagccagttttcatgaaggcaacagatgtgcctcgagaagctagcagggcacaaaaatcgtcgtgcctagctataacttcatcaagagcgtcaacttcgccctcaatgtgttcgaaagttccgggcaggttttcaactgaaggattaaacttctcagaactggccccaactgagttgaagacctgcttcagccgctgcacgcatcggttgccgaagtctacgcatttatcttgaagctctttcaatgatttctgtaaatttgaacttttttcaacttcagcctcaagcttcacatcgaatttctgcttttcctattccaagttttctgtctttgcgaggacttcgctattcaatctggcaattttagcttgggcttccgacagtaagccttccattgattgaagttcaaaatccttcttctctagagcagcttcgtgatcttttattttgctctctaagccttcaattataacttcatgttttttatcttcaaggtcctattgcattctcaaggctttactcaatagcatgctctgctgaaagggaaatgtgcccttgggcaatttctagtacgttttggtgattaagtgcccaacacatttaattaagttcatttgtgctaaatgaagagagaagtgcaaaacaaagacaaggtatgtttctagacttagcacattggtttttgtgtactaatatacttgcctaagtgctagaaacagagaaaagagaagaagaaaaggacttggctcgagcagccaactctcagctcagtctggcacaccggattgtccggtggtgcaccaagctggcttccggcaaactggccgcttcgggaaattttggcggcgtacgactaaaattcaccggactgtccggtgagccaacggccaccagcgcaacggtcgaccgcgcaatcgcgggcgacgcgtggcccgcgccaacggtcggctgggggcaccggattgtccgatgtgcaccggacagtgtccggtgcgccagccagcccggagttgcaacggtcggctgagctagaataggaaggagatcgcgcaccggacatgaacagtggatgtctggtggtgcaccggactgttcggtgcgccacccgacagaaggcaagaattgccttccttgttggcctccaacggctccaagctgacttggggctataaaagagacccctatgcgcatggaggagctatccaagcattcactaagcaattctaagtctccacactccatctccacgcatttgatcgatcgtgttagtgatttgagctccgttctagctgtgaactctctgtgcttcatttgagctcaagtcttggcttgtgtgcgtgtgttgtgctgcgaatttgtgtgcattgctcccaaccttactcttgtgtttacattgtgatcgttgttgtaagggcgagaggctccaacttgtggagattcctcgcaaatgggaaaatatataagcaaagaaaagtcgtggtattcaagttgatcattggatcacttgaaaggggttgagtgcaaccctcgtccattgggatgccacaacgtagaggtaggcaagtgttatacttggccgaaccacgggataaaccattgtgtctcttgtgttgtctttctttgtgattcgcaagaactcactctatagccacttggttcttttgagcactgacatctttataaccaagttttgtggatactagttgttgaattttacaggatcacctattcacccccctctaggtgctctcaattggtatcggagccgttctcttcacgtaagggactaatcgctcaaagagatggatcctaagggaaaggggatggtggtcaacgacaaggataaggagtccttcctcaacgagcctagagacaacaagcctactgactctggctcgagtcacaagaagaaggacgggaagaagaagaggcgcatcaagaagatcgtctactacgacagcgacgagtcttcttcaccaagagacgacaacgacgagaaaaagaaaccggttaattcaaattattcatttgattattcttgtattccttttaactccaatgctcatttgctttcaatttctcttggtaaacctccacactttgatggagatgactactccttttggagtcacaaaatgcatagtcatttattctctctccatcctagtatttgagagatagtcgaaaatggaatgcaatttgatagtacggataaccctgtatttattaacgagcaaattcataagaatgcacaagctaccactgttttgatagcttcattgtgcagggatgaatacaacaaggtgagcggcttggacaacgccaagcaaatttgggataccctcaagatctcacatgagggtaatgatgccaccatgatcaccaagatggagttggtggaaggcgagctgggaaggttcgcaatgatcaggggagaagagccaacacaaacatacaataggctcaagaccctggtcaacaagattaggagttatgggagcacaagatggacggaccacgacgtcgtccgacttatgctaagatcattaacggtaattaacccccatcttgttaacctaattcgtgagaatcctaggtacaccaagatgacgcccgaagagattcttctaacgtttgtgagcgggcgcatgatggtgaaggaggcccgatatgtggatgacgctctaaacggtccactccctgaccacgagcctcaaactattgccctcaaggcaaccagcagcagggagatgctaccaagcaaggtggcacaaattgaggcggccgggctaaacaaatatgagatggctctcataatcaagcgcttcaagacggcattgaaaggacgcaaggagtaccctaacaagagtaaagcaaggggaaagcgctcctgcttcaaatgtggtaagacaggtcattttattgctcaatgtcccgataatgaaaatgaccagggagaagaaatacatgggaaaagggataagaagaaggcctacaagaaggcgaagggcgaggcgcaccttggcaaagaatgggattcggactgctcttcctccgactccgacgacgaaggacttgctgcctcagccttcaacaagtcctctctcttccccaacgaacgccacacttgcctcatggcaaaggagaaaaaggtaagcgttcgagaaatccctaagtataccacttcaagcgatgatgattctagtgatgatgaagtagactattctagcttattcaaaggcttagatagagcaaaggtagaaaagataaatgaattgattgatgctttaaatgaaaaagatagacttctagagaggcaagaggacattttgtatgaggaacatgacaaatttgttagtgttcaaaaatctcttgccttagaaattaagaggaatgaattactatcttctgagttatctacttgcaatgaatctatatctagtttaaagactttgaatgatgatttaagtggtaagctagaagtagctaatagatcaagctcatgtgttgaacatgttgttatttgcaatagatgcaagaattttgatatcactgcttgtgatgaacatcttgcttctattgttaaattaaatgatgaggtggcaagtcttaatgctcaacttaagacttgcaaggtggaatttgcaaaactaaaattgctagggaccctaaaaaaaagacgaaagaaaacgccccgagaaattttgtgtctcatgctcctaggaaaatgtgtaataaacgtactactgtctttcatgcttgcaacactacgtttgtactttcatgtaaaaatgaaaaagtggttgctaaaaaattgggacccaaatgcaaaggagacaaggcttgcatttgggtaccaaaagctgttgtaactaaccttgtaggacccaacaagtgttgggtacctaaaacccaagcgtaaattgtcttgcaggttcatgcatccgggggctcaagccggattatcgacagcggatgcacaaaccatatgatgggggagaagaagatgttcacctcctacgtcaagaacaaggattcccaggatacgattatctttggagatgggaaccaaggcaaggtcaaaggctttggcaagatatccatcacaaatgagcactctatctctaatgtatttttagtagagtgactaggctataatctcctgtctgttagtcaattgtgccacatgggctacaattgtttatttacaaatgttgatgtatctgtctttagaaggagtgatggttcattagcgtttaagggtgtactagatggcaaactctacttagttgatttttcgaaagaggaggccgatctagatgcatgcttaatcgctaagactagtatgggctggctgtggcatcgccgtctagcacatgttgggatgaagaaccttcacaaacttctaaagggagagcatgtgttaggactaaccaatgtctgtttcgaaaaagatagaccttgtgcagcttgtcaggcagggaaacaggtgggaagcactcatcacaacaagaatgtgatgacaacatcaagaccactggagctactacatatagacctcttcggacccgttgcctacctaagcatcgggggaagtaagtatggtcttgttattattgatgatttttcccgtttcacttgggtgttctttttataggataagtcagaaacccaagggacccttaagaactttctaaggcgggctcaaaacgaatttgagctcaaggtgaaaaagataagaagcgacaacgggtccgagttcaagaatctgcaagtggaggagtaccttaaggaggaaggcatctagcacgagttcttcgctccctacacaccacagcaaaatggtgtggtagagaggaagaacaggacgcttatcgacatggcgaggacgatgcttggagagttcaagacgcctgagcggttttggtcggaagctgtgaacacagcttgccacgccataaaccggctctaccttcatcacctcctcaagaagacttcgtatgaacttcttaccggtaacaaacccaacatctcatactttcgtgtatttgggagcaaatgttacattctagtgaagaaaggtagaaattcgaaatttgctcccaaagttgtagaagggtttttactaggttatgactcaaatacaaaggcgtatagagtcttcaacaaatcatcgggtttggttgaagtttctagcgacgttgtatttgatgagactaatggctctccaagagagcaagttgatcttgatgatatagatgaagatgatgttccgacggccgcaatacacaccatggcgattggagatgtgcgaccacaggaacaacaagaacaagatcaaccttcttcctcaacaatggtgcactcccaaactcaagatgatgaacaggttcatcaagaagaggcgtgtgatcaagggggagcacaagaagaacaagttatggaggaagaagcaataccagcccctccaactcaagtccgggcgacaattcaaaggaatcaccccgtcgatcagattctgggtgacataagcaagggaataactactcgctcacgattagctaatttttgtgagcattactcgtttgtctcttctattgagcctttcagggtagaagaggccttgcaagatccggactgggtgttggccatgcaggaagagctcaacaacttcaaacaaaatgaagtttggagcctggtgccacgtccaaagcaaaacgttgtgggaaccaagtgggtgttccgcaacaagcaagacgagcacggggtggtgacaagaaacaaggctcgacttgtggcaaaaggttatgcccaagtcgcaggtttggatttgaggagacttttgctcctgtggcgaggctagagtctattcgcattttgttagcctatgccgctcaccactctttcaggttgtttcaaatggatgtgaagagcgctttcctcaatgggccaataaaggaggaggtgtacgtggaacaaccccctggctttgaggatgacaagtatcccgaccacgtttttaagctctctaaggccctctatggacttaagcaagccccaagagcatggtatgaatgccttagagatttcttaattgctaatgctttcaaagttgggaaagctgatcccacgcttttcactaagacttgtgacggtgacttttttgtgtgacaaatttatgtcgatgacataatatttggttctactaatcaaaactcttgtgaggagtttagcagggtgatgacacagaaatttgagatgtcaatgatgggcgagttgaactacttccttgggttccaagtgaagcaactcaaggacgacaccttcatctcccaaacgaagtacatcaagatcttctcaagcggtttgggatgaaggacgccaagcccgcgaagactccaatgggaaccgacggacatgtcgacctcaacaaaggaggtaagtccgttgatcaaaaggcataccggtctatgatagggtcattgctttatttatgtgctagtagaccggatattatgcttagcgtttgcatgtgtgctagatttcaatccgatccaagggaatgtcaccttgtggccgttaagcggattcttagatacttagttgctacgccttgcttcaggatctagtatccaaaggggtctacctttgacttgattggatatttagactccgattatgccgggtgcaaggttgataggaagagcacaacaggaatgtgccaatttctaggaaggtccctggtgtcgtggagctcaaagaaacaaacctctgttgccctatccaccgctgaggccgagtatgctgccgcaggacagtgttgcgcgcaactactttggatgaggcaaactctccaggactttggctacaatctgagcaaagtcccactcctatgtgacaatgagagtgcaatccgcatggcggataatcctgttgaacacaaccgcactaagcacatagacatccgacatcactttttgagagaccaccagcaaaagggagatatcgaagtgttctatattagcaccgagaaccagctagccgatatctttaccaagcctttagatgagaaaaccttttgcaggctgcgtagtgggctaaatgtcttagattcgcgtaacttggattgatttatcgcatacatgtgttttatgcccttgatcaagttactttatgcatttatgagatttattgtttatttatggtgctcaagttgtgcaagggatcccccggacctcacaagtccatgtgtgaatgatgcacatatataggcggagaagtgctacaacttgaccctttgagactaacatttgttcttgagtttacttgatgtagtctcaaaggtaaattgaaagggaaaggtgaacttggaccatgcaaagacttccactacactccggtaaaagtgtactcacctccaagttcattcttaacctcctattgcctttttgctcttaattgacatttttggtgagacaatggggttaaagggccgataatgatcccgttttggtgcttaatgccaaagggggagaaattaaggccaaatcaaatggatcagctaccagttgagaattttgaaaatagttgagttggaacttttgatttgtcaaaatactcttattgtcaaaatttggtctcttgtggggagaatgtatgattatgggaaaagggggagtttttggatcttgatcattttcactcttggattatctctcctaatgtccaaacaagtgagtttgacttagagataggaaaatgaatttgatttgcaaaaacaaaccaactggtggcaaagaatgatgcaaatatgccaaatttatgttaaaaacaatttgggcttcaatttgaatcgatgttgcatgttttgcattgctttttgatgtgttggcataaatcaccaaaaagggagagattgaaagggaaatgtgcccttgggcaatttctagtatgttttggtgattaagtgcccaacacatttaattaagttcatttgtgctaaatgaagagagaagtgcaaaacaaagacaaggaatgtttctagacatagcacattggtttttgtgtactaatatacttgtctaagtgctagaaatagagaaaagagaagaagaaaaggacttggctcgagcagccaactctcagctcagtctggcacaccggactgtccgatggtgcaccggacagtgtccggtgccccaggctggcttccagcaaactgacctctctcgggaaattttggcggcgtacggctataattcaccggactgtacggtggtgcaccggactgtccggtgagccaacggccgccagcgcaatggtcgaccgtgcaatccgcgggtgacgtgtggcccgcgccaacgatcggctgggggcaccggactgtccggtgtgcaccggacagtgtccggtgcgccagccatcccagagttgcaacggtcggctgcgccagaataggaaggagattgcgcaccagacatgaacagtggctgtccggtggtgcaccggactgtccggtgcgccacccgacagaatgcaagaattgccttccttgttggccttcaacggctcctagctgccttggggctataaaagagacccctaggcgcatggaggagctatccaagcattcactaagcaattctaagtctccacactccgtctccacgcatttgatcgatcgtgttagtgatttgagctccattctagctgtgaactctctgtgcttcatttaagctcaagtcttggcttgtgtgcgtgtgttgtgctgcggatttgtgtgcgttgctcccaaccttactcttgtgtttacattgtgatctttgttgtaagggcgagaggctccaacttgtggagattccttgcaaacgggaaaagatataagcaaagaaaagtcgtggtattcaagttgatcattggatcacttgaaaggggttgagtgcgaccctcgtccattgggatgccacaacgtgaaggtaggcaagtgttatacttggccgaaccacgggataaaccactgtgtctcttgtgttgtctttctttgtgattcgcaagaactcactctatagccacttggttcttttgagcactgacatctctataaccaagttttgtggatattagttgctgaattttacaggatcacctattcaccccccccctctaggtgctctcatctgcgcagaaacaaccttcgtcagaaaacaccttcgtcggtaaaacaatgaaaagccgaagtaaagtttttaccttgaaattagtatagaataaactaccgacaatatgctgtcatcggtagcggctgatgtcggcctcaagcttcggaaaaccaatactcttcgacagagtactgataaccttcgctctcgttcggtctcggaggcatcctaagctttcgtcgtcaagaccgccgaagagcaatgctcctggttgatagccgcatgatattgcgtaatccctcaactcttccttctcagccttaaacagtttttgaccaattatgttttgaaaattaaaatctttttcctccaaagtatcttcggcaatctccttctctttccttggcaatgtggccagggtctcttcggtagttgtagcagcttcttccacggccatgttcaaaagcatcttatcaatatcagaaaaagtgccctccagatttatatcttcggccgtttcagcttcggcagttgcagcttcggcgggggcagcctcggtagctgcagcgtcttcggtagccggtgtttttgacgtcgaggccggcggtggtgtttcttcaatggcttcaataacagtaataattctccgccattttggcccagcagacttcttcgctgccgagggctccccattcttctataaaagcttcgttagatgcggccccagtggacttagtgtgataggcaaggattcagtcattacctttaaaatttcttccacatcagcaacagaaggtgttgaaggagcctcttcttctgtttcagttgtttttggctttggagccgcagctttcctctacttcggagcagctatcttcggctcagggctcgattttctcctcttcagaatttcctcatcttctttcaccattctagcagcctgtctgctcagaacgctaataatcctctttcttttttgctcttcggcacccttatttaatcgctcataatcaggatattcgaagttcagggcatccatcacctgattcaaccttcgcatcagtcgggtgccgaaggctgcagtcatcaactgatcctcttttttagtgtaatgtggcggaaccgcccgaattattccaacttaagtgcctaagtcccaccttaggggctataccacacttaaatagaaataacacgtcagaccctcgaatctagtccgacgaggccactaacaggatcaagtaccacgtactcactcgatggtgaggcacagagcaaatacaataaagcataaaaccatacattaaggagtattaaatttattacaacgtcatcggagttttagcaaaagtagtgatcattgttcagaatacagcggaataaaactaacgataaataagtggagggatggcgaagcctgtcccatcactcctcatgatcctcctcaaccgaggtagggtcccactcgactgtacaacccagtggcaagatggacggccaagtcactccagcaaccatgtcctccagagaacctgtaaaaattatgccacaagcaaggctgagtatactaatactcagctagacttacccggtgtgaggagtctactcctctacctctagacatgcagatgtttggctgaggggtttggttgccaaaagcactagctgagtctaaaaatcaagttttagctttttcaagttttagtgtgactctcttaagactaaatgtgtacctatctaatcattcatggtatcaagcatttagcaatcaacaactttttgccaagtcatcacatttccacttgttacttaatgtagcagcatggatcaagcagtctcattagctgcgagaagcagacgattcaaatcgagtttcaaccttgcaaggtaaacctaaacacacgatgtggcgaggcactctgtccccaaacacatcaaccgttcccatcgattccctagcaacagattagggctcaccaccttggcgtacaatgcctcactgaccccgactgccgtcgtgcagtgaccgcacttgtacccaccataatcggaatgggagaccatgtctcaggtcgcgtgaggggtaaagtccgcgggcaggttcactcaggtactaggcttaccaatttaccatatttctcggcatatgtttagtacgttcaaacgcttgacacacggtaccacaccttaatccttaattcaatttccgtctcggagacgacgcatccccatggaccgtcatcaacagaccatcatcattacgatatgaaaatgatacaaccaattcctgacctcacgcgagtgctagaaaaattactcgacttctaccgagatccctaattagtaaagtagctactcgacctagcatactagtatccatctcactcgacttctactacacttaagtgcacagtacaagcctacaaacattaagtgcagtaaaataatatatagaactggtcatgcataaaaccggggcttgccttccaaagctgggcaggcagatcctcgatggcaggttctggtgctgcatcctgggctacctcctgagcaactccttgctccggcacgaggatgtactctccgtcagcgaggttgcaatctatcgaatgcaatgaataagagatatatatgctatgatatgcagaatttagtaaccattatgcatagtgaagaaaaactaagttagttgataacttagggtttccttgttataataagctcttagtggtttatgcttagcaacctaggtttgaggttttccttagaggaaaatgtagtggattaagacttggattgcccattaaggttttagtaggtactcaaggggttttgctgggttggttagggtaacattaatttccactactaattccccttttcattttctatttatgctcttaaggtgggtttgaactagaacagtgattttaaaatttccaaaaattctgtaaaaattacaatgggttaacattgatcactctagtctgtcctataaatgtgaggtcaaaaataaatagaatatgtcctggacataaataacaaaagttggagcagaggggtcactttgcactacaactctcatctaggtgtgggttctgtactaagagttatttttgctggtatctatgggtaataacatgctctgtgccaaaaatcacagagggttacttagtggttgtttagttatgattttctaaagtttaatggcaaaaagacacttataactaacttgcaatttgaaaaatatcaaacaacagaatttgtaatttttcctaggttcttcttagcacaagagcagtcattcctaaggtaggggtgttttccccttaggattattttcttatgacttttcaaaattttctctgtttttcatgaataaatgtgagtgcaatttcttttcactggactatggttcaacaaatttttcttgtgaactacatcacttaggcatgctaggaaaaatatggttgccctctggtttccattttcaatcccttttcttcattttcctaggtttgagcataaacaagttttagtgaataaatcttccttaaccttgtgtactggggtgtatattaattttaaacagtgtaactactaggttagtgtctccactattttctcaaccctggtctaacaacatttctatcttttcctttattattaagttttgggcagttttcttatttaaatcaaaactctataaaacattacaggaactacggggtttactatttttgcctgatagattatatttcacaaagtctagcaaaattggtttgattaaatttggatgattattcttcaagttatgtatttatcaagttctctgcaatatttaaaagaaaagtaaattcgaaatgggaaaagaaaacagatttgcgctgaagtccctgggttttcttccccattttctctcacaaatcagccctttgtctactattcacatgagtcactgaccttacacaaaaccccctggacttaacctatatctaacccgcgatccttggctggctggaacagtaaccggggcaaagatcacgacggcgaggcttaccggtggcagtagagctccggtgggttgctcagtgacgtcggggaggtcacgacggtcacgtcggtgtgcgggtcagcgtcggaggtggccggagctgctctggccacgagcgcaggcagcggaggtcatcggcggcacctgctccggccaaacctcagcggtagggttcaattaaagtgcatgaggacctccactgggtgatgtagaggctatgcgctcaaggaatcgagaaatggttcagtggtttacccggtccacgtgctccggcggggtcacgaactccggcgagcgtgatctcattgctccggtggggctggtcctcggttcaagcttgggaaagcttcacggcctctcggggaagctatccgagggctcggatcgagcggaggtggacgggattggtttcgtcacggtggtcgccctcgggcggctctggcgggtcgcggggaggtcgccggagctgcgggcgagctcgggaaagccaggcgcggtgcggagggggcgacagggaaggtggccatgcatgggggtgggctttatagccactcgcaggcacgacatgggcgtgggcacgggggcggccgagggcgcgcgggggtgcgcgtgcgggcgtgctctgggcgtgttcccgagtgtctgcccacgtcgaacacgtggtggtttacgtgtgccagtgttcaacggcctgtttggtcgccttagcgtgcagatctcagcaaaaatcccgtgtacggtctcttctctgcaccatatcctatcttttccatgtgagttccaagcaaagatatggtcgggattgagagatattgtggtgtgaagttggctctgtctgagttgtccagaccgagacaaaaaccgtgtcaagttgtgtcaaacgacttacggttgggttaaaaattttccagggtgttctaggggtctttaggcaccattttgttatttgggccccacgattttgaggtttggaaaaagttgaacatgtttgatctttgaaagagggctggttttgaaagtgagaaaaatctgatttttcttttatgtccttctctttggtgacctttttggggtttttctgaaatctttttggggtcaatctcttactaagttttgtagggtattaagtgtactacaacttttataattagcccaagtcatgataatggggtttacattgcctttttgctatactcccctctagggctccatttgcctaagggagttgaattagggtttgagccattctctcctctttaggtgcatgataaggccaaagcatgacttctaagttgggttacacctatttaggatcttgactcccaagtttggtgtctttttctcaaactaaaccacatgtgatgatgggttcaatagtgtaggcttgagtgaaaaccctaagtaacacctgagttgttacagccctgcccccttaaaggaatctcgtcccgagattttgggtaggggtcctttagagggggtaccaagaaggtgtgctggggtgttgcattttcctttatccaagattctctagttaactgctcttcgaatgtcattctctttgcaacttcagaaggaagcccttttaaaatcattttcaaagcttacaatacctttaacatctaagtttttcttatatttagattcaaagggcaggtgggttggggttttggattacgtaccgactcctttgggcagaaagtcggggaagcgagaacgtagaaaatcctcagtctcccatgtagcctcctccactgaatggtgactccactgaaccttatacatcctgatcgaccttgcccgcgttgatatctccttttgatccaataccttgacggggtgctcttgataagacaagtctggttctatctccaattctggtttaggtagtacttctgtgggtaagcggacacactttcgcagctgagatacgtggaatacatcatgaattgctgacatatggggtggcaacttcaattgatatgctacaggcccacaagtttctatgatctcatagggcccaatgtagcgaggagttaacttgccattgattccaaatctctgaacacctttggtgggtgacaccttaagataaacatgatctcccacttcaaactgtagaggcttcctcctcttgtcatgatagctcttttgcctggcctgatcagcctctaaattcctcttaatgactctgactttctcctctgcttcaagaaccaggtcaggtccacatatttccctctctccagcttgtgaccaatttagcggtgtcctacaccttctctcatacaaggccgcaaaaggtgccatctttaggctggactggtagctgtttttataagaaaattctgccaaggaaagacacttgtcccaatccttcccatagtgtagcacacaagccctcaacatgtcttccaaaatctgatttaccctttctgtctgacaatctatttgagggtggtatgctgagcttcgtattacgtgggtcccaagtgattcttgcaattgctcccagaaacgggctacaaatggtgctcctctgtcagacacaatagtccttggtattccatgcagacgaactatctggtcaatataaatttctgcatacttttctgcccggtgggtggtatgtactggcaaaaaatgcgctgttttggtcaacctatcgacaatgacccaaatggaatcgtggtgtcgggaggtattgggcaatcccacaatgatttccatgcaaatatcctcccatttccaagatggtatgggaaggggctgtaaggtgcctgccaccttcaaatgactggccttgactctctggcaagtgtcgcattcagatatatacttagcaatttccctcttcattctggtccaccagtacaaggatctgagatcatgatacatcttgttactgccggggtgcatggaaaatttggaaaggtgagcttcatccaatattttctttctgagctcggggttcttgggaacaaccaatcggtctccaaaccatagaattcatttgctgtcctgacggaagcacttgtatttgtccaccctttgtttgatcatttccttaatgacttgaacacccttgtcaccaatctgtgccatgactatttgctcatgtaaggtgggctccattgaaatataactcaaggtacctgagggaatgacttctaggttcaatttgcataactcgtcacacagagtggcgatcttagagtccatgatcacacagttgcactgggccttccgacttaaagcatatgccacaacgttggctttgccaggatggtaatgcacttccaaatcatagtcattgatgagttccaaccatcttctctgcctcatattaagatctgcctgagtaaagatatacttgagactcttgtgatcagtatagatattacaatgagttcccatcaagtaatgtctccaaatcttgagagcatgaactacgacggctaactccagatcatgtgtggggtagttctgctcatggggtatgagtgctcgggaggcgtaagcaatgactctgttgtcttgcatcaagacacatcccaatccagtaccggaagcatcgcaataaacctcaaaagctttggtgttgtcaggctgagctagcatgggtgctgttgtcaaatgctgccttagtgtatgaaaggcatcctcacacttctggctccattcatacttgactcctttcttcaacaattcagtcattggcttggcaatcctggagaaatctggaataaatcgtcgataataccctgccaatcctagaaaactacggatctaccgtactgtggtaggaggtttccaatccatcacttcttgtaccttctcaggatcaactgataccccatcctgagaaatggtgtgacccagaaatttaatctccctcagccagaaatcacagttggacaatttagcatataactgatggtcgcgcagtctctgaagtacggtatgcaaaagcttagtgtgctcgacttcattcttggaataaaccagaatgtcatcaatgaagaccaccacaaacttgtccagctctggcataaatactgagttcatcaaatacatgaaataagccggggcgttggtcagcccgaaagacatcaccaaatactcataaagcccatatctggtagagaaagccatcttcgaaatatcactggcccaaatttttatctgatgatagctagagcgaaagtctatcttggagaatattttggctcctactaactgatcaaacaatacatcaatgcggggcaatggatacttatttttgattgttaccgcattaagagggcggtagtccacacacaatctcagactctcatctttcttcttcacaaataaggcgggacatccccatggtgaagtacttgggcgaatgaaccccttgtccaacaactcttgtagttgctttttcaattccgccaattctgctggaggcatcctatagggtctcttggatataggtgcagtcccgggttgtaattcaatcatgaattctatgtctctgtcgggtggcatccctggcaattcatcaggaaaaacatctgggtagtcacaaaccactgggattctctcaaccggcgattctatcacggtgaatgcacaggaacgggtacaaccctgatcgggcaaatataatgtggttttaccacaagtaggcgagtgcacctcaatggcccttgctgcaatatcaattactacctgatgtcttgttaaccagtcagtttctcaaatgatatccacactatccaatcccaaaatgaggagggtggttttaattatcagactaccaaactttataggcacatgcctgttgatttgataggtggcaaccctgcctcctggtgttgaaattctaatacccccattggtgtggtggaagggtaactgacatttggcactaaattttgcactgataaaactgtgtgatgcacaagaatcaaaaagaatgattgcatgataattcaaaactgaaaagataccagtcatgacgggtgctccctccggaatgtcatccatggtggtgaagttcagcctgccttgcctcacttcaccttctgcctcttgccttggttctagttagaattctgtccctgcctatgctgattcctgggacaattcttggcataatgtctggggttaccacaagtgaaacacctattgtcattggcctgacggtactgctgttgttgtggctgattgttcctctgaacagggagctgagagcggttgggtgcctgctgctgttgttgctgtggtcggattacccaatgtccttgctgctgctgagggcccctgttctgagtgtcggatacaattctgaagcgttgtggctgagctgatgatcctgccataggggtcttcctcttcttttcagcctgacgggctgtgatgcagtcctcctgaaaaatggccatgttgactaactcattgtaactgctggccctgacggtgttgagacggtcgcggagcttagtgctgagccccctcctgaacctgtccctcttcttctcatcggtgtctgcatgatatccggcatactggcacaggtcattgaaggcctgagcgtactgcaacaccgtccgctttccctgagtgagtgccaataactcattgagcttgcggtccataatgcctgctggtatatgatgccccctgaaagctgccttgaactctctccattccacctcatggtcaactggctgcatagcaaggaagtggtcccaccatgtccgtgcgggtccgcgaagctgctgggtggcgaacctgaccttagtcacatctgaacaaactccattgagtagtgggaatttggattccactaccctaagccatacatcagcatccagcggatcctcagcccgagtgaacaacgacggttgcgtactgaggaactcctgataagtggctgctgttgggtgacgctgatgatcaccaccaccataatgctgaggtggcggctgacactgagccaactgtcgtagaatctcattctgctaagccatcagttcttgcagggtaggaggcggtggcggtggtggaggaatgtgttcattctatccacgacgcgctcttcctgccatctgaaaaatcaagaatgctctcaatatcacatttctgatgtcagggttcatacgcggtgaaagatgtgcaagggtaaaaccaatattttcttgcataaatcataaaaagattctacatggcataaaacatttcttcataaattaaagctgacatcattcatcatccaaacttccaaaagagtttgttacgattacatcagtgacccaaaagactcaaccctgtctagcctagtaccccaagggtgcaaaagctaagctagcttcgaggagttctacagccatacacttctaactctatccctgtagcctagtgagcaaacgagacaacgctcgactcgggagaaggtggtctccctgagccagcagtgtccaagctggatgcaggctccggctcctctcctccctcgatgtcgacatcctcgttggcctccatgtcctggatctcctagtggtgcatatccaaatgttggttagcctccgcaagttgctgttgagtgttgattagctgatcctcgagaacctcaatggtgttctccctagttcccactagcgcctcaagctcctggatctcatcggacatctgttccacctgtaggtccttttccaccatctcagtggataggtctaccacaagttcctctctgttatccaaggtgatcttggtagcttccaacaatgccattagctgagacattgcctctcctcgcatcacctgcagacgatacagagcatccatgcatcgcaccgtcaagtgagcagtctaccctgggtaaagagcccatatatccttggcatgctccactcggtctttccacattaggtcgtcctccttttcagtagggaacaagccaatgggatgagtagacagctccaaggggtgaaaaccacagaaggtggtcagcctgtggagagcaattgcctcgatagtatcctcagcccggtatccgaaagactcggagtccaacgaacgccagcctggctgtaaaggatgaggctctagggtcatcctcaccctgcagcggggcactcggtgcttctcgaacagctgcaccgcgtactggggaggcgtcgtttaaccggctccctgaagtatctcccacaagatacgaggaaaaccctctcgtgcaagtccgtccgtgtgggactatgcgttccctccttccgaggacccgtgagaagtcatctgcgtatggttaagcataagtgaaaaagaaaaaagaattataaaataaaaggggatcaaaactcgacctctcgagggctacgacaatgtcactgagtgtacttaatctgccattaccatatattaaagtttttacctaattatcaagtagtttaagtaaaagatgcatgcatgctcgtcctaaacgacctcatttcaactatagggaaaagctcccatcccttatagtagactgcagggcctactgaaataaccacctagctacccctctatcatcttaaggcttcacgtctatcctgatcgtcctgacgatctatccaatatttggttctatcaagttttactttggaaaaggatggtatttatagtttattgattcctctgtggtggtacgagctctgataccagctgtggcggaaccacccgaattattccaacttaagtgcctaagtaccaccttaggggctagaccacacttaaataggaataacacgtcagtccctcggatctagtccaatgaggccactaacaggatcaagtaccacgtactcactcgatggtgaggcacagagcaaatacaataaagcataaaaccatacattaaggagtattaaatttattacaacatcatcggagttttagcaaaagtagtgatcattgtttggaatgcagcggaataaaactaacgataaataagtggagggatggagaagcctgttccatcactcctcatgatcctcctcagccgaggtagggtcccactcaactgtccaacccggtggcaagatggacgaccaagtcactccagcaaccatgtcctccagagaacctgtaaaaattatgccacaagcaaggctgagtatactaatactcagctagtcttacccagtgtgaggagtctactcctctatctctagacatgcagctgtattgctgaggggtttggttgccaaaagcactagctgagtctaaaaatcaagttttagctttttcaagttttagtgtggctctcttaagactaaatgtgtacctatctaatcattcatggtatcaagcatttagcaatcaacaactttttgccaagtcatcacatttccacttgttactcaatgtagcagcatggatcaagcagtctcattagctgcgagaagcagacgattcgaatcaagtttcaaccttgcaaggtaaacctaaacacacgacgtggcgaggcactccgtccccacacacatcaaccgtccccatcgattccctggcaacagatcagggctcaccgccttggcgtacaatgcctcactgaccctgactgccgtcgtgcagtgaccgcacttgtacccaccataaccggaatgggagaccacgtctcaggtcgcgtgaggggtaaagtttgcgggcaggttcactcaggtactaggcttaacgatttaccatatttctcggcatatgtttagcacgttcaaatgcttgacacatggtaccacaccttaatccttatttcaatttccgtttcggagaaaacgcatccgatggaccgtcgtcaacagaccatcatcattacgatatgaaaatggatacaaccaattcctgacctcacgcgagtgctagaaaaatcactcgacttctaccgagatccctaactagtaaagcagctactcgacctagcatactattatccatctcaaaaggattcctgagatcatgcaactagggtttcagtcaactcctacacttaagtgcatagtacaagcctacaaacattaagtgcagtaaaataatatatagaactggtcatgcataaaactggggcttgccttccaaagctggggcaggcagatcctcaatggcaggttctggtgctggatcctaggctacctcctgagcaactccttgctccggcacgaggatgtactctccgtcagcaaggttgcaatctatcgaatgcaatgaataagagatatgtatgctatgatatgcaaaatttagtaaccattatgtatagtgaagaaaaactaagttagttgataacttagggtttccttgttataataagctcttagtggtttatgtttagtaacctaggtttgaggtttttcttagaggcaaacgtagtggattaagacttggattgccccttaaggttttagtaggtactcaaggggttttgctgggttggttaggttaacattaatttccactactaattccccttttcattttctatttatgctcttaaggtgggtttgaactacaacagtgattttaaattttcaaacaattctgtaaaaattacagtgggttaaaattggtcactctagtctgtcctataaatttgaggtcaaaaataaatagaatatgtcctggacaaaaataactaaagttgggacagaggggtcactttgcactacaactctcatctaggtgtgggttctgtactaagagttatttttgctggtatctatgggtaataacatgcttttgtgccaaaaatcacaaagggttacttagtggttatttagttatgattttctaaagcttaatgccaaaaagacacttataactaacttgctatttgaaaaatatcaaacaacagaatttgtatttttcctaggttcttcttagcacaagagcagtcattcctaaggtaggggtgttttcctcttaggattattttcttatgacttttcaaagttctctctgtttttcatgaataaatgtgagtgcaatttcttttcactggactatggttcaacagatttttcttgtgaactacatcacttaggcatgctaggaaaaatatggttgccctctggtttccattttcaatcccttttcttcattttcctaagtttgagcataaacaagttttagtgaataaatcttccttaaccttgtgtactggggtgtatattaattttaaacagtgtaactactaggttagtgtctccactattttctcaaccctggtctaacaacatttctatcttttcctttattattaagtttcgggcagttttcttatttaaatcaaaactctataaaacattacaggaactatggggtttactatttttgcgtgatagtttatgtttcacaaagtctagcaaaattggtttgactaaatttggatgattattcttcaagttatgtatttatcaagttctctacaatatttaaaagaaaagtaaattcgaaatgggaaaagaaaacagatttgcgctgaagtccctgggttttcttcccccttttctctcacaaatcagccctcggtctactattcacatgagtcacttaccttacacaaaaccccctagacttaacctatatctaacccgcgatccttggctggctggaacagtaaccggggcaaagatcacggcggcgaggcttaccggcggcagtagagctctggtgggttggtcagtgacgtcggggagatcacgacgatcacgtcggtgtgtgggtcggcgtcggaggtggtcggagctgctctggccacgagcgcaggcggtggaggtcggcggtggcacctgctccggccaaaccacggcggtagggttcaatcaaagtgcacgaggagctccactgggtgatgtagaggctatgcgcgcaaggaatcgagaaatggttcagtggtttaccgggtccacgtgctccggcggggtcacgaactccggcgagcatgatctcactgctccgatggggctggtcctcggttcaagcttgggaaagcttcatggcctctcggggaagctatccgagggctcggatcgagcggaggtgagcgggattggtttggtcacggtggtcgccctcgggcggctctggcgggtcacggggaggtcgccggagcagcgggcgagctcgggaaagccaggcgcggtgtggaggggcgacagggaaggtggtcgtgcatgggggtgggctttatagccactcgcgggcacgacacgggcgtgggcacgggggcggctgagggcgcgtgggggtgcgcgtgcgggcgtgctctaggcgcgttcccgagtgtctgcccacgtcgaacacgtggtggtttacttctgacagtgttcaacagcctgtttggtcgccttagcgtgcagatctcaggaaaaatcgcgtgtacggtctcttctctgcaccatatcctatcttttccatgtgagttccaagcaaagatatggtcgggattgagagatattgtggtgtgaagttggctctgtctgagttgtccagaccgagacaaaaactgtgtcaagtcatgtcaaacgacttagggttgggttcaaaattttccagggtgttctaggggtatttaggcgccattttgttatttgggccccacggttttgaggtttggaaaaaggtgaacatgtttgatctttgaaagagggttgttttgaaagtgagaaaaatctgatttttcttttatgtccttctctttggtgacctttttgggggttttctgaaatctttttggggtcactgtcttactaatttttgtagggtattaagtgtactacaacttttataattagcccaagtcatgataatgtggtttacattgcctttttgctatactcccccctagggctccatttgcctaagggagttgaattagcgtttgagccattctctcctatttaggtgcatgataaggccaaagcatgacttctaagatggcttacacctatttaggatcttgacccccaagtttggtgtcttttgctcaaactaaaccacatgtgatgatgggttcaatagtgtaggcttgagtgaaaaccctaagtaacacctggggtgttacatgtaattccccaaaattttgttgcacatggtctctatcatttctaaccattcttgacatggccctttgaactgtttctcaaatttaaatttataaggtagccgcacaagttcattcttctcctttgtcccctttagcttcggcatgttccattcacttagcgtcgggaacaccttataggccaaatattcttggaacaaatccctggtcccgatctgctcggctactaccctgaattctgatacagcttctcggcatggtgaccctggcaccatgcggcacagcggcctggtcaacccgtagctcaaactcacggctcaacaccaatgtcttcagcttctctctcttcttctcatcagctttaacataaaaccaatcatttttccaaccacttggccatttggtgcgatagctaaccaccggggtcttcatatctttgcagtaggcgaagttgtagcgaccaaaattctcatgaagaccatcttctctggccttcgtctgatagtgaagctcgtgcactcggtagaaggcttcggcattcaggtctactccctggcttcggagagcccagatgaaaacgctgagcctaacgatagtgttaggagtcagctgatgaagatagatctcgaagttttccaaaacttctccaatcatttctttcaaaggaaacctcaatcctgctctatagaagctcctgaaaactaccacctcatctttttccggtgtcggaatagtttcttctccgccaaaacgaatcagcttctccgaagtagcctagctttatcatcataggcatatcagcctcagaaacggtggattttccaaagtccaagtgactgggtttggatggcatgagagtgctgtaatcttcttcttcttcatcaacatcatcttcctcgatgtcagcctgttcagcttcggcagcacgtgcaccttcgtcagtaaccccctctgttacaaccattcccgattgtttcatcacttcagagatcggggcagtctctgtggtttcggcctcttctccatcacgggtcaccctagcagttgagcgaactctggccatcaggtgttgaattccttgcagttcttacgaatgttgatggtttttatgattgtgacgaagctctctcttatgacgaagctagacaaaaacgttgctttgcttaaaaatgcaatgagaaagcttcggctatggttaaacttttcagcagcacaacagtgcaatggcaatgaatgttgtggtaacttcacacctagccgtgtgtttatatagtgctgcaggagtgaaggtgaatcgtcaagctgcctgtacccgctcaacagccacccgcattcactgaacggtggaccacggtgcgtacgagatgaatcggcagatcgcgcataccagctacatggtgggaccgccccacgctcggatcattttaatcgtttctcgacaacgagctcagggaaggtgttttcagaccttcggcattctgaagcctaggacaattttttacgggtcaagctcgttacgaaaaacgatctagcaccgcgaaggggctactgttgggggtctgctttgtagccgaaggtcatgtaagaagaaacatcttcggaagatcagcatggaaatagtgccgaagctaccttatagggaacttcggcataacatcatgcctaagacgaagggttgcaccgacttaaagatgaaacgacttaaagatgaaaagacagattgacccatgatagtttgtgtcatggatgtaatcagttgtaaagggtataaatgtaatttcacacaggctgcgcccggtgcctataaatagatgaacagtaccccgttactgttcacgctgatttgtactcgcccgtgcattacgcttgtactacctccttctgtcaagacgaaggtacaaatgcaattctgtattatctctgtttatttatgacaatataatagaaaaatgagttaacaatgttacataatcattcatgttgttttctatgttttacatgcttcttctttcattaatgtatactgcaatcatgaaggtatgtccttcatgaccttcgtctgaagatcattatgtcccaagggaaataatgcttcgaaggacgaagagccctaacctttaacattttgtgttgccttgttcttaattcgtagcatttgagaacaagtctccaacagcggcgctggacagggtggccggcggccggaggggaggtgggagggggagaaaccaggctttggtaccaagttggagaatgaaaccctaactctaataagggttgggagatatattaatagactgtgttagatgggcttggcccattaaatggtgagatggtaaataaaggggctagaaccccaaactctaaatgggtacactaacatttccaaatcccaatgtctctattccttttctattccctgcaaatctatacattatcccatgatgccccttcagattcgcaatcttttgctgtttgatgtaaactaactggtcctgttgatacgttactgtcttgtgagtgagccctagacacattaggccctgtttgacatatgattctctctgccaaacagttttgttagggagaagttctctgttgattctgtgaagtggttctctaacatgaactaagaggatgagagctggaaaaaaatactcttgattctgtgaagtaattctcggagaatcagcttatattgagaatcaaaattatttagagttgtaccaaacacgctctcagtgttataagatcattaggtgggtactaaagttttgtttgtatcctgatgtgtgccttcagtaacagtcaattcatctcttagttgatgaggggccagccaaatattgctagtagcagttcagtcgtgtatgaatgaaaaaactaacaacataaatcaggttgtgatagtactattttgggttataaacttcgcatgtcatccttcaaggatcagtgctcataatattcatttgtttttccgataaggagttagaagataattgggcaacctctggagtatcctgaaagtggacatggcttccaggtttgtttccgttattgaagggcggtgaacgatagggatagagcccgatacttttttttcggatcttaaatttttagtcttctttttctaattacaaataaataagatataaaatctgctatataaatttgtagtattgtttttatcattgtccttattaagtttcatagaatgtaaacctcaaatttttttaaatcttttcaaataacagatataaaattcaaatacagattcagataattttcacctttttcttggtagtgagcaaataatgcacaaaaatatacaaaattttaattttgttttcatagtgtgcttaacaatatatctaaagattaacactaaattctacatgtatctaatttaaaatataattccaatgttttggatccatgcattgtgaacgggctcagtagttcagaacctgacgtgactgagttggcatatctgaagcagttctgtacatgagagcacatgtttctggatgggaggtgaatgcatgatgccgtctatcgtggcactgatgttagcacatcgaacattgcagcatggatccgctagtcgcctagccgtgcttatttcacgcgtttcctgtcgaagaaattgtaaacaaaatctggcagttggccggaagtacacatatataggactagttttatcctctccgcgcacgcacgaacattgatgcgcgagcctgaccatggctttgctctcctgaactcgcgctgcatgctcgggattgcgatgtgataggcatgcaggaagaaccgtgacgcttccggcgttgccttctttccttggaataaaatagctcgttggttccagtaaacaataaaggatctctggatgaagcctcccaaggaggacgatggaaacaggggatgattcataacatatatctacacgtgaaaacgagttagtatatggctaatctatattatactagtttcaacggtcgtcatgcgttatttttttttacaaataacccctcacagctatttcaaattaatccgctgcacgtctatagataccaaacgacgccgggctagcccgttagcccgtcgatccatttaattaaatcagcgtaacgacgtccgacacgggctagatgcacgcgggccacaactatggcacaggcacgtcattgccggcctgctaactgtgtcgggctagcccgttagcccgtcgatccatttaattaaatcagcgtaacgacgtccgacacgggctagatgcacgcgggccacaactatggcacatgcacgtcatgccggactgctaactgtgtcgggccaacgttaaaaaacggtgcaggaggtggggttcgaacccatgccctgatagaagaagggcgggaaacactggatgaaactgtctaaccagtagaacatcatgctaagatgtttttaatattgaatataaattgcatataagtatatacgttttttttgtaaaataaaaaaataatcgtgtcggcccggccagcactgcgggccgaggttacagcccaagcacggcacgacgttcttggctcttgtaagcattatatcgtttctgagaccacattggcacaatggactacatggtgtttgagattactgaattggatggagcagcaatgatttgtcacactaacagcaaaatgaaaggttatttgttggttttaagcgttagtaattgctacgaagtagcataatttatatggagcgcatccagtttttattgatgtctgactttagcaatcactacatattttgatctatcttttttataagtttgacttcatgagacttattttagaaacttgatctcacaaactttctcttatttggtctctatatgatggaattatgtcattttataatctctgttcatttagtcaatcgttgtgaactctcttctaatcgctcacttcataagtcgtgttgtacccagacatatttgcatggagtaaacaataacatcagttagccaaatcaaataatatattatacagagagcggagacaatcaataaaaaatcttgaaatttttttgatagatagtttacgtgggtattgttataagctgtcgcaacgcacgggcaaccgactagtatatattaatctacgaaacatcccttaatttctgaaactatttatttcagctgtataaaggaaatttcttgtccttgaaaagaactcataagatggaattgttgagcatcaaatctctactacttattaagtcggtaaagatagcctgtcgttctgccttcgttcaatctggatcgctattgttcaatttgcaacctccattctgatcgtgcaaactccacacgccatttcaattcccatcgcccattctgcatactacgcacgcccggtccatgcgataacctcagttttgcacaatccacacgaagggcccacgtgccagactcagctcgcgcaaaaaaacgccacgagttgacactagcaaaacacatgaacacgattgcttcctccaaagtaggaaggcttataagctggtaccgcaatgtttggctggccggtatggtacaatatttgcgcagcggtgacaacgacggtagtccgcgcgggttgtgttgtttggtgcagcccactagcatgcctagcacgctgcacttatctggcactggcccagcttaccgtttcagtcccccgctaacgctctcactgccatgtggcctccctccagctctctctcgcatcgtgtctcgagaggctgagacgtggcggcgcattcatcctcgcaaccgctgcgacgtcttcggtccacgcccacatcccccatcttcacgacctccacttcgtcagctcttctcctccttgatctctagcacgcgcgcgcaaatgatgcagataaatggaaaccgtgcggcacctaggtcgagcgagggcttgccgcgcgctctgacacgctctgcatctgtcgttggggcttcgatgcacgcacccaccacgcgctcgacgtgctcgtccaccgcgaggcctccatcgatgccttcgtctcgctcgcgctcgacgacctccactccatctccgccaagggctcaccaccggctccggatccggcgcccgccgccgacgccagcacgaccaagggcctgcgcgtactccactgcgttcctaggatttgtggtggcccgccacaaggagtggaacacactgtgggcagaggtgccgaccgcgctcaagctctgcgtggatccgaacaagttcatcatggacgtcgtcaccgacgtcttccccgtggaccgccgcgagttccgaagctctgccgacctagcctaggcctgcgtgctcatcctcaaggccgtcgtacccgcactcgccgacccggacccgtacatcggccccacgcgcccgctcgtgctatgtgggtgcgcaagagcctggggcatggccagggtgtggaaagaaaccgccgagaacaagggggcgtggagggggccaagccgcccgacgcccacacctttctgcagcacgacgcaacttcaccgtcacgttctcgcggagagggaggacaggctgctgtaccgtaggattgtcgtcagcttctcctggcaccgatagattccatgacttgccctcactctcgcccttgaggaagaaatggccggcatatgcccttctttcctggtgagttgctgcctacatttccattttgttgcacaattgttttgccaataccatagctcgttgaagtaggtgtttgtgggtcaagtgttgaattcatatggttgatttggggatagctatgcaatgggttcaaattggtctagatctagcattgaattgtcattaggaatttaggattaagtgtcggtcatccttattatttaattgtggagatcggagcggcagcgatagcggtatttcaataggctctagaggagggtaaaaaaatcaacttcatcatcgtcactctctatttgatgataataataaatgtgttcgttttagagactatgtagtaggaatttgtcaaattttactccaatcataacatattggtcacgcacgccgccgcttctcgccgcccacttctctcccacctcccctctttgtttctcgccaagtgtaagagcctctctgcctcacgtcttgtcaaaatgcttgttgtctagacttaggtttcatgctcttcgtctttggggaattttggtcttgtcatgtaactgactgattgggtctagaatacatttaattggaaatgtttttgtgatgatttgagctttctgtttcatacctccgcacatttcagtaatgatcgttctgttgttcaagaatttagtatagccacaaactcttttgacaattttagttggagctaaggatgacctctgtattaactgcagtcttttttgaacttgaacagcttgatcttgctactgtcgagaccg

SEQ ID NO: 922 - DNA, 6616 bp, Zea mays
  Intron number 2 from transcript GRMZM2G341732_T03 (locus G RMZM2G341732) derived from phytozome v7.0 (chr-ID 5; pos 1 57449513 to 157456128 reverse strand)
ccgccaacaagcgctgcatcaactgtaacaatttggtgagcctctcgtctcgagttctcttgctgaatgtggacgggtttcggggcctgagagctagcaagcaggtaggagctgtttttagcttgtttggcttcatctgccacaatgctctgttgccatgaatggcgcacacacggcatattgggaggtagctgcagaactaggtgtttgaccggagagcgccgctatattgagtgggtttcgaggtcagcagtagattcctcattcaatttgtgcctgtaatgaaatgtagccttatgcaagcggttggaattcggtctgtcattatggtatcacacattattgttttattactgcaatgtaattttatagttggtgattgtagctactgcttgcaacagaagcaacctttatgatcctgtctcacttccaccgctttccttgatcaagctaacaagaatctaagctgatagttagggaagttttattgtgttagctaacaggaacctaagctgataattagcaaagttgtattgtggttatctctgaggcattggctagcaatgcagtcaaatgttaaggttgtggattgtgatgtttaggtaacaaaatatggatctttcacttattttgggcatcactttcataaatgaataatgatgtggaaatttcagaaaatgtatttaagaaaggtcaccgtatcatcgataagtcagatagcatatcagtttctttttcttgatataatttgccacatttgtagaggatgtggcacatggattaagataaagaataaactgatatgtgagcaacagatctcatgatgcccgctatccgtgaactgcatttgattgcttaagaacctattaaatttgttagaggtaaacagagtggttttgccggaggtactaacctcagccatcattgcttgattatatagaaagatgagatgagtcatattgattacataacagctcattagagcttagctaatcagataggagccttggcagccgcacacacctgttgagctgcccaaggtctttaatgactataattaactagcacaagtaactaggagagtgcttaggaaacaggacttaataacaacatttctccccctaaggcctgtttcaactgatcttgatctccttgatcccaattctgcttctcatatcttccaacttggtcttgcccaaggctttggtcagtatatcagcaagctgatctgtagtgggaataaattctgttttgatgctaccttcttccacacagtccctgatgaagtgatgcttgattctaatatgtttgctcctgtcatggaaaacaggattctttgccaaagatagagcagatttattgtctactctaagttccaccacctcaacttctcttcccaataatgctgcaaacaaccttgacaaccacaaggcttgggttgcagctgttgtcattgccacatattcagcctcacagcttgataatgcaacaactctctgcttgatagattgccagctgaccagactgtttccaaggaaaaacaaacatccagtagtgcttttacttgtatcaatatctccagccaagtctgagtcactataacccacaagtcttgccttgcctgtcattctagtatagcatagcccatgatctagagtaccagtcacatatctcaagatcctttttacagcctgaagatgttcagctgttggcttctccagaaatctgctaacataccctacagcaaaagccaaatctggccttgtgtgcactagatatctcagactaccaactagtcttctatactgagttggatttacctcctttgctgtactttccttgctcagtttcaacctttcttccatgggggtggtagctggattacagtctgccataccaccgagctcaagtatcttcttagcataatgagtctgtttcagagtaatgcttccctctgattgtcttacctcaaccccaagatagaaagacaacagacccaaatcactcatttcgaatgtctgcttcatttttgccttgaaagcttcaatcttctgctgattgactccagtgatgatcaaatcatcaacatagactccaattatcagcaaagaatcacctgaacctttcctgtacatggcagcctcatatacattctgctcaaaacccatctgcttgagagtcaagtcaagtttggcattccacgcccgatgagcctgtcttaggccatacaatgccttgtgtaacctgtacactttcttctcttctcctgatacttcaaaacctggtggctgagtaacataaacctcttctttgagttctccattcagaaatgcagacttcacatccatgtgatgtactgtccaaccttcttgtgctgctagagcaagtaaaacacgtactgattccattcttgcaactggtgcaaaggcatcttcatagtcaatcccttccttctgaacaaagccacgggccacaagtcttgccttgtgcctgatcacaacaccatgttcatccttcttcaatttaaacacccacttcaatgaaattgggcgatgacctggactaggagtaacaagttcccaagtcccattccgctcaactgagctcagctcttccttcattgctgcctgccaatctggatcatcttttgcctcttcatagcttgtaggctcaccgacatgagtgaggtttagttctgcaaacaacctctgtgccggcaaaggggttggctgattaccaataatatcatggaccttcctataacgaagctcttcaccatcatgataagcatccaccctttcactatcattttccagaggagtcacatgctctatctgcgggcttgctggagctggtgtaggtgttctaggtgacacaggcacctctgtctccactgcggattcctctgcttctgctgcagactctcctgcactcaccaaagggagactaggtgatgtaggatgtggctgaagaggtggtgagggtaacactgaactttctgcttcaggaaactcttctgcccatggaaactcaacaacaaaatcgctgcatgctgcctctgaagtacctgctgccgctgatgcccagtcccagccacgtccttcatcaaataccacatcacggctgactcgcacgcgctgggacactggatcaaatacacgatatgccttggccccttctgcatagccaatgaacactccagccttaccgcgatcatcaagtttctggagctgagtaagctgccgggtataagccacgcaaccaaataccttgagatggccaactgttggtgcgcggccatgccatgcctcatacggagttacattcctcagtgcctttgttggagatcgattcagaatatgcacagccgtcatcacagcctccccccaaaaccgagaaggcatctggcgttgcttgagcagagctcgtgccatggccaccacagtttgattcctgcgctcaaccacaccattctgttgcggtgaataaggagcactgaaatgccttttaataccttcattggcgcagtatgcggcgaactccgcgacggtgaattccccgccattgtcggtgcgcaggaccttcaacttgcgcccactttccacctctgctgccgccttgatcttcttgattgcttccgccgctgcgtccttggatggcagcaacacagcccacataaaacgggtggcatcatcgacgagcagcaggatgtagcggttgcccgccggtgttgctggcgtgactgggccgcacagatcaccgtgcaccaattcgagttgattctgggcacgatatgctgctgcggccggaaaagagcgccgcctctgcttcgtggtgacacaagtgtcacatacctgctccacatgatcgaccatcggcatcccacgcgccatctcctccttgctgagtcgtcggagtgcatcgaagttcagatggccgaaacgttcgtgccactgccatgcctcaacatccttgcgcgccgcgagacagataggttgtgcagcctcgaggtgcaaaatgtacaacctgttcttccctcgatgtaccttggccagcaatcggtgatgattgtcccaaatgtggagcacgccatggttaatcacaaccttggaccctccttcatcaagctgtcccaaacttagtatggagttcttcagcgctggaatgtagtaaacgccgtgaagaactctctgctcaccggtcttggcttgaaaaatgatggatccaactcccttgatttccaccttcgatgcatccccgaaccggtccgttcctcgaacgccagtgttcagatcagcaaagagttcctgacgcccggtcatgtgatgtgttgcgccagagtctaggtaccaaccgctgtccatatcttcttcatccacgccaaggtaggcacatgcacgtggctcagaaagctcgacgtgctgcgccgtgtagctgtgcgccggcgtgctctgctctaggctgataaagccctgtgccagaaacagagcaccatcttcttcacattcggcgtactggacgcgcgcctcatgccttccttggttcccgccacgctgtccagcctgatttccaccgccgcgacctccaccacggttgccaccgccgcggccagcacggtttccaccgccaccgccgcgctctgcatcctcacgacgcggctgcggacactcacgtgcccagtggccttcctggttgcagttgaggcaggtgttggggccgacacggccagcaacattgccgtctcctcgtccgccaccacgtccacctactctgcctcgtcctcgtccaccaccgcggctgcgtccaccgccaccgcgctggttcctggaaccagagccacatgcatcgtctcccttcttttcctttctgcatcgcgctttccactgctcctcagtgtacaacagcttgccattgatggccaccggctcagtcagtatttgttcttcgcgattgtccactgccttaagccttccagtcacctcctcaagagtcagtgcctcaaaatcaaggaactgctcaatggcgacgacgatctgcgagtacttggccgacaccgtgcgcaggaatttctccaccacgcgctcctcggtgatgtccctatcgccatggatgacaagctgctggtgcagagttgacaaccgcacagcaaagtcatccacttgctcaccaggattgacgctgatgttctcccaatcacggcgtaggcgctgcagtgttgctcgacggaccctgtccacgccgatgcgggtcgcagcgatggcgtcccacgcctccttcgccgtagccttgtcgagcagtgggagacccatctccttgggtacagccccgacgatcacctccagtgcgcgtctgtcatcgcggaactggacaggaccgccttcaatggcgtcccagagatcgcgcgcctgcatcctcagcttcatggtctggctccactcgtagtagtttgtcttgtccagcattggccacgacgtgccgctgccggagtcgcggtacaccacccttccttgcggcgactcgtagcgagcgccgccacggcagcgccttcggtcccgtagtggtgactgcgagcgcctcctatctcgcggtggagtcctcatccgcctgttcctctctgtctcctcttcctcctcccagtcctcctcatcttctcccttctcggcggcgatttcggcccgcagctcctgcgccgtccttgccgctgcctctgctgcagccgctgcctgcttcgctgcctggactgccagcgccgctgcttcctctgcagccttcaggcgtgcagccctgctggagaagtcgcccagctctccttcgctggttcccttggccttgagcctggcagcgcgctcagcagaggtcgacatgagtagagaagagaggagtcggccttgagactctcaggtgtctaacctaagctttgataccaaatgttagaggtaaacagagtggttttgccggaggtactaacctcagccatcattgcttgattatatagaaagatgagatgagtcatattgattacataacagctcattagagcttagctaatcagataggagccttggcagccgcacacacctgttgagctgcccaaggtctttaatgactataattaactagcacaagtaactaggagagtgcttaggaaacaggacttaataacaacaaaattcatgtagttaggactaccctactgctcttttccttctttttcactttctgtctggggctaagtcatcctgcgtggtgagaggtgcacgcctcacttcaggcactgcactttaagaaccttgaagtaaccctactccctcagtgctcaagtgaatattgtgtgtgcctttgactgaactgctatcttgtatctcatcaaactttgggcattactatctttcatatgtcccatttgcttcgtaaagtgaataccttgtttattttctttcatcttttgtacttatttttttaccttgtcgacttagaagtgtcttggttctgggatcttctgtacatatcttgctaatatattatgagaataatgttttgttattgccttccctactgttccacctgaagaaaaaagcaagaacactgatatgctgatttgaacagggaccacaat

SEQ ID NO: 923 - DNA, 1262 bp, Zea mays
  Intron number 1 from transcript AC211666.3_FGT005 (locus A C211666.3_FG005) derived from phytozome v7.0 (chr-ID 5; po s 41304331 to 41305592)
gcggaagcagccacaaatcccagtccgtggaggcggttcgtctccgcatcggttgatttcctctccgagcatcgacgccttccttagatccagacttcatcggttggattcgtgttgttgcggcccggatcttcagatcttcaggttcgaacgtgttcttctttctcttggcagttacttcattgttcctttatattcgaacttgtatgtttgagttccgtagtttaccgaactcatgtgagagaacggattcgaatagtacgtgcaccacaagttaccttggattttgtatatcggttagggtttccagaacacagttcatcgacttttgacttaagtctaaattaatgtggtcccgtgtttcattaagggtacttagcgtccatttagacgatgcgtggggagtgattcgtatgacaaccgccataataccaaccatagatttggggggcacagttacttttctcagttcatgtgtggcggcataattgaatggttacttctgtgattacatagtaaaatttgaagttggttcaatgtcatattcgtatgcaaccttttatgacatcttttatttgtctgccacatgttgtgtttgaagcaggagattataatgtttttcgaacacgattctgtttatttattgacaattatatgatccattgtaacccaattactgtcggttgaatatatgtttgctgtttgaacaacctaacaatacttcaaacataacccatgcacaattcctgctactgcttaagttgatataatcaattttgtaatacatgacagtacaatgaatactacttaattatgtgtgcctcttgttctgtacaaatcatgacttgttcatttattttgtaacttgattatctgcctcatcatgtttttgaagtagttgttgttacattttttccaacacttacctgtttccacattagtaggcacggttaatggttcaaatcatgtgtgcatattgtaccatacattgaaatgtagagtacatttgaattcttgaatacttaatatattccttactcagctttctgatcctttgtaaccaatgaatggtacaatatatgtttgttatttcatatagttcatcagtacatcatgagaagtacaacttgtcttcctattattgactaatataagcatgttaacaatcaacatcagtatgtgacatatatctgtgtttgcatgtactacataattttgaatgttcaggcacatacattggccttattattctgtacaatatc

SEQ ID NO: 924 - DNA, 9947 bp, Zea mays
  Intron number 2 from transcript GRMZM2G319138_T01 (locus G RMZM2G319138) derived from phytozome v7.0 (chr-ID 10; pos 99217506 to 99227452 reverse strand)
cgacgctgtggaacgccgccaccaattttcttcaggtttatcatagtaattaattaattaatctcttttctattcctttaaagcatcaattttgacggtcttgtttccctcatctgcttttttgcttatcggtgatcttagcacacagataagttgtcagaaactaatccaaatccaacacgacatgaagtcgcatcgcataacgcttccacgtagtatcatttagccagctaattaaagtagaatgagcgacgagcgaaatataaaggggtcaggctccttttaagcgcatacatttctggatcttttggctaagataaatggtaatatttattcttataagtttaatatatggtatatggactatctgtttatttcaatattatatttattttatagctaatttttggaaagggtccaccaaactggcttactagaccctcgtgtgtcgctgagtggttgcactactgataggttctggcttaaccccaatcaataccaccaaatatattttttatcattgcaaggtacgagcctacccaaccaataccatcaagagcattgtagtagtttgtacttatatatgttagctcattctgtcttcagaagtgacggtggtgcttcatttcagtccattttattttataaaccaaacagaaaaaaaagcaacagattataaaacgacagactcactcctttctcaaacctactaccacgctatgtaacttaacgctatcaaacttcagacgggagagactagagagtttattggagctaactaaacacccaagcttcacctttttttaaagcagcctaacttcatggagtaggtggagctctaattcattttaatcctagagttggtgggacctctttggcagctccaaatcactccaaaatagacgtagacataaaggtgtcgtttgtttcacgaaatgtaacgtaaataataatagtaatgattaacactcgaataccggcggtaacaagtttaaataagctggtttccatttctagtgtagtatcgactacggttagatttaaacaaatataatataacgatatcgattacccattacgttaccaatatgtgaaccaaacagcaccaaaattctatattatttaagcaccaatgtcatatgttacacacaaaacgattatttccctacctgataacctattacacgtcctcctcgtgcatctcccgcctgcacagctcagcttctcctgtgcgtcattctcgccactagtctgcagcacctcgccgacccccaccccgaacacgttcgccccaccgcgcatgaaatctctggtccctagttgacctccaaccccacccattggccgagcgccggtgggatcagaggtcaaggctaaacttgattaaaacttttttatttaatctacatgacttaaatcatcttatcttatttaatgtatatgataaaactcttaggccccgtttatttcgttggaattaaattctattttaataattatattttagacaaaactaattaagttctaaaggtgagtacgtcggttaaccgacatacttactcgatgtacttcttcttatgtacttaagaaagtaagtacgtacgttggggtcgatgtacttatggtaagtacatcggctaagcgaaaccgaattagttaaaagcattaagtacgttggtttttgtagaatcgacatacttaaaacccaatcaagtggtagctagcacgggcttcctaggcaagccgcgtggccttaagtacgtcgggagaccgatgtacttagagcattaagtatgtcggcctgcacagcagatattcttagataagggtggacttctggattaactttgtagacaatccaccaagtcttcaaacttgggttaagataacttaagtagtacacctgatctgcttgatgggtaagcacactattgttatactcattgcctttgtaccgtgatgtgtgctttacctcgacaacccaaaactcatccactcgcatgttagctcgcgtatcaaaccatatacaatcaaaggtcacaaaccatagggccttaagacctctaaatgtatactttgttatatcttcaagaatacagtaataataaagaagtttccattatcagtattatacgcacttactgctactccactgattttgtgctgcaaacggacgacttgcttcgagtgattctattcaaaaatggtacccattaatatcataatgatcattttttgtgatcaattgaccatgtgatatttgtaggagtcctcggtgacttgaatgttaggtttcttacactacatgcaaatgaatatatatatatatagttaaattatatgaaatatatgaaatagaagatgaagaaaagggatatgaagataattacatgttcatggaacggctaaacaaaggaaggaccactgggtacccggtttaagcgtaggtcatccaccttcaatgtaagttgttgaagagttacctgatatgtgttctcaaatattttgaaatatgaagttcctccatattgctacacaagaaaagcaaggtgttgtcatgctccttcgtatctacaaagcaaggtgttgtcatgctcctcccgcgcgacaccgccctagtgtggctctagcccgcaccgctccacgccccttgtccccgcgcggctcgttttcaagccatattaagtcattctaataaatattaagtcattttttcagaaaacattaagttattattgttttcagccatttttcctgggtttccttagacatttcttatgttattggttcagtcattccagaaaatattaagacattcaagcgtctagacaacatttaagtcattctaggtaaatttaagtcattccaaagtctagataacataaatattaactcattttaaaaaaaatattaagttattattgttttatccattttttggtttttctcaagcatttcttatgttattggttcagtcattccagaaaatattatgtcattctagcgtccagacaacattaaatcattcgaggtaagtttaagtcattccaaagtctagttaacataagccattttatgctacattaagtcattcagaaacattaagttattttaggcgagggggctcggctcacggtggcttggctcaactcttgtgcgggggcagctccatcgaccggctgggcgggcgcaggggatggctcggtcagacttgctcgacgggtgcgggcgagccgtgcaggggatcgggagggagtggtccaggtgatggaccattcgatccgtcacttaaggtgatgaatagatctatcatatatatatttcggaagccccagccacccctgcaccaccccgacgggtctagtcactagacccctcgtctcatcccatgcatgcgcgaagtttgtttctatttgcatacgtggaaattttggaatgcgtatacgtttcctgctgctgcatggaaacaaaaaaaaatctgattttaatactttaattcgtccataaaaataggctctacaacaattatgcagttaggctcgttagaaccagtttatggcatatactgatactaattatgctacacggtgtaaatatttatgcagtgtgtggtacaccgcgtaaaaaattgttttctgctgcatgcacataaatttaggatgacaagaatgttcgttgaaagaaaatggattagcatgcatggatacaaaaaatctgatttaaatgttttatttcctccatagaatctatccaatagtcatgcagttatgcttgttagaaccaatttatgatatatacttgtactaaatatgctacacggtgaagatatttatgcactgcggtacgctgcttaaaaaattgtttcctgctacatgcccacaaatttaggacgacaacaatgtgggataaaaggaaataaattagcatgcatagaaacaaaaaaaaattaattaaatgctttatttcttccataaatacatgattgctctaacagccatacaaataggctcgttagaaccagtttataatatatactgacactagttatgttactcggtgaagatatttatgtaacgcgttacactgggtaaaaatctagcatacagttcacttgtgtacgcttctccatatttgagcgtgaaaaccttcaattttgattataaaacctgcagttatgagcgtaaatactgatccaacatgaaaattgttgataacccccgatgcattatatttatgatcataaaaatccttaagttcgagcataaaaatagtgttagatgtagcgtaaatatttgtttacttcgaaccaatagcatccacgtgcggccaatataaatctttgattggaggatttaattatgtgatttgataagagaatttaattttttgacagtaacgggcaccataaatcaagggattgcatgcgatcatattttatggcagattcaaaaattatagtaaccaccgagcgcatgcatgcggttcctagttttatgcacatctaaaaattataaaaagtaatgggagttttaattgcagcgcgcaaattttaaattatattttcattcccactacatacatgcaaaaaattgatgacagaaatcgcgcaaaagcataaatcattatagaacattgcatacatatctacatcgtgcatcataaatgatgaaaaaaatcctaatatggacctaatcaacagcccctcgtgcataaataaagattggatgagacaccgccagaggatgctgccgaggccaccatatcagatgaggtcattaccggaggatgcccccgtagccacagatcagaggaggtcgtcattggaggacgcccaagacgtgtcggatcggagccatcgtcgctagaggacgcacgaccgccgatcctcacagctcgtgccttgcgcggtcgtcgctgccgccagagccacacgcgcctgacgtggcctccactactggagatggctatgcctcatgcgactgccgtcgccacccgcgcccctcgtggccgctgctgccaccaccaaagccaatcgtgccactgcagtcgccaatggtgcctcgcgtggccatcgccgcgcgctcgtacctagtgtagccgatgccgtcgaaaaacctaatccatggtagtcttgatcggcttttatagacaatcagtgcctggttaggtggtgtggctcgaccgaaaaagtatgttaggccaaagcttccactagttatttggaagctcaaggctccaaataagcgcccaagacaagggctttcttttctaccctcttgtcctatcccacctgaatttataaagctctcgcgctcttatccatatctataccactatataatactaatccgtccatttaaattttgtaaaactcatccaaccaaatcatcctcattgtccaacacccataaccttcattaaatcaacaaaacaaattacacctaaatttaacattatcaaaaccaacagttcagatcgcttgataatctactctcacttatttaaattcaatgaacaatattatttagatcatttatcatctctctcactcgccactcttagcctccctctcttccctgccgtcctagtctgatgacaagttggtacgaattttcatggtcagaagaagaaacaacagtctccgcggtaggcctgtttgttacccggtcaaatgcccaagttcacaggatgaattgagctgtcaattcgctttggtcagcggttactgttgaaacaaattttggacgttcaaaaaaaggaaacctgaataatcgtccaacttgatccccagccgagcatcgtagctagggatgataatggatcataattcaaatatttcttcaccataaattaggaccctcaataaatttgagttcaaaaacggatataaatatagtatgattctaatctgatttgatccttaaattttatagcataactttctagtgtgttccaccaccgtcaatcccttctcttgcacaaccatcattaacccctctcctcccctcctatctgcaggatcgtaactttagctagtgttgtgagaatgtgccacgtctttttggactagcacgagcacgatctgaattagtagaataaagtatggctcaacatgtagtactttggatcgagctaacgcagtccgaaggcaagtcttagacgggcctcaataagcagtctactaggcccccagcacagcccacatggtttgcccataaagtaggaaattggcctagttaccttgcagtgacgttgctcgcctaactctgggccaactactcggtatacgatacgatatgaccgtgcgtccgtgccctgccaacctcacatcgttcgctccgatccatggaccaattaggacttttacctctaattcatcctatgctactacttctatatccctataaaactcaccacttcaaacaacgctacatccagccatcaaatataccccaaccaaattctgccatcaaaacaatgcaccagatcgctttatttccctctcatctcttatccaatcacatagaaggattaatatttccgggatcatcctcatcaatcataatccccaccagccgccacgatcaacactcctatctccctccctcactcgtgtttgtctaccgatcaccagccgccacgatcaacgctctagcctgcccccctcacctgtgtaactgcgtaatcgccgtagccatgcgacatggactagatgaagaaggggatgggctgcgtttgtgatatgttgaggaagcctaagagtgtgtcagcgttcttgtcgccggtgtagcaggagattagacttagaggaagcctaagaggatgggttgcaaagtgggccacggcccccctcaaattcttataaccttttatacatatatgttatttactgttatgtataggaaaagttgagtatgtgagtgagctaaaacagtcatgtcttgggtctgctcatcgaatcatttagtcctcctgactctggtactacttcttggatcagtcttcgcattgttaacaactataacgacccaatagccatgatggcatcgtctgggctcatgtcgtccatgatctaactaagaggaccgcgtcgctcgttcgtcacgctcgctcctgtaacgcccacacgctgtattagtcatttcttgtatgtgtataaatattacacttgagatcaatacgaaacgttgttgatccaatcactcttacaacatctatccacctggtctcattcttcctgatgccgcctaagccagtctgcctcgatgccccttcttgacactgcccgccgccaccccttcccaacatgctacgtcgcgcccttctcgatgctcttgtttcactcgtcatcggcaggtggcgagcttcgcgaaccaacaagttttggttctcggctggagacatcgcctaatgccgccccttttcctggcgcccccgcccttcaataagatcgacattcgacaaagtagacatggttttgattcggtcagcaaaaaattagaggcatatttgcttcttttgttcatatagtttttttcttgaaacttgtctgatatattgatatgaaacttgaacctataaaacactagttttttatgatcttgcttaatttcgtcctacaatctttttggccctccataaatttctattctctgtccgccactgattctctgtcaccacattccccatctccacggaagccgccccttctcacacgaaagctggaacgtgtccatgctgctgcacagcgggagggtgagcaaggaggcggaggcaggcttgatggtcgcgacgcacgcaacatactcgacaaaatgacgaagaagataaccagatgtgtcagtttggataaataaataattactgaacgacaaaataagaagttaattactgaacggtaattctttagatgaagctgagcccctggggccgggcccctggtgaagcgtcatcggaatgtacctcgtatccataccctaaaacccctgtcgccagtggtggtgacgactgacgagtgtaaagcagatttggcgaaaaacacaggctcacacggtgggagtaatggaactagagcgagacgtgaagcaacggtgagaagaggaaggagagggggcggaggcttgacaagaagagcttgttggcggcggtggccagggccaaaggaagagaggaacatcgaggggcaccttattagtttagtaaaagcaattaggtgtcttacgcgcaccacgtattgtccatggtcacaccaagcagctggcttgagcgcaccacgtactatcgacgacctaacccacctgtttgtatatgttgaaatactaccatttgaaataatgtcatatatacttgtgctttgtcatgcatatatccttaacgatgcaagttgaaatgtgggtcggcattgggctggcacggctcgacaaagtcccaacatgttttaggattataatagactactgtttgtactctttaagctgacacgacacaattcaaaaaaaattaggtcttctcagtctaaacctatttggcccaaaacacaataggcttagatcgagacattaacaattttgccattataatttgtaggcttcgtcagtatatcatcagacctataaattataaaaacagatggttctatcggttatagacacggaatgacataataacagacaatcaaaattgagagtaacaccatcacaaatttctcgcttagatcgggccagcctggcctagagatggcaatgggtaaaaacccgctgggtattacttgcccaaacccgtacccgcgaagaaaaaatatgcccgctaaaaaacccatacccgtgacgggtataaaattttgcccaaacccatacccatgcgggtttcgggtacccaacgggtttcccatacccactaacatcaacataaaaaataattcatcatgtaaatgacaatcaatacattaataagctagcataaaatgaacaagtgataacaaattttagcctaaaaattgttacatgaagtttatttcaattagaacatattcaattaataatattatgagacatatttataagtaatgttgattttaaggcgggttttaaaaacccatgggtttgcgggtatgggtagtgtaagaacaaacccatgcccacgtacccgttgggtttccatttgaacccattaacaaacccatgggtagagaaattggtccaaacccataccctaatagagcaaaaacccaccgggtttcgggtagcgggtacccattgccatctttagcctggcctatcccaattcccagcaccagcgtggtagtatagaaaaaaataaattttgtatttgttggaggagggacgagagcgcaaaacgtaaccggcgatcgaaaatgaaattcatctgcctacgcccgccggtcgccagagcctggatccctgagggagaggcggagaagcagcagaccaggggctcagcttcatcatttcccaaaatccccaagctagtagacgaagaggtgcgagtagatcgaatgcggggagttagggtatggatacgaggtacattccgatcataaattccgcccatcttctttcgtaactgctatccgtctccctcagtataataataagacatgtcgattatcaatatgtgtatgattgacgcatcatgagttcatgtgatggtgatacctgctactatgatactctaacagagtagggtgggtagtactccctcgttgatttttttaaaactttaaccaatcatcttattcaaaaaaataatgaattatcattttttatttgttttatcatttaaggtgcttgacttaaaattttatatttttaaataaaacaagtgtttaaagttttcgaaaaaagtcaattatgtcatatatttgtgaacggaacttatgtgatggctttgtagggtctcattggacgcttcggttcttcaaacaagag

SEQ ID NO: 925 - DNA, 2103 bp, Zea mays
  Intron number 1 from transcript GRMZM2G107867_T02 (locus G RMZM2G107867) derived from phytozome v7.0 (chr-ID 1; pos 4 4367614 to 44369716)
caggaaggttgacctgtcgagggccggcgaacccggtaagtaaggtaaccacgctgcttgctgttctcgtggatttcctcctggttcgcacggctctcctgcttcgattcttcggattcggaactgggggaataattgtcgggggattcgggggttggttttgagttgcggatcaaggtgggctcgctgtcgcatttccttggggagggcgaggatattgacggacggttagagcgaggcggtgttcgtctccacggacgcaacaccagcccaccaggtctgtaaggaagtgctctctagtgtcgttatctggattcttcccggctaggctctcatcgcttggttgcttccatgcgatctcttgcgtctatagtttctcagtcgattgaacgtacagtcgacctcactttcctcaatttttagcttttgaactgaacgcctatctgaccgagcgattccgatttatatatcccgtccgtttcttgtatagatgaaaccgtagtagctgattggtcactggagtgtgctctgcgtgcagattcacgtgttaatactaagcgttttgactcttgatactaggtactcatgcgaattaggtgctgccgttatcgatctatttgtctgaggtggccgggttacctctgctggttagggcttttgaaaggaattaaaccaacatgattccattgcttactaatctctttccagcaccaagggagctcttgctgtgttaatctactttttgcaccacctattaaatattgtggatgcaaggcctgaacatccatggacgagatccagtgagcactgagcaggcactataaaggttgtgctgtaatcgggaattctactttcctaggatggcttaagaggttttgtagttctagtagatgaaagccgggaaggagtaaatagaaagctagagttaccgcgtcagaccctagagtcaaaaggatttagaattagtaggaccaaagctgagtatatgagatgtgactttggtactacaattaatgaggatggagatgtaagcttgggagaccaggtagtactaaagaaggacaccttacattatttgggatcgatgctacaaagagatggtgatattgatgaagatgttagccataggatcaaagcggggtggatgaaatggcgtcaagcatcaggagtcctatgcgacaagagagtgccatagaagttgaaaggcaagttctacaggatggcgattaggcttgctatgttatatggggctgagtgttggcctactaagagacgacatatccaacaactaagtgtcgcagagatgcgtatgttgcgttggatatgtgagcacacaagattggacgagtgagaaacgataacatacgcgatcggctaggagcagtaccaattgaagaaaagcttattcaacaccggttgagataggttgagatggtttgaccatgtccaccgtagacccctagaggcaccggtgcacagaggcatcataagacaggacaataatgtgaagcgaggtagaggacgaccaaacttgacatgggaggagtcaatcaaaagtgacttgaaggaatggaatatctcaatggagttgtgtttgatagaagtgcttgaaaataagttatccacgtgcccgaaccatgattaggacttttcccttttagtgctttcaaaagctcttcctcctcccctttttctttctctttctctttttggtgacttcttgtgggttttaactctagcctaccccaacttgcttgagactaaaaggctacgttgatggttaatggttgatgggatggcttaggaggttttgtagaggacaaaggcctgcaaaggctttggtatggcttatgggaggatgcgatcgcataaatgcatgatggcattcctttttattcttaaatagaatggatttgagcatttacatagttttatatccgtaattaagttcaataatttatgttgtgggggcaattaggagcattgtacaccaagtatgatctatatttctaccgggtaatgaatcctgttaaaaataaagtatactgcactaattcttatacaacgaacataatatctgcttttattaatggcagagtgaaa

SEQ ID NO: 926 - DNA, 1609 bp, Zea mays
  Intron number 3 from transcript GRMZM2G063945_T03 (locus G RMZM2G063945) derived from phytozome v7.0 (chr-ID 5; pos 1 61083611 to 161085219)
cattagctcaggcaagtctgaacatcttcctaatgcaaagattatactagcaattgcttcacgcagttctaaggggcattccctgctccatgataaaactaataggtgctgatcatattctgttaagtgaaaaaagaatcttgagccatggcttagaaaattgtaattcaatcacagttcataaagcagaacctacttttggacctcaacagtagggacttttgccaggacaaattcaccgaaaagctctaaaatctcgtaggcagccaatatattttgctccctaataatgtgctccagctatgattaataatgatattattagaaaatgttaagaagaaaaagggaaaaggccaaattacctgcccccaccccacgcacgcgtgggagggagtgtgcatctggtactatgtatcctttttattcatcaatctccatgcgactaaggaggtgaggttaatatgtcctttaataagatttgtcttcttgtttctcctcgtaagttcaaattctatagttggagaacatcaaaacttatcttacaaaaatacgttgaaagtttcatcattatttgtatttttaaataggttttgtatctatatggttagtttattataagatgtactgatctataaataatagtaacgaaatatctataatatatatttctaacataagttatgatgttctctaaaactacaaatttaaactaaaaactcagttggggtaggggtgtagattgtacacaaaattggttcaagaggttatccaggcaatgttcatatgtggggccctgtttgtttcccttctagattataaaaactagattatgatggaagtgtatgatgataaattatcatttggagattacaaaataagctgaaataagctacccaatactagctgatttcaacttatttatgatactaaagcggtattttacctcctaccattttaccataatccaacttatataatttaggagggaaacaaacacacccttaagatattgaaccatttctttgtgcatatttcaaaacttactaccatgaagaagttcccttaggccccgtttgtttcttttcattttgaggaattggaatcttactaatagaataggctatttttttagaatgtgacattccaccactttccaaagttatcatataagcctatgtcaaattcatggggtgagagatggaaattgattctatagatttacatgttatttttccgatgtacaacttatagcacactcttctatttgcttcgctataacataaatgtagtatataactatctctctcatatgatttaggataatatacaaatatattacatatataaatatataaacttaattagttttttctaaattataattattaaaatggaattcaattccaacgaaacaaacggggccttagttttttttgctgtcaggaattctaaaatcttacaggaagttcactaccattaaaaggctcagaaacacaaatgcacacccttgctaaaaacatcactgggacttctttggtctacacaaaatattttattctattgtgatatgcaagtcctgatcccatgcaaaatgtttgcaggataaaca

SEQ ID NO: 927 - DNA, 2037 bp, Zea mays
  Intron number 1 from transcript GRMZM2G523028_T01 (locus G RMZM2G523028) derived from phytozome v7.0 (chr-ID 6; pos 1 50743153 to 150745189 reverse strand)
atcaacttccttggcaacatcaaccattgcctacagtggagatgtaattacttaaaacatgttatgaattagagaaaaccactacaaataaaataacactgaaacacatatgcagccatggaaggcttctccaatttgtccctcataggagaaattttgagctaaaaccatgcaggtaaacaatagtttcacaaatatgcaatattcatgtgtatgaaaccatcttcttttgatttgtgcttattcaagccgtccggcagcctttttttgctgtcgctgcaggctgctacttcatttgtgagatggtttactgttccgcagctgtagatagggtagccaaacagcttcattgatgcaacagcacaagcctcattttccaaaccgcacaaaaaataaatgaaaggagaatcttggaacatcccccacattgttttctttactagaaaggggtaacgttccttcacagatgcaccctccccctccacaaaaagatctgccaacatatttggtttacttatgccaaatcttttagcatctgattagttggcctcctagacgtagagatttttaaataaatgacattgtgtgtgcctgttctgcttccataagaacttcgataagccctttcccctttctgttcaaactgatgcaacaaattattagtgaatttatcatggatctcagcagataatggtattcttcagcaccttagaggttgcagaaaagttaacatgtataataatagcatcaccaatacagattcaaagtaaaagaattcgaaaatccacaaaatacaaacagaagaataaaacaagacgagaaaagcatgagagcatctcagataactttccccaatggtttcttcaccgcgcagctcaaagtgcaaggatgagtttaattggatgtaacatcactgatgctcgaaggaaaataaacagaagaattaaaaaaacataggaaaaaacaatagcttattgaaacaaaaaaaggtaacaacaagggattctatttcccagcagggatagaggatccatcctctgataaaagaacaaatctaactactgaagccaatcacaaccactgtggcggtggggatgaaatcattcacaagtaccaacaagcttctagtctaaatctaaaagcagagtagcaaagagaattaaatattcaaggttagctaccaaaagctacatagatcaaataactagataaagagagcataaacactgatatgaagaaataactcacacaaaaagtaaatcaagtgcacatgtaataaagttgagtggcttgaatagacttatgccatggttgaacctaggcaacagctaccaaaactccagccctggctccttgagtgatccccacagatggcaaactagtgacttagtgagcaaagccaattaaacataagtttactggattgttgattaaaatgagtccctctgtttcttatgtgttacaagtgataacgtgccctaccagcagaataatgcttgttctgctaatagctctactgcattatgttcacatgattaacaatagattaactgaacagatcattccaatgataaataagcgccaccaaactgcaagactagaagatcaattgacaaaagcaaaaaacagtcatccatgagtttgtactctatgtagctgaaatttttttggagcaaatataagaaataaaaggtaataaaaatgataagtctatgcatatcaggaagcatatcatgttctactgaaacagacatgaaattatacagaagagctgaatggtttccaaaagtcacatcagttacatcagtgattttgatgatgttgtaattataatactaataatttgttccaacatgcgcatgtgcacactactaaacatactgtaagccataatgtctattagatctcaagaaaataagtagtatctacttttaagaaaataggatgcatttttggtcattatatgtaaaaaaatgtaattaccagagcaactttaccttagcaataacaggcctagccattgaagtccccagcaaa

SEQ ID NO: 928 - DNA, 10157 bp, Zea mays
  Intron number 10 from transcript GRMZM2G161087_T01 (locus GRMZM2G161087) derived from phytozome v7.0 (chr-ID 2; pos 81642053 to 81652209)
ccaagcattacctcacatataggcattcattgagagtaagtttgatgtatgcatactctagttgctggtaacttgatgatgtgatgtatataattgatcttttttattgtgttatacttgttataacctaagcaccttttttttgctattactcactaaacagtgggtgagtttggttctgcacttctgctgaagaagcacacctcacctcgcccagtgagaaactggagagaaaaacacgtttagggcctgtttggcaacaatgtttttcaaaaccatagttttacaatactgtacttcagtgttttcattccgtccgatcgactgattgttctaactgggcgattagtcgtgattaggcgacgatcaggacaattagtcgttcctgattgaccctaatcgtccacctgttcatcctgcatatttccaggatatatatgtgtgtgtgtgtatatatatatatatatatatatatatatatatatatatatatatatatatatatatatttgcgccccgcgcccgattgatcgagtcgcgcctctgccagttggtcgagcgaggcacctcttgaatgacttagtattttctcaaatgactgaaccaataaccaaaaatgtctgagaaaaaactagaaagaatgctgaagataagaataacttaatatttctgaaaaaaaaattaatatttactagagtgacttaatgttgattggaatgacttaacgttgtctaaatggctgaatgactttgcttggactctgaaatgacttaatgttgtcaggacgctagaatgccttaatattgcctagaatgactgaaacaataacaaggaatgtctgagatacataaaaaagtgacagaatgacttaatgtacgctagaatgtctgaaacagaagggaaatgacttataataggcacacgcctatggagccgacgcatgcgtagagggagccgcacatgtggaggagccgacgcgtgactagaaactgagtcgcgcggggtgcggagccgcatggggggtggagccacgctggcgcggttgggcgggctgatgggcgtggcaggtggtctaggtgatgacagttgggtccatcactctagctgatgaatagagtatatatataaatataaatatatatgctatttggcaccctaggttccaaataactatttggcaccagcctccactagcaccttatcccgagtggaatgaacaaaaaaaattccacccgtcgagaatggaagcaacaggctattgcatgctcgcgtactggtggcgtggtgcccaacggagcaaaaaaagtccaattgcttgacacatgcatccaccacataagtaagcacgcatgcatgcattagtagttcacttaaaaattaatatttactaaaccgagtgtcaaaatcgaaaaccgatttcaccattttgttcgtcgcgatgaaagcttcaaaactagatcccacttgatatattaatctcacattcaattttttgtattttctcagggtcaattattgtagttatcggattagtcattctacgaatactcagtcattccatcttttaaccttagtcattcattagaattgttgagatatcattcatttagtgagtcaattattctaaaaaatatgcattacacgaaaagatgtgaacaaactcagtcattttatgaatactcaactattccatctttttagccttagtcatttacgaggataattgacatagaagttatttagtgagtcagtcattctaaaaaaataggcattaccggaaagaaagtaaacaaactcagtcattctatgaatatcccgccattctatctttttaggatcagtcattcatgagaataactagataggagttatttaatgagtcagttattcaaaaaaacattgtaggaaaggatatacatcatttagtgagtcaactattctaaaaaattatagaaaaagtattgaacagactcagtcattctataaatactcaaatattccatctttttagtctcaatcatgagaattaggggggtttgtttgggattataatctgtccagattatataatccaacaaattttgaactaagtgttagttcaaaattgttggattatataatctgagcagattataatcccaaacaaacaccccctctctctgtagaggtgactccttgattcatccatgcatccaacgacacagtagttacctaattcatctagcagcaggctagctacatctagctagtagtattggacaagtagctattatttatttgagttatcttcctttaacttttttcggctcgtttatatagcgcacccaacttaactaattaataagcgagccatatgctattgcagacgtgatagtttgtacaaataaaacatacggccatgatttcaattgatccttgagcgggagcgtgggacgtgcggcacggccgcgtcggaggagaaaatggcaggggcgatatacacctggtgccaaatagcaccgcctgaccgccgtgtgtgtgtgtgtatatatgtttgtgtgtctatatatataacactatatattgatatatacttatatagtatagaatatacatagaacatagagattagaatataatttgcagggcagcaagcctgaaacgatcaccagcaaggcagcagtatgaaaacagagatcaccagcaagtctatatgaaactatggaactgcaattctacaacttacaagaccatgaccaacaactatatgcgatcatcatccagcttgaatttatcaccaacagctccagattcttcttcatcatcaattgctttttctgcaacatctttctcatttgaagttgactcttgatgatcatctttgttgtgactgtcaccgttatctccttgctgcaagactgcaagtcctgagctgctgcaactgcaactttttggctcttcctactcctaatataggtctcggagtaggtcctcccaccatgtgcagctgctgccctaggcaagtttctgccctgggtagcttgagttgcacctaaaatgtcatccacggcactccaaagaacccactcatttttccacataagctcttcaagcaccagtggtttgcttctctttccctttgaaccttgctctcttatctctgcaaatctgttttccatcttcctgttgtggctcacataatttgcatagcctttggtgctctagccggttcctctatttggtgtggatttgcacatgcaaattcaaggtcatcaaacatcattaatcattttagtgcatatgaacattggacaaagtaaagtaacacttactgctgaaaattcactctagtttctctcacaaccagagaccaagcaacagaggcttataactctttttgcaagggtttgtagttcaaaagcaaatcctccatatgcaccccaccatagcactgttataaagacaaacattgtaagttcagttgcaaacacataaacaaattacataactaatatcataagaatttagaaataaacttactaggttttttttttctgtccctatctcattgctcttggcttcgagaagcattcccctttagacctctcatagtcatctgcttgcttacttatctttgtttgctcatcttcatcactgaccatcttccacacaacatcattaaacatgggtcttagccttgcatcatgcctcctgtctttttcccttacgccccgtttggatcatatttatgtgctatatttttactatagaggagtgagacgaagagtgtcatgtaagttacatagtagaaacaaaattctactatgcataaaatcatttcccgtcctccacccaaagaatttaagataggcttatatctgaactttagaaagtggtggaatgtcaaattccaaactaaataagttactttattgagtgaattccaattcctctaaaatgaagggatccaaacgccccgttatgtcaaaggatttgctcggattaaaagatagggctgcctcgtacaacttctgactttcccaccttttgtcaaagcatgagattacttctgcaagtaatcttggcttatttttattgcctctttgacggtggcttttgctttgtccatagccgccatgatctccggagcagcaggtgtctcatcaccatcagaaatccttaggtcaatgagaataggttgagaagcttgtagacagtaatcaacaccattccaaaactctgtagagaggataatattttcagtttggataccttgattggtggagaacttgctctgctgccaactgccattcgtcactaagaaatagactcttcaaaccattcttaagcttgtgcatgctagccaaggtgagaaaagacgtggcaaaccgagtaataccaggcctaacaaggtcaccaccaatcttgtctctcataaggctatggagtcttccatgcttgtaaaggaaccgagataccttctttgcttggttcatgcaagtgatgaaggacttaatcttcccaatgtcttccagcaacaaatccaagcaatgggcagcacacagtgtccaaaacaaatgcggaatgctctccataaggagcctcctagctgatttgaagttcgctccgttgtcagtgattacttgcactatattttctctgtcgattttgtcaatttgcttctctagcaaatttgccaacatgttggcattagctatctcacttgatgcatcaatagagcaaaaaaagtatgtccctattggacttttttgcgagaaagttgatgagatgtcatcctctaatatctgtccatgaatctgacatcaatgagcagccatactccttccacgattcttcatgcttggaccttagcgacgatgtcctctcgacaaccctttcaagccatggaattctaacgtcgtggtattcaggactatactgccctattgactccaacacgatctcccagcttcttgagttgaccatgtccaacgaaatcttgttctcgtacaagatatcggcaacgtggtcatcaacgatctgcttggtctccttgcctttctttgtgcaatgctctagagtggactgggaagctttgttgctgtgccgttcagcaaccacttctaggctcttgcaaagctttgttgcagagccggaggtggatggcgacgaagaatcggtctcgtagtagaccactttcttcattttcttcttgtcgccactccggtgcgacttgacgcggggaggtgattcctcccttttgttgccggactctcccgatggagccttcccgtggcttgtggcgggcttctcgccggtcaccatctccttggcgtgagctcccgacatcacttcgagcggttaggctcttaatgaagtaccgagctctgataccaatttaaagtcgcctagagggggggtgaataggcaaatctgaaatttataaagtttaagcacaactacaagccggggttagcgttagaaacataatcgagtccgaaagcgagggcaaaaaacaaatcacaagcaaatagcgagagtgatacgatgatttgttttaccgaggttcggttcttgcaaacctactccccgttgaggtggtcacaaagaccgggtctctttcaaccctttccctctctcaaacggtcacttagaccgagtgagcttttctcttcaatcaaacgggacacttagtccactacaaggaccaccacaacttggtgtctcttgctttgattacaatgaccttgagaacaagaaaggaggaagaagaaaagcgatccaagcgcaagagctcaaaagaacacgacaaaactctcttttctagtcactattgctttgagtggaattgggacttggagagattttgattcactctatttgtgtcttgtattgaatgcactagctcttgtattgaatgtgttggctaaaaacttggatgctttgaagtgttggtggttgggggtatttatagccccaaccaccaaagtggccgttggggaaggctgctgtcgaagggcgcaccagacagtctggtgcgccaccggacactgtccgatgcgccagccacgtcacccaactgttagggttcgaccgttggagctctgacatgtggggccaccggacagtccggtggtacaccggacatgtcctgttcactgtccggtgcgccatctggcgcctgctctgactctgcgcgcgcagtcgcactgttcactgttcacttttgcagtcgaccgttggcgctgttagccgttactccgcttggcacaccggacaatccggtgctacaccggacaatccggtgaattatagcggagtgactccccaaattctcgaaggtggcaagtttggagttgatctccctggtgcaccggacactgtccggtggcacaccggacagtccggtgcgccagaccagggcagccttcggttgtcttttgctctttttatttgaaccctttcttggactttttattggtttgtgttgaacctttgacacctgtagaacttataatctagagcaaactagttagtccaattatttgtgttggacaattcaatcaccaaaatcatttaggaaaatgtgttagcctatttccctttcaccttcccctaggcaatttgggactacgggaagatcacttcaacaacagcagcacgtcggccatcaccatctatatctgcgacatcaaaaggatgcaacaagccaacaacaacatgatcaagacaggagcactagatcagatggaagcctagaactctaaagtctgaatagaacacaatgagagaatatggagagacatgtaccttgagaagaggtgcttatctttgagatggatgcttgctgccagtgagacaggagggtctgagggagagagaagggagctgccagtgagacaggagggttggagggagagagagaagggagtcaccgctgagacatgatggtcagagggagatagaagggagccgctggtcctgggaagcagaagagtcgtcttgggcggctatatatattatgggttgaaaactgcatgttggacttccttgatcagtaggccctgttgctcaactgatcgcccatcaagacgactaatcgctagttcgctactattggtgccgatctgggcgccaatcactggtggatgaaccacctggtggtgctctctgtagaggcgtggacggtctgcgaccctgggctggacagttcgcgacttaggcgcaggagcggctccttctctatgtacgtctagatggtccgcgcttggggctcggacggtctgcgatggtgcagagggtcgtcttcgcagcagacctagatctcgcctcccgggagggaccccgtcgaggatgagagatcctagggtgtgtcttgaggttggtaggccacccaagacgcctatagtcgacgtagagccgaagagaggtgaagattcgaggtatagaaaggcaaactaaggctaaactaggtctactcctaatgcataaggtaaaaatggcaagtagaattgatttgatcgattgtggggggttcaatcggctgtaacccttcatttgtataaaggggggacggtctggacccgttacaagtcggttcctgagttaatcccgcaggttttgctaacaaatcccgctagaaatccagaaccctaattcattctgtgcacgcgcggaccgtccgcgtcaccacagcggaccgtccggaccgcggacaggctgcccactttggtgttcaacatatgcccccatgccttttggtggaggttgacgaaccaaaagtatatgtattgccagctctcttcgaaaaataagagatctcacaagtcatcttgttcacgaagtaaaaaataagcctgatgcaagtcaccgacttttcaatccaatagagtgatccttccatagagctctaatgcataaaggccatttctaattgcatctttctcggccatgaccgtttgatcaatggatcaaaaggtataaaatagaggtgcccacagactgaataagcaaagggattatgcttgtaccatgggctcatcgttgaaccattccacatttgaacaggacaatatatcgacgatgagtaggtggggaagtatcctggcatcactggatgattaggcgatgcttgctgcgtcgtctttcgggccgttttatttggccgttttgttttagcgggcgaccgaggtttattgttggccgctcggcgtagaacgaccttcttgctagcatatttggagagcaattgatcaaaagtagggccgactttgaccagtcgaccatgtgcgttatatgtacttagcccctgtgacccctttttttcgctttatgtggaggccgacgcctctggccatcggcggactgtcgaaccgtctgcttgagcatcggaccgtccctgcgtaggtgctggaccgtccgtgatgctcgagtcagggagctttgcctggctgcttgattgagcctgcccccggtgcctccgaaattgttagtcttcctgtccgaagctttccgagcaatccctccttgtgatatatttgacgtgtgaggattaccaatgacggcggcgggtgtggccagagatgggtgggcccgacggcggcggaacggtggccggcggcggcggagaggggtgggcgcgaccagagcagagggggcggcccgacggtggcggaccggagcagaggggggtggggccgacgacggcctgcgcaggggaggcgggctgcgccggcggtggccggcgctgggaggtggagggagtgagggggggggggtggccaggccagggaagggtggcggaggcggctggatgggtggggggagggacagaaaaaatatcttagctctataccatgtgggagaccctaaccctagtgaggggttgggagatgtattaatagactgagttaggtgggcctggcccattacaggggtgagacggtaaatacacggggtagaaccccaaaccctaaacgggtacactaacacttacaatgcagaacttctttcctgctgcattttccttggttggcaaattataatttatctgttattcaaaataatgttagcttgtcgaagctctttgtcgaagctcttttctctgcctcggtccacactactgtaggtgatggctctcgaccctgttctggactgatcgctggattcatgggcaatcaatatctacccttgcccccactttggtcagccatattacagtgagaatcaagaaaagcagatctgtgtaagaagccttggtaaacaatagatgggttaatgacatatctggcagcctgtcagcccagattatcatcgacttcttagtaatttgggacctagtgcaaggttttcagttacacccggggattcctgatgtgcatagatggtccccgtctgcatctggagattattccactaaatcggcatatgaccgttttttggctggatcagtctcttttgagccggctactagaatttggaaaagctgggccccccaaggtgtaaattcttcatttggttggcttctctaaatcgttgctggacagcggatagattaagcagacgaggtcttgtgcatcctataaggtgccccctttgtgaccagcaggaggaaacagttcagcatatcttagtggcttgtgtgtttgccagagacacttggtggcagactttgcataaggtagggctgcatcgcctgactccaggattggcaacaacgaccttccaagactggtggagagaagctgagtgccaggtgccaaaaaaccagaaaagaggatttaattccttagtgattctggtggcttggtggctatggaagcatagaaatgaatgtgtgtttgatggtgcatcccccaacatcagcatcatcatgcagcatattcatgaggatgctgttcggtggggcttggcaggggcaagagatcttaggagattgtggccttaggtgctggtgtggctgggggtttttacttcttcttttttcctgtcttgatctatttttttggcagcttgtactgggtctattttagacctctatctcctttttcttaatatataagatgcgcagttctcctgcgcgttcgataaaaaatgttagcttgtcagccctcataggtgtttcatttagctgtgattgactgattgctgagaacgacttctaaattttttgcagagtt

SEQ ID NO: 929 - DNA, 517 bp, Zea mays
  Intron number 8 from transcript GRMZM2G153434_T02 (locus G RMZM2G153434) derived from phytozome v7.0 (chr-ID 8; pos 3 889452 to 3889968)
tttgctttactgggaaattcaacatacgtaggaaggtaatgcatggatccaaattccatagatttaacaatgtaatttataatgttattcaggggctgaatccattaatgtttacttttgctttagtgggaaattcaacatgcgtaggaaggtaatgcatgaatccaaattccatagatttattctttcccagtagtatcttgccaagttacacgggacaatttctatagaataatctacttaacttagttgcatgttttatttttttttagaaaaagaattctatgccattctgtcaatgtgattttatgagacatattagctttgcttattgtgccttgtagtttgcacaggctatcactgttctcacatatcatttgaatttgtctcgaatgaataagcatgtcaacttttcttattgtgtgatcttgaacctagtggcatgcattactgttctctcattcctttttttttcaatgcagtatacttgtaaatagcttggactggtcgaaactta

SEQ ID NO: 930 - DNA, 9664 bp, Zea mays
  Intron number 1 from transcript GRMZM2G471388_T01 (locus G RMZM2G471388) derived from phytozome v7.0 (chr-ID 4; pos 2 8713633 to 28723296 reverse strand)
acgtgggtgtgtgtgtggaggattctgacctagtgctgttgggtctatgcttcgtcgccgaaggtcttcaagggagaagcggcttaaaatgtgtgagcaggtatcttcggactcgtatcagaaagcaaaaagctacaaaggttgacacagcgccgaagctgtgaagcaggaaagcttcggcatgttcgcagagaagggaaccgacttaaagatgaaaagaccatttagacctcaatagagtgctatagaattatcaccaaatgtaaagggcatgtatgtaattttgtatggattgtacctcgtgcctataaataggtgaacagtacccccgtactgttcacgttgacttggcatttgattttgcgtcacacttgtattttcatctccttccaaaccgaaggtacatttacaattcgatattgtctctatttctctatgatgatataataaagttaaatgaatgatgttatatgattattcatgctatcttttatgtttcatatgcttcgtctttcattaatatatactgtgctgatgaaggctcgtccttcatgaccttcgtccggagatcgttatatcctaagggaaataatgcctcaaaggacgaaggactttatcgtttaacattctctgtgttgccttgttcttaacttatagcatttgagaacaagtccccaacattggcgcccacctccggtgaactcacttccactttttgagctgatggcttcgttcaacgaccaagctggagctgcttcggatccgaagctggtactcccgatcacaggtggctcgtcctcagagccagctaacaagaaacagaagaaggaagcacagagaagggtacagcatgttggggtgcaaggacccttcatcaagtcaagatggtctcacattcctattaccttctcccaagaggacctttagctcaaagattacccacacaacgatgccatggttatctcttgtgttatcaaaggatttctggtccacaatgtcttggttgacacaggcagtgcagctgacatcatatttgctaaggccttcagacaaatgcaagagccagaagataagattcatgatgctacacatcctctctgtggcttcggaggaagacagattgtagcattgggcaagatcaccatgtcagtgaccttcgggttcatcaacaacactagaactgagcaagttgtgtttgacattgtcgacatggaatacccttacaatgcaattattggtcgtggtactctcaatgccttcgaagcaatccttcatcctgcctatctttgcatgaagataccttcggatcagggacccatcgctatccatggaagtcaggaagctgcaagaagggccgaaggtaattggactgactcaaaagcaatccataacatcgatggagctgaagcttgtgaacagtacaaattcagaagggagaaagcagcttcagcagaccagccgaagcctatgctcttatgtgaggacatagcagagcagaaggtgctgttaggatctcagttatccgaagagcaggagaaaaccttgataaggtttttgttcaataacaaggatgtttttgcatggtcagccaatgatctttgcggagttaatagagatgttatcgagcactcactcaatgtcgatccatccttcagacccagaaagcaaaggcttcggaaaatgtcagatgataaggccgaaggcgctcgcaacgaagtcaaaagactccttagtgcaggagttatcagagaagtgaagtacccagaatggctagctaacactgttatggtaaaaaaggccaatggcaagtggcgaatgtgcatcgattttacagatcttaacaaagcttgcccgaaggatgaattcccactaccaaggatagattctttagttgatgcagcagcttcttcagagctcatgagtctgttagactgttattcaggctatcaccaaatttggatgaagaaggaagatgagccgaagactagcttcataactccaagtggcacatattgctatcttcggatgcctgaggggctcaaaaacgctggaggaagtttcagccgaatgactgcgaaggttctccaatctcaaataggcagaaacgtgctaacttatgttgatgacatcattgtcaaaagcacgaagcaggagaatcatattgctgatctgcaggagaccttcgccagtttcaggcaagctggcttgaagttaaatccagaaaaatgcgtcttcggagtgaagaaggtgaaatttcttggatgcttggtttcaacaaaggggattgaagctaatccaagtaaaattgaagctatacttcggatggagccaccaactacaaagaagggggctcaaagattgacaggaagattggcatctctcaatagattcatatccagatcagcagagagaaacttaccattcttcgaagtgctgaagtcagccgaagtctttcaatggggaccaatccaacagaaggcctttgaagagctaaaacagtatttaataaatctaacaacattgactccaccaatgccaggggctcctttgttattatatgtggcagcttcgcactcagcggtaagtgcagcgcttgtccaggaaaagcttgatggtcaagtcaagaggcaggccccaatatattttgtatccgaggttcttagtttgtcaaagaaaaattatacagaactggagaaggtattgtatgctgtcttgatggcctccaggaagcttcgacactatttccaagcttacaacataattgttccttcatcgcaacctctgaaggatattatgaggaatcgagaagctactggaaggattggaaaatgggctacagagctcaatgaattttgtattgaatatgttcatagatcttcgattcagtcacaggcgctggcagactttattgctgattggacgccaggggctcaggaggaggaaacgaataaagacaacgaagcctggacagtgttttgtgatggatcttggggaaccttcggagcaggagcggctgctgtgttggtttcaccttccaaagtcaaaatttgttatgcggcaaaacttgattttaattgcacaaataacattgctgagtacgaagcattggttctaggtcttcggaagttaaaagcaatgggagtcagaagggccatacttaaaactgattcccaggttgtttcgggtcatattgacaaaagttgtaaggctaaggatccgaagcttgaaaaatatctggatatggttcgaagagtcgaagcttccttcgaagggttttctgtcaagaatattcctcgaggacaaaatgagcatgctgatctgctagccaagtcagcagcacaggggctgcctttaccttcggatgtgttcttcgaaacaataaaagcaccttcggtggaacttcttgaaagagcagttcttaatatatctcctgtttttagcgaagattggagaaccgagatcatctcttaccttcagggtaaatttctttcagatgacgaagcttataacaagaggatagaagcaagagctcgtccatatgtcatgatagaaggggagttgtacaaacatggagtttgtgctccgctgctcaaatgcttatccagaaccgaaggtatagagttaatgaaagaaatacatgcaggcctgtgtggatctcacatcggatctaggccgttactcggaaaaattttccgtcaagggttttattggccgaaggcagcttcggatgcagcagaattggttcaaaagtgcgaaggttgtcagaaatgtgcaagagatcaaaaacaaccttcgtccttaacacagctcatacaacccacttggccattgcaaaggtggggccttgacttgttaggtccgttaccaccggcccaagggaacctgagatatgttgtagtagctgtggaatatttttctaaatggattgaggcgaagcctttagcaacaataacttcggccaccgtccaaaagtttttctggcagaatattgtttgtcgtttcggggtgccaaaggccatcactgtggacaatgggacacagtttgactccgaagctttcagggatttctgtgaccaaattggtacgaagatccattttgcatcagttaggcacccggagtcaaatggactcgttgaaagagccaacggcattataatgacaggaataatgaagttaatcttcaatcaacccagaggaaaatggccagatcagttaatcaaagtggtgtggagccacaacacgacaacatcaaggtctacaggcttcactccattcaagttgttattcggtgacgaagcaataactccagaggaagctaaaaccggatcaataaggatagtagcttcggcagaatcagactccgaagctgcttattctatagaaaaagatgctttagaagggatcagactgcaagccgtggagaatatcaataaatatcaagctgaaacagttaaatggcgggatagaaaggttcggctaaaaaatattgggccagggcacttggtgcttcggagggtggccaactcggaaacagtgggcaaattgcagttgaaatgggacgggcctttcttagtagcatcttcgtcaagacccggttcatacagattgaaagatatggacggcaatgacattcctagatcttggaatgcggatgagcttcggcgatattatgtttaattcgatgtaatttttcatattttttattttttagttcttctttcatggcacccttttcctttccgaagggggagaaaggtttttaatggggccatcacgtgtaattttcttttttagttctataagaacaaaatcccccaaagaatgtaaatgtaaaagctgagaatgcaccatcgagtgccaaaaagaaaaaaaagaagctccaaagacgttcctaagggaatgcagagcttacagcgaaaagtcaacgctgattccaccaaaagtaaaggcgaagaagctccaaagacgttcctaagggaatgcagagcttacagcgaaaagtcaacgctgattccgccaaaagtaaaggcgaagaagctccaaagacgttcctaagggaatgcagagcttacagcgaaaagtcaacgctgattccgccaaaagtaaaggcgaagaagctccaaagtcgttcctaagggaatgcagagctgaggtgtgattgtttttaagaaaataatggctatgaatatggcttcggatacgtgtttggccattcatttgcacatcacattacatcatagcatttgcattcataaacattcatctaggcatatgtaggataatcatcttcatcgcataaaatggttgcttcggcaagaagagaaaaaagaaagggaaaaacttctatgaaggagagcttcggagaaaaggaaaatgttgttttctatgaagaagagcttcggaaaaaaggaaaatgttgttttctatgcttcgttgcgtacgaaaagaagggaaggtgttttttcgccttcggctcaaaaaaggaaatttcgtccacaccaaagcatttctcatacatcagtgaaaggttaagaatatattacaaggtatgaacagcatacattaaaaacaagtttttgtttacatttacaaaagttatctcaaaagtttttcaagtactgtctgcagtctgctatctaaatctccaaggagcttcggcttcggcgttatttttgatcatcagcttcggcttcgtcatcctacatgaataaggtcgttggaagtcagaatcaagtttacaggaaaaggtaagcacaaggtatgatttcttactggatcaaggtggctacgagcttcgtctcccgctttctctcgaccaccttttgtccatatcatttttacaaatcgattcgagatgcttcgggcgagatcaggatgtcatccaggattgatggtgacaaagtaaaatttggcctattgacaattttcccatgatcacagccagccttcatgaaggctgcagcagtccctcgagaagccacccaggcacagaagtcaccatgcccagctatgacttcgtcgagctcgtcaatttccccctcaatgtgttcgaaggtttttggtagatcttcagctgagggggtaaatttttcgctgctagctccaaccgagtaaaaaatctttcttaatcgttgaatgcacttgttgctaaattccaggcatttttcttgaagatttgtcagtagttttctcaaatccgaattttgctgagcttcggcatcaagttttgcattgagatcttgtttttctcgttcgaactgctcagactggcggagaagcttcgagttcagttctgatatttttgcttcagcttccgccagtaagccttcggctgcctggagctcaaaattctttttctcaaaagcatctgattgctcctttattttgttttccaaatttccgattataatttcatgctttttatcttcaagatcttgctgcatttgcacggctttgctcaataacatactctacacaaacacaaccttcgtcagacgtgtttttattagaagcaataaaggttaagggataagtcattcaccttgaagttggagtaaaataaactaccaacgacatgttgtcgtcggtagcggctgatgtctgcttctagcttcgggaatccaatactcttggacagagtactgataactttggcccctgtttggtcccgaatacactctaatttctcgtcatcaacgcctccgaagaggagtgccccaggtttgtatccacaggattgggcatactctttaagctcttctatttcagcttttgttagatgttctccaactaagttttggaacgcgaaggcttcgttctctgaagcttcatcagcaatttcttttcctttctgtgacgctgcggtcacagtctcttcggcagcagtggcagcttcttctgcagccatgtctagcagcatttggtcaatatgttcaattgtgctctctaaattcaaatcttcagctgaggtaacttcggcggctgcggcctccgaaggtgcaatttcaatatctgccccctctaaagttgctcgtgttttttgggccgaagctcttggcggcgttttgtcaattacctctgtcacggtaatgattctttgtttccttgccttgattgttttcttcgatttctcgggctccttgtccttctgaaaaaactttgtcagttgaggacccagtggacttagcttcgcaggtaaggattcagtcattaccttcagaatttcctcaacaacagcagcagaaggtgatgcgggagtttcttctgcttcggatatttgttgcttcggagaagaagctttccttttcttcggaattttcttcgttactggctctttttcgccttcatctaaggtttcagttacccttttccttttttggcctctggcacctctgttcagattttcgtagtctgggtattcgaaacccaaggcgtccgacactcgatttagccttcgtttcggacgagtgccgaaggctgcggtcatcaattgatcttcttttttggaataattgccaagtatttcattacacattgcttcaatcgtatctagccactcttggcaaggtgctttaaagtactttttaaacttgaaatagtaaggtaaacgtacgagttcaccttctttcttttccccctgtagcttcggcatttcccattctctcaaactgggaaaaactttgaatgctaaaaactcttgaaccaggtcccttgtgctgatatgctctgcaataattctgaattcactcattgcttgttgtgttggaccttcgggtgtcatattgcagcgaggtcgggtttctccgaagattaattccagcgagctttgtacaagcttttccttgtcgtcatcaaccttgacatagaaccactctgatttccagcctgctgcccacttgcttcggtagctaattacagggaactttgtagttttccgataggcaaagttatagcaaccaaaattatcgtgtaatccatcttttctagcctttgtttgataatgtagctcgtgaacccggcagaagctgtctgcaaatggttccactgcttggcttcggagtgcccagatataaacaataagcctaacgatagcgttaggggtcagctgatgaaaatagataccgaatctcttcagtacctctccaataatcccatgcagggggaaccttaatccagcctttagaaaacttttaaaaataacaatctcatccttctctggcttcggggtagtctcttctccaccgaagcgcaacagcttcttctgattttcagtgaaaaagcccgattttaccatcttggatagatcagtcttcgacacagtagattttccgaagtccaagtggctcggcttgcttggcatggcaatgcggtaatcatcttcggaatcagtttcctcaatatcttcttcctctgcttcagcgattgcttgttctgcttgttttgcatcatcatgagggatcttttctgaagtcactagacccgatcgttgcatggcttcggagatgggaagagtctccgaagcttcagtttcctcccccttgcgctcaaccctggcggtagaacggactctggccattcaattatgaacttgtgaaactttaaaattttcttcctccgaagcaggtttcaaactggagcttcgttcgtttctaacagacaagcttcggcgatggttaaaaattttggcaggaaaacagtgcaaatagcaatgaatgctgtggtaacttcacacctactcgtctgtttatatagtgctgcaggtaagaaggcgaagcgccagagtttttacaccaggcgcgcacccgcttgcgctcgctgcgcggtggaccgcagggacaaacagtaaactctgcaaggtgggaccgctgcgtgctgggaaattaaatcgtttctcggcaacgagctcagggaaggtgttttttggaccttcggctccccgaagcttaagagacttttttcacggatcaagcttgttacgaaaaacgatctagcaccacgaaaggggctactgttgggtctatgcttcgtcgccgaaggtcttcaagggagaagcggcttaaaatgtgtgagcaggtatcttcggactcgtatcagaaagcaaaaagctacaaaggttgacacagcgccgaagctgtgaagcaggaaagcttcggcatgttcgcagagaagggaaccgacttaaagatgaaaagaccatttagacctcaatagagtgctatagaattatcaccaaatgtaaagggcatgtatgtaattttgtatgggttgtacctcgtgcctataaataggtgaacagtacccccgtactgttcacgttgacttggcatttgcttctgcgtcacacttgtattttcatctccttccaaaccgaaggtacatttacaattcgatattgtctctatttctctatgatgatataataaagttaaatgaatgatgttatatgattattcatgctatcttttatgtttcatatgcttcgtctttcattaatatatactgtgctgatgaaggctcgtccttcatgaccttcgtccggagatcgttatatccttagggaaataatgcctcaaaggacgaatgactttatcgtttaacattctctgtgttgccttgttcttaacttatagcatttgagaacaagtccccaacaggtgcgtagtca

SEQ ID NO: 931 - DNA, 3319 bp, Zea mays
  Intron number 4 from transcript GRMZM2G443565_T01 (locus G RMZM2G443565) derived from phytozome v7.0 (chr-ID 10; pos 4451132 to 4454450 reverse strand)
cgctgccatccacaccaacctccagagcaacggaggtacgtacagcaaaatgttgcaaatgatatgccaataaaaacaaggatgataaattttagcctccatacaccacatatatgcttcttaccttcttacaaaaaacatagtcaacacataaatgtactttctagattttttgaagtcctcaaaataattgacaagcacagcaagaccataagcaagaggtagctgcccaccattttccaagatctcaactctcttattaccatacccaatatttcattcttcagattcttcaccaaaacttgattgttactcctctcaaggccaccaaaacagtagaaccaaagacaaggagactaagtggaaataaaccaaacttacgtgggttcaaacttgcaactgtccactgttacaaaaactacaaatttcattgtaaaaagaagctactcgggtattgagagtctagcagcaaaaaacaaagagacgatgtaaaaaagataaaaatggatcatcactaaggaataatttatgtgtactactttcttgaagataaacgataaatgaattgtgttgatgaaagactcaaacagtaaccaagctacatgactattattatgctatattcatatgagaacattctttattttatatgtttaagttacttgcatgcagtgagatagcctcaataggttgtgcacaattcagtcccaacaataattgtcttgcttcctatcaacaggaaaaaaaatgccaatatcaacaaactgaacctagatgccatctagatatccatatgattatgacccaatagagtaaaccgggagttgagtacaacaaggtataatatttgatatatagctgttagagcaactccagttggatcatctacaatatcttctatttaatattgatacccaatttcataattttacacagggaacatctcaacctactaatgaacagaatccaaatgtaaatgattggtgtgttacacaaatgcaacaaaagtaatggagtcataaaatatgtaggtttagaaagaaaacacagagcaacgacaacatactcaacagaagtgtgtgtgtgttgaggggggctcagtttcgcctttgctcaatcatttaactggtaaccccaccatctcctagcaccagatcaacttgtcctgtgttctgccattccctgttgaatgttagcctctgcctttaacacgagcgtcttacgtcccgatgagtgacgaccataagtccaaaagaccataagtccatcatataaatacttcttggttagcctctgcctttgctcaatcatttaacaggattatggtctaaaccttatgtgcttgtttctacaatctgaactctgaagttttgtttgctcatagggcttaaatgatccaaatcctgctgtatcagctatagaggaaagcaatgctcttgccttggctattgttccaacagttagtctgttaccactgtctatttcaacccttctatatttgtttcctggcagtgttgttgtcatagtgatagtgtaaatatctcttgctttgtgtatcagtgtaaatatctcccgctaacaaatcctgactgcaacacacatttaggccaaaaatcttaaactgcttcaggccaaaaatcagccctgaggagaaataatcggaggatttgtgatgaggtgccttaccgatccgttcccgtaaaaaaattagccgtgagtgcaaccaaagctatatatatgtctggtctggtgtgatcttttgctcactatccaaacaatcctaataaattattacattcttgaattcatcactcatatataacactaacttggcatctgccattccagtatcatcatcatcatctaataacaatatgctgagttatagtcaaaacagttagctacaattatttatggcgttttgtagccagtggttgccggctaatccggccagtcacaaacaaccaagtagagctgcctcgtacttcatctcgcctggctatttttagtagcatggtactgaccgctgaagcaggcagatctagatctgtcctggctggtcgctaaagaaaggttgtttacaaggcagcagagcgatggctctttgtctttgtgcaatggtgactggtgcgaggtgtctggtttggttgtgcacaagaaccacgccaacagaagttgcctacactgcatgcacaccatgacaccaatggcctctcatgactttgttgatggaccctccattgtctctgcaaggaagctggagtgtgacctgggccttttgtctagatgcaagaagggctcgtgacagctcatttcgttctaggctttggctcgtggcgcctgctattccaaggatgccatacatggaccgctagctagatttgaggttaaagaactctggtgttgttctagcctgtagacatcatcgctgatcaaagatcttacagtttgtttcggagtgaagttgtgagtaaaaagtggcgcaatatataaaatgccctgttgattgggggtgaccaattcatgtcaatgctaatggagagttggagactaatatccaacatctcctcttacatataactttgagacaaatggaagctaaccggcaaatcgactaagtaaagtaattattatgcccttctgatccatagtggaacctactatcagctcagcatcatgtacatcattctctgtttatttgaattccatgtgatgattttacaatgtatatttctgatattatcagatttgcgtagttgaattccatatcagttttacaatgtatattttacaatgtatatttctgatattatcagatcttttctcaacaggatggccagttgagcgatgccttatgccttccttgtggtcagtccacctgacatgagtcaatgctttgaggaggtttgtggatgttagtttgaaactgatatggtttcaaattgtcaacagtgctatagttagaaggaaattcagtatgaattgagcttgtgtcacttagtaataacatctgccaaattatccttgcagatggctgctgctgcatctaataaaacttcatccaaacctggattgaattatcctggcctggaagaacaggcccttcagtttatattggactgctgtgaatctaatatagaaaaatatacaaagtacttagaggtgatgtcctttccatgtcatctcttgcacactacaacctctcataagatcttgacaatctattatcctatcatcatcattattatttgatccttgattcttttcttgttgcgtgctggtagatataaaaccagttgcagtcacacaggtggttgtc

SEQ ID NO: 932 - DNA, 18454 bp, Zea mays
  Intron number 2 from transcript GRMZM2G104299_T01 (locus G RMZM2G104299) derived from phytozome v7.0 (chr-ID 7; pos 1 33382078 to 133400531 reverse strand)
gtttcggttagttggtttgattgatgagcatttttttagtatcgaaatcttttacattagtgagatttagagaagggacaaatcaaagcaaacctttattccggaaatacgataggctattttaattgaatcattctgcgatttctgtgggaatgtctagctaaggatgcttaatgcttggctgttacataattgaagtatgaagtactccaatctgtttaataactgaaatttcattccagtttacatgcgttggaattgctattgattcgagtatgttttacagggccagcggggacaggtttcacaccacacgttatttttgtaaaagccggagaggtatagctaatgctgcgctcttttcatatatctggcattgccgcttgtcaataaattattcagttttttttggttaaatacagtaaggtttgacaattactagtaaggatacagtatttctgattcagctttcatcagtggaactcctagtttgcattaagctattgattgtagtgcattaggggggctgttcgaaccagaattgagcggcggactgtccggccctgaggccggacggtccgcggtccggacggtccgcgcctgtgggccggacggtccgcgcgtgcgcagaacagattagggttccgagttttgtgctacggttgttagctatattcgcgggattagctcggaatcagttgtgtaaagggtccagcccccctcctctataaatagagaggtctacggccgatttgtaatcatcaacaatcgaatcaatacaacttttattcgcattttatcctaggagtagttctagtctagtttaggtttagcctcccaatccccaaattctccgcctctcctcgactctacgtggattagaggagtctaggtcggcctgccctagcctagacaccacctaggatctctactccccgacggggtccctcccgggagcgagatccaggcgccgtcggcgatcttccgccgtccctgcgtacgtgcggaccgtccggccccagggcgcggaccgtccggccgtcaggccccagggcgcggaccgtccggccgtcaggcagaagtcccagccgcgcaccaggccgcggaccgtccggccccaggccgcggacagtccgcccttgcgcagagagcaccaccgcgcctcgcaccaggccgcggaccgtccggcccctgcgcgcggaccgtccgcccctgtgcagagggcaccgccacggttcttgttgagtgtttggcgttccaaaaaagcgtcaacatactttttggcgactccgctggggaacacatatctaagctcatcaaatcggccctcaatggccggttcaagggatagctctgatatttctccaagcaacatcatagagccgacttgggaaaccttgccggctgacgagcagctccagttcgaggagcacaaggagcggatgatccaggaggcgaaagcaaagttcttggccaacttcaaagtggacaggaacaacaaggtcgtccgacatcgggcaacggatccggcttcgctccaacccacgccagatatccccaatgtaagtaataccaacgatctgcaatctcttagaaattatgtagaagatcagcgtgaacaaatgcagaacatcatagggggtatgcaaagcgatcttaagagactagtacgtgcatttgataaatctagtatcgtaaattttccttcgcacgaggttgagttaggagataacgcgtgtaacacatcggctacaggttgtcacgaccagtcacaacccctttatgggatgccgatggacacataccctaatcaaccgcaaatcggcagcaaaccagccgatctgcacatgcccggaccgtccgcacgtgagcgcggaccgtccgggtcagcaacagtcgggcatatttttaatgagttacctagatatgcgaccgagccaccacacacggcacagaacctaaactacccagtcggaccgtccgcgtacaacaacggacggtccgcacataatcacggacggtccgggccaatgtccggacaggccgcacgtgaccttttttgaggaggattgttaccggaatcctcacccgtcccctcaacacttcccatcgcactatacaatgcatcaacccattaattcaaggtccagaaccccaggaaaactttccggccccacccaggaggccggaaagaaacgatcaacctatgacccatatagggcaaatgaaaatgcaccacgtaactcaaaccaatggggggaaagacagcatgctaatatccagccaactccacctatgtttgaccagagagccggtggtctcgcaccggctgccattgatatagtaagggaagagatagccggggcgttccgagataagctcggagtaagcatggtccctggggggcaatcatatcggaaaccttatgacagccgatttgatcaccacccatacccacagggaaccaggatacccgaattcacaaaattttcgggtgatcaagggaaaaacacacgcgaacatataggccagttcttagcacaattgggagaattggccgacacagaggcatttcgcgtacgtttattttcattatcgctaacaggaaccgcgtttgcatggtatgccactttacctcctaattccatttcatcatggggggatctagaacaaaaatttcatgatcattttttctccggtgactatgagttggatttggtagatttagtgtcgttgtgacagacaaaagatgaatcggttaatgattacatccagagattccgagatacgagaaaccgatgctttcaaattcatttagcagagaaacagctagtaggattagcctttaatggtctgcgatattatttaaaagaaagattagaaggcatccaattctttacactagcacaattacaccagagagctttggcttgtgaaagccgaagcaaagaaactgctaaaacaattcgtcacaacgtacatgtagtagaatgcgaccaaagtagctcagaagacgaatcagcagaggtgtatgctgctgaaatggtttggccaaagcaggccaaatcttcggcttgtgcctccttacagccggttcaaaagaaacggcaagaggaggttaagtttacatttaatgttggtaagtgtgatagaatattcgatgaattacttaagaatggcaacattaaaataaatcacactgttccatccgccgacgagctaaaacgtcgtgcatattgcaagtggcataactcattttctcatgccactaatgattgtaatgtatttcggcgacagattcaatcggccattaacgaaggacgattgaaatttcaggaaatgcaggtggatatggagccctttccgatgaacatgattgacttcgagggcaagaaagtcctgattcggccaaatacagctgataaaggcaaaggcaaggaaacaatcatcggcaatgctaaaaaggccgatggggattgtaaagcttcttgcaggaaagtggttgccgagaagactcccgatggaggggagaccctgaaggtgaccatcacagcctctagcattggggggcaagcgcagacgggaagacagttgcaggaacccgtgctgcgcatcacggacagtccgccgtccagacgcggacggtccgacgcttcgccggacggtccggaggactctggcggacggtccggccgtgctcaggacccccagcgaccacgtaccttcaaaccacgacgacccgagataggtacgtggaaaaccaatacatttaaagcagctggtcggctgatcaagcctggcccgactttcgatcaattgttgtctaaatacgtgaaaaagaaggccggccctagtgaccggccaccaaagcgaccccgctcacccattcatgagcaacgtcaggtcaggccgattggatcacctcaccaatcggatgaaatgagaggtcctattgtacaagtgagacctaacatacctgcatggacacctccacctccatatccacctatgccatatccatacacatatttacctccgccatatgtcccaaatcaaatgtggggcatgccaccatatccatttgggatgccacagtaccccgcctggggggcaccccaaacatctgtttttgacaggttgacgccaccagtacaagaccgattgagcactgctcaatccggtcaccaggcacaaactcaacaggattgccggactactcggccttacaggccgaccaatccggcaggggggcatatgcctgtagcgactcaaagaacaacaaaaaaggacatcatcaaaataggcaccgcagatgttgtcatacagggagataataaagggccgatgattttcggcgaatcgaccaacacaaccgaaaaggatacggctaccatcaaaacagccgatccaaaatactccatgcctcgatggtgcccagcgggattgacacgatctcaaaagagaaaattacagcgcctaagagcaaaggagagccaggaaaaggaggcagaaaagacattcaatgacacacatccactatacccgccaccgcaaaagaaatggagaccgaaggccgttgagaaaaaacaaacggccacaggaatagaaagtcaatctgcaccaggcgcggaccgtccggcccctgcgcaaggaccgtccgccgttcaccaggaagtctctggacaacctgcaccaggcgcggaccgtccggcccccgcacgcggaccgtccgccgttcaccaggaagcctccaacgacacgacaacatcaatggaagaggacgacctgttgggagaagacctggtcgactacgaggcttctccagaacgcccaggtatggatgtaaatgttattacattttctgccgattgtactattatcggcgacgatgaacctgttgttgcccagtttgattttggtcctaaagaagccgcctttactaaaccaaaagaatcggtaaatcatttaaagccgctcttcgtgcgcggctgaaagttccctttgacccgggaacaggatctggatgtcgcctagaggggggggtgaataggcgaataaaactttttactttaaaacttaaattcttactctactcgaagacttagtacgcagtggagtgagaagactcttcgagtaggttgcagcggaatagaagatcctgtctcaaaatgtcctgcacttcaaataaagcttataccacagataagtattgaagtgcagatataaagacaagtaagacagagagtcaggatacaatacagaacagagcacacagacgcaaggatttatcccgaggttcggccaagcctgaaatgcttgcctagtcctcgttggagttagccacacctgggcttggagtctatttcaactccttcctccgtttgctcagatctgtcagtatgacagatagagcctttcactattgagatgggttacaacaacaccgtggctgcttacaaacttctcggcagcacctcggtagagtaacgatacgctcaagaccttgctctagctcttagcagctcttctccactctctaaaggcttatagttgtgccttctacacaaactatagagttacacacaagagggagagcgagaattgattcgagtgaagtctatacttgttggctgcacttgtaccttgcttgaggcgcctaggggtcccttttataggcacaagggacctaggagccgttggaagcaatccaggaaggcaaatcttgccttctgtcgggtggcgcaccggacagtccggtgcacaccggacactgtccggtgcccgatttcttttccttctatggcgaagccgaccgttggcagtcttggagccgttggcgcaccggacatgtccggtgcacaccggacagtccggtgcctccatctagccgttggttcagccacgtgccccgcgcagatcgcgcgatcgaccgttggcccggccgaccgttggttcaccggacagtccggtgcacaccggacagtccggtgaattttagccgaacgacgccgacgaattcccgagagcggtcttttcaccagagttagcctggcgcaccggacactgtccggtgcaccaccggacactgtccggtgcaccaccggacagtccggtgtgtcagactgagctgagtctcggctgtacacagccaagtattttgcatctcttttcttttcttcttttctctgtttctaacacttagacaaatatgttagtacacaaaaaccaatatactaagtctagaaacataccttctcttgattattacatctatagcatttcacatgcttgagctttgatgttggactcataaatcatcaagtcggctcgacttgatctagattgacatttcttagctccaacatcctgcaaaggtcacatagaacatttccaaacataggaacaacccaaactaaagatcaagatgaacttagctcttttgggctgcttctagttctggttttgacacttgttctccttctagtgaccttgatctccttcttagagcttgatcttgagccttatgacttacaccacataactgtagctgttacctcattggttgtaagtcacgtccttatatagtgacccttgatgtgctgtagctgttctcaactcgatcacccttgactttgcaagctttcttcttcacccttggccttgggttcctcagtctccttgaccttctcccgtgcacttggtacctcgaagctcttcttgcctccgtccttggcttgatcagttgtctcctagctacgcacccgagtatcacttttgcaatgtccatctaacttgtgatgcccattatatatcatcatctagtccttgggccatcacacttgttcacttgtgttgaaccctgtcagctttacactgagcacctgttcaacactcagcacacttgttagtcctttaattgagttgtcatccaaacaccaaaactcacaagagagctttcaatctccccctttttggtgattgatggcaacacaattaaagcttacataagaataagatttgaagcacaaattttgaattctaagtttatagaattgctccccctaaatatgtgcttacttcagattcataattttggccttatatgccaatttgcacatacttaggcaattcgaagcatttctacaccttagcagtttttggaatgcattgtgtcaaagatcaaatcatgatgctataacaccacacaaatgcacagaatcagagttaaacaccaatcaattgagtggatatttcacaggaatatcaacctaccactattcaccattaagataccaatttaaactaagaaactaatttaaagcaaacttaagacaccattaaccacatgactatctattacactatagaagccaaataattcatcgcagcggaaacactagtccatatgagcaacactgcaagaaacatatgaatatcatacttggcaaagctcaaactaacacatcacccatttggataagctctcctctcaggttgagataagctttaatacacaaattctccccctttgacatcaaacaccaaaaaccatactcaagcaagaacatatgatgatgtcaagggacagcagggtgttaaggaggaaaaaacgactatcaaaatttccccttacttattgaatagatgccctatcaacatatatgcaaaaagattaatacttccttttgtacctttaccatgttgtagtgtacttcccatcttgaaagtatttaatctctcgagagcttctccacacttgtgcctgattctttatcctaactttttcttgttgctaagacaccaaacttagaacaagttatagtattgggcacaagaagaaacttctattctcatgattatcaaaagatatcaactgaagcaaactattacggctatcaattgaaagataccaatttcaaagttcatttattatcatggctccatgatatttaagagtaagcatctattatcaccagatgagcaatctaaaaatatccaattactcatgacttaagataccaattacttgacttacagaggtacccaagtcctgattgctctatttcatgctcatcttctcttttccaccttgagactgtacaagattgctcaaggaacagttagtctcaaaagacacaagttatgtgtgctccccctcaagttgtgcatcaagtatttgaatgacttgcactttgcacattctagcttcctcagaactagaggggatcacagcataccttggtcaaggcatactctatcactttcatcacacaaagataccaatttgaatgtcaagtgaaagattgacttaatccaacaatgcatgccttaagtagtattccattttacaagcaatcttagacatgcttcatacatgacaatcattgtaccacatgtaccaattgaataacaacacaatcatgcatataaagcgtaatgtctaagcatgccataattaagaaggtttcttaggtgcatcagaagaaacaacattttaaagacataaatcacctaagccaagatactaccaattgaaatgcaagaacacagctatgataacaattaatggaacttcaagatattcaataaaattgcacagttccattttccatacctttgcctttatgagagcacttgttattaccaattcagggctccttacgcatctcatagctcaaaagggcatgacatggatttgaaattcacacaataccaaaccagggtaatcatgtgaacatggactaaacaaaatgtcatatttgcacatagcatgacttacacatagttacatgtttatccatatacacccagagggttaatcgctgtggatataacaaatgaaagagctacccatgaatgattcaaaagatatatcctatatatcaccagtcatgattaagtaaacatcattatgattcatttaacacaggcaatcataaagcataactactctaaggacaggtagcacaacaagccaacttaagagcaatactaaattgcaattatgtacttaaaatacacgggtaccgtccttttgagagcaggttgtagattctcatcaaggtcctttacttgattcaccaataatgattcaggacctatacaccttatttcacttgagatgaacatgggattagtatttcacaataattcaaccttgggtcaataaacactaaaacaattaacagcttaagtatagagttttagataaccgtcttaagctctcccatggtctccagtccatctcaaggcacctgcatggtctagttagcacagtttggtacccacctcgggatgggtccataacgatcaactaaaagtgcctttggtatccaaatagtctttgtgctagttctaggtgagctcgtcgtagatctagcacaagtatatgatttgggtctcctaagcaaatgagattgagacaactttactcgtttaggagccttacctttattacataccttggatagatgaccctgctcgccacacttgtagcagaagcgtcgctcaacttgacatgacacttgctgtttgttattttccttagtgggggtcatcttggagagtgcacgtgcttggttcatcaatagcggacaagaagtgatcatgtggtccttattgttgcatccaaaacaactccttgtcccttcatccttgtctttgtatggacaagacgcgataaggtggcctagcttcttgcacttgaaacacctcctttttcctcttctctttttgctcatagagaaaaggtcagtgcaaataacatgattaaataaatctttacctttttccaagctcatgttgatttcttcatctttaggaacaatctttttatgaagctcaacacttgttgcagtttttcctttctcaagcttcttcaccacgcgcccgtggatatcttgagagagttgagcaatgcgtcttctccttagttgtctttgcttcttgttcccacacaatttcttttgtgaccctgcatcttgattcttattcaaacattggctttcttttgaacagcaggggttagcacatggtgatatacaattcaaatgcgcactcgtgcgagagtgaggttcacatgaatttaagttcgcaattataacctcatgagcaacattaagcatgatatggtcatcaatcattttattatgagaatatgacaacacatcgtactcttcacctagagcaagcttttctaaatttagaatttctacttctctttcaagcatggcattttccattttaagttgagcaacacaagatatagcatcatcattactattttgctcaattaaaattgaatcataccgttggaccaagacatcatgagagcactttagctcctcatgttctttggtcatcttctccaggctgttgtttgttttgatgagagtctcctctagcctaagaagcatctcgctttgttccttgttccttctcaacagcttaatcaagagcgctttgtcttctttgttgagatgggtgtagaaacggcgaatctcctcttcttccacatcatcggtctcattttccctgtcattaacgttagtggaagcaatataggaaaatgtaccttgtggtgatgaggattcatcctcgctatcatcctcattttcctcctcatcctggcttttgtctccatcatcattgttagcaataaaacacttattattagtggaaaacaaacctgtcgacgaggtggattcatcgtttggtgcccatcgttcttgttcttctcccttgtgcaagttagtatcaccaacaacagagagagcagtggaagtgcatatggacttaaaaaatttcaacttaagtttagtccatagatcatgagcatcaaaaattaagtcactatcactactcaagatggcaaaataggcacctctagatagagaatcaactaagatgttgcaagcatggtgatttagagttagacatcttagttcttcattagaaggatttttactaacattagaaggaaaaatacttctcctaaagatctgtctcaaatcaggatcaacactcatgaaagcattataaatagagacagaccaagatttgtaattagagccatcgcctaaaagaagttcaacagttacctcttgtgacgacatcgttatctccggacggctaagcccacactggagaggcctagctccgataccaattgaaagttccctttgactcgggaacaggatctggatgtcgcctagagggggggtgaataggcgaataaaactttttactttaaaacttaaattcttactctactcgaagacttagtacgcagtggagtgagaagactcttcgagtaggttgcagcggaatagaagatcctgtctcaaaatgtcctgcacttcaaataaagcttataccacagataagtattgaagtgcagatataaagacaagtaagacagagagtcaggatacaatacagaacagagcacacagacgcaaggatttatcccgaggttcggccaagcctgaaatgcttgcctagtcctcgttggagttagccacacctgggcttggagtctatttcaactccttcctccgtttgctcagatctgtcagtatgacagatagagcctttcactattgagatgggttacaacaacaccgtggctgcttacaaacttctcggcagcacctcggtagagtaacgatacgctcaagaccttgctctagctcttagcagctcttctccactctctaaaggcttatagttgtgccttctacacaaactatagagttacacacaagagggagagcgagaattgattcgagtgaagtctatacttgttggctgcacttgtaccttgcttgaggcgcctaggggtcccttttataggcacaagggacctaggagccgttggaagcaatccaggaaggcaaatcttgccttctgtcgggtggcgcaccggacagtccggtgcacaccggacactgtccggtgcccgatttctttccttctatggcgaagccgaccgttggcagtcttggagccgttggcgcaccggacatgtccggtgcacaccggacagtccggtgcctccatctagccgttggttcagccacgtgccccgcgcagatcgcgcgatcgaccgttggcccggccgaccgttggttcaccggacagtccggtgcacaccggacagtccggtgaattttagccgaacgacgccgacgaattcccgagagcggtcttttcaccagagttagcctggcgcaccggacactgtccggtgcaccaccggacactgtccggtgcaccaccggacagtccggtgtgtcagactgagctgagtctcggctgtacacagccaagtattttgcatctcttttcttttcttcttttctctgtttctaacacttagacaaatatgttagtacacaaaaaccaatatactaagtctagaaacataccttctcttgattattacatctatagcatttcacatgcttgagctttgatgttggactcataaatcatcaagtcggctcgacttgatctagattgacatttcttagctccaacatcctgcaaaggtcacatagaacatttccaaacataggaacaacccaaactaaagatcaagatgaacttagctcttttgggctgcttctagttctggttttgacacttgttctccttctagtgaccttgatctccttcttagagcttgatcttgagccttatgacttacaccacataactgtagctgttacctcattggttgtaagtcacgtccttatatagtgacccttgatgtgctgtagctgttctcaactcgatcacccttgactttgcaagctttcttcttcacccttggccttgggttcctcagtctccttgaccttctcccgtgcacttggtacctcgaagctcttcttgcctccgtccttggcttgatcagttgtctcctagctacgcacccgagtatcacttttgcaatgtccatctaacttgtgatgcccattatatatcatcatctagtccttgggccatcacacttgttcacttgtgttgaaccctgtcagctttacactgagcacctgttcaacactcagcacacttgttagtcctttaattgagttgtcatccaaacaccaaaactcacaagagagctttcagcggccacattgatgggatatcgattgctaagatgttggtagatggaggggcggctgtaaatctaatgccttattcgttatacagaaaattaggtaaacaagacgacgaacttgtcaagaccaacatgaccctcagcggtgttggaactgatagttcgatcaaagccaagggagtcacgtccgttgaattaaccatcgggactaagacccttgctgctgcattcttcgtcgctgatgtagaaggaaattacagtttaatcctaggcagagattggattcacgccaatcaatgtataccttctacattacatcaaatgctgatacaatgggtaggcgatgatatagaacaagtacatgctgatgtatcggcctgcatcgctgtggccgatgcccctgtactctggacgtatgagaccgctacatgtctcacaggagtagacttttctgattatcaattcataagtatagataagaaaggtttcattcctgtaatgctagagccgatggaaaatcggctaaatcctaaataaagttaaatgatgaatacacacaaagttcatgagtctttggtcacagacagttcggccgccaaggccggatggtctggtctttcacaaaagagttcggactttaagaccgaacatctaccacaacgaaaagacagtattacggatgatccggtccccgagaccggacagtccgccatcacacaaagatcatctgattcctctgtgggggacatgatagaggaattcagagatcttgataaactaggacaggggtttacatcggccgatcctttggaggagattgacataggagatggtaaaactccaaggccgacttttgtaaacaagaccctggagaccgattctagaaatgagatgatcggtctattaaaagaatattcagattgctttgcttggaattatactgagatgcctggattaagccgagagatcgtagagcatcggctgcctattaaatctggtttcagacctttcaagcaaaaagctagaacatttcgtccggatcttctcccacgcatcaaggacgaaatccaccggctgctagaagctgattttatcagaccttgcagatacgcagagtaggtctccaatattgtgccggtggagaagaaggagacaggtaaacttagagtatgcattgattttcgcaatttaaatagagcaactcctaaagacgaatatcccatgcccatagccgacacattaatcaataatgcatcaggaaatagaattattagcttccttgatggtaatgccggatataatcagattttcatggccgaagaagatgcgtctaaaacggcctttatatgtccaggcttcattggtttatttgagtgggttgtcatgacatttggtctaaaaaatgctggtgctacttatcagagggctatgaatttgatcttccatgaattgttaggaaacactgtggaagtttacattgatgatattgtagtcaaatcggctgaatttagttctcatatagctgatttgcgcaaggcctttgataaaatgcgtcagtatggtttgaaaatgaacccacgtaaatgtgcttttggagtgtcggctggtaagtttttaggatttgtcatacatgaacatggtatagagatagaccctgaccgaatcaagtctattcggaatgtggggcctccgacctgtaaagtcgaggtacagaggttcctcggcaaggtgaattatttacgaagatttatttctaacctagccgggaagattgatgcgtttacccctattcgtcggcttaagaatgatgccgaattcacttggggggcagaacagcaagaggcatttgatctcataaaaaaatacttatcttcggctcccgtattaaaagcaccacaagcaggagtgtcatttcggttatacattgcagctgaggataaggtcattggggctgttctgacacaagaaactgaggggaaggagcatgttgtggcatatctaagccgaaggttggtggatgctgaaacaaggtacacttttattgaaaagttatgtttatgcttgttttacgcatgcaccaaatgtagatgttatttactgtctagtcattgcactgtttctggtcaagccgatgtgatcaaatacatgttgcataacccaattatgagtggtagaattggtaagtgggcttatgcactaatagaatatgacttggcctatgaaccattgaaatctatgaaaggccaagtcgtagcggatttcattgtagaacatcgggttaatgatattcatgagctagacatgtcatacctcactattactccttggactttatattttgatgaatcggtttgccatgaagggcaaggaattggcattgtacttgtttcaccaagtaatgtctcctttgacttctccagccgattggaaacttattgcactaataatcaagctgaatatgaggccctcctattcggtttagaacttttagatggtatgggagtaaaacatgtgatggtatttggtgattctcagctggttgtccaacaagtgttagaagaatatcaatgtcttgatggtactctaaatagttatcttgagaaatgttggagcataatccattcttttgacgaattcagtattcggcatatctctagagttgagaatcatagagctaacaacttggcacaagatgcatcgggttatcggataaagagagggaaatttcacaaaactgaaaatctgataaccagtgcagagccaaaatcccaggtcgcggaccgtccgcgtgttgacgccggaccgtccgaggttaccagaaaggttctcttaatcgattcggctgacaatgaagccgatacaagtgattggaggacacctatacttaattatttgcaaaatcccaatatcaggacagataagaacattcggcgaatagctttcaagtatgttttgatgagtgatgaactttatcgccgaacggttaatgatgtcctgcttaagtgcttgggcccagatgatgctatattagccatggccgaagtacatgaaggaatttgtggtacccatcaatcagctccaaagatgaagtggttgttgcgaaggtctggtttttattggcctagtatgacagctgattgtttcaagtactacaaggggtgccaagtgtgtcaaaaattcggcgacctacagttggtccctgcagccgaattacatcctatcatcaagccttggccattcagaggatggggattagactttattggagaaattcatccttcatcatcaaaggggcatcggtttgtgttagttgccactgactatttcaccaaatggactgaagccgttgctctaaagaacatgacgcacaaggaggtaattgagttcataactgagcatattattcatagattcggcattccccagaccttgactatagatcaaggtacttcttttatgtcaaaggaggtacgtgaatttgctaaattatacagaattaagctacttaattcgtctccatattatgctcaggccaatggacaggccgagtctagtaataggacgttgattaatttgataaagaagaaggtatctgataatcctaaacattggcataagattttgtctgaagctttatgggctcatagaatatctaaacatagtgctactaaagtatctccttttgagcttgtctatgggcaggaagcagtgttacctgtggaaataagtttgaatgctgtcaggtttgccagacaaaatgatctaactgctactgattattataattcaatgatggataatattgatgaggtgaccgacaagaggatgatagctttgggagcaatagaaaaggacaagatcatggtagccagggcctacaacaagaaggtcaaagcaaaatcattccaagtaggagacttggtgtggaagaccattctacctctgaggaataaagaccgaaagttcgggaaatggtcgccaagctgggagggtccttataaagtgaaacaggtgatgtctggtaacgcttatttactacaaacattacaaggcaaggatttacctaaggctttgaatgagcgtttcctcaaacagtaccatcctagtatgtggcaagatgtctaagaaaaccgatgtaatcacatcgagttagttgcttttggttcgcccagctccaccaaaaggtaggggggcatatgttcgaaccagaattgagcggcggactgtccggccctgaggccggacggtccgcggtccggacggtccgcgcctgtgggccggacggtccgcgcgtgcgcagaacagattagggttccgagttttgtgctacggttgttagctatattcgcgggattagctcggaatcagttgtgtaaagggtccagcccccctcctctataaatagagaggtctacggccgatttgtaatcatcaacaatcgaatcaatacaacttttattcgcattttatcctaggagtagttctagtctagtttaggtttagcctcccaatccccaaattctccgcctctcctcgactctacgtcgattagaggagtctaggtcggcctgcccgagcctagacaccacctaggatctctactccccgacggggtccctcccgggagcgagatccaggcgccgtcggcgatcttccgccgtccctgcgtacgtgcggaccgtccggccccagggcgcggaccgtccggccgtcaggcagaagtcccagccgcgcaccaggccgcggacagtccgcccttgcgcagagagcaccaccgcgcctcgcaccaggccgcggaccgtccggcccctgcgcgcggaccgtccgcccctgtgcagagggcaccgccacggttcttgttgagtgtttggcgttccaaaaaagcgtcaacaagggcctttgctatttttctgattttttagggttactctgagcacttagccacttactaaagcagaacatatgatattctagttcattggatatgtgagagaaatgtagtcatatgctctgcttccatacttccagaatttgtgttataatgctgaatcttccactgtgacttgtggttgaggcttaagcttaagttagtagagagccagtgcagtattgacagcttaccggcttgatcaccactcactagcttctgtttattactataagtccattggacatctgtctgttatttccgccaaaattatcagcattcaggatggttaggcttcttaccattttgtaggagaaattgcattctttttataacctttatcagctcactgctgtaagtggcttgttttttttttacaggacgtatcggcaaagatc

SEQ ID NO: 933 - DNA, 15296 bp, Zea mays
  Intron number 5 from transcript GRMZM2G065130_T02 (locus G RMZM2G065130) derived from phytozome v7.0 (chr-ID 1; pos 1 465555 to 1480850)
ggggaagaaatagtatgttgagatacaaaatattccctttcatatctatttttttatacttgtgcacatttatcaatagaaactactggagtctcaaagttcattgcacccaaagttaactgatgggggaagaaatagtatgttgagatacaaaagatttcctttcattttttatacttgtgcacatttatcaatataagttactggagtctcgaacttcattgcacctgttattgtaatatctgttgctacatgtttacctggattatacaacctagtaaactgtagtgacaaaccaattgagatagatgcattatgcttttaggaggctgtaggtattcctcttgaaatcctgtagcataagtgcataaatcataaatcatcaaagtgtgagcagagggagcatacaatgctgaattcaatattcaacttggatcttttacaatttagttagtacaacgtgtcagtattcaataaactatagtcttgtacagggaaatttagcttgaaagagtggtactatgcttccaaatgcaccaagctcctaagacaatcagtgagttcactcgtgtgtttttgatggtatatctcctccagttaactcgatcatgagtatactaagggatgaacacagcctgtggttcatggcaggagctaaaaagctccaaggcctaggtctaggaagggcaacctaatctgttgggttgtaaccgggtcatgtggtttatgtcctgtagctagtgttcaccaggttcatcctgacaccctggagctaaaggatgtggctgtttaccggtgttctgcttggtgtttagactcgtccttggtgcctgcttcaagggagctttggatcgtcgaacctccctttgccgttgatggggtgtcttctggcaggagaacgttgatgtatccaatccgcatcacattctcgtctgccccgcggagggatggatccgatcctaagcttcatgctattacttcgggcggtgatggttctggtcatgtgcagcagggatcccctcctttttgaagacccccccccattcgagtaggagaaggggagaacatggtcattcgggacgtctctcagttcatgaacgtttgggcccaagagatgagaacatgcagcagcggaacattagctcggaggtggcagtttcagatttaagaactttggaatctgatggggggaccttgtctcctaggctgttagagatgactgatgacagggttcttgtttcaccggtgaaggcgaagcagctgaaagtttactttcgtcaaagattcaagaatgtcctgaacctggaggaagctggagctcccaattctgtcactgtgcttcctccatcccccacagacgtggcagctgctgacacggctccatctgagtatcctgtttcagatgttgacgctgtgttggcaactccgtctggaacgttaccttcctccctgtcagatgtggcagcagcacacgcggctccgtcggaggctagtgccttagacgttgatgctgagttggctgctccatctgaggaggacattccagcaacaacacatgctgagttggttgctccatctaaggaccctccagcaacaacacaagattctgtggagatttgtgctcaagagcaattcatcagcagattgtcaaaccagatcacacgcgtattaccaatcccaaaatctgtcagacgtcagtcctctacccccctggcagttccaaggcgcagccgacgtgtggcaggggttggggttgaatttaaaattcaggattggggaaaaaggtataagaaacaagctatggtggctcttaatattattgaggacaatgaaggattcagccgtcaagctttagacgactacgccaagctcttcaagaatactctttctcgtagtcatgtgcaggctcttgctgccctttttgggtggtctgtcccagataatttagaatatatcaatgggactggggatattaccgcagcaagcatattttagctggcggtgttgctgttcttgtttgtcgatttacctctcattgttactacatggatccggaaaaaataattgtttggaatgttagaggtcttaactctctcgacagaattctgtccgtgagctcctcaattgttatggagcggatataatctgtcttcaagaaactaagatggcacaaccttctccgcgtgctctcctctctatgttgggatctgattttaccggttcattggccctgccttctactggttcgaggggtggaatccttattgcttggagacgacatttggggataactggagctaccaggacagacattcatagtatttctgtgcagttttgttcagtggagggacaccagtggtggcttacttgtgtgtatggacctcaatctaatgaagccaagattgaatttctgcaagagctgagacatattagagcagcttgtcagggtccttggatgatttctggggatttcaatctcattttgcatgtcgaggataaaaacaactcgcatattaatcgggctatgatgggtcgattcaaaaaattggtagatgatctcgctcttaaagaaattccactccatgggcgcaagtttacttggtctaatcagcagaatcagcctactcttgtcaaacttgatagagttctgtgctctattgattgggaggagctgtttcctggtgcattgttacaaagtgtggcttctgaagattctgatcactgtcctttattattgggtctcaaagattgcaaaggtgttaaaaggcgcttccattttgaatccttctggacgaagattgaagggtttcacgaagtggtgcacaacgcctggaatttggttcctgttggccactgccctttttccacttttgatttaaaactcaaagggacagccaaagcccttcaaggatggagcagcaagaaggtgggacacattgagactcaactgcatcttgctagagatttgatccatcaacttgagattgcgcaggatggtcgtattttgtctgtgttggaaaggtggctgttaagtaaattgaagaaactcgctctggctttggcctcaaccaagcgtgccattgcccgccttagatcaagaatttcttggctcaaggaaggagatgcaaattctaagctgttccattcctttgcacgttacagaaagaagaatagtgtatccaagcttactgttggaaatcaagtccttactgctcataacgacatagctgcagcagtggatcggttttactttgatttgattggggctagtaaagacagaaatatttcgattaaccttgaggctctggaaactgctggctctccaaatttgctcgagttggacagccccattactgagcaagaagtgtgcaatgctataaattctctgccctctgataaatctcctagaccggtagattttacaaaatttgctggtccattattaaagaggatcttatggctgcggtgattgcgatttggaacaaaaaatttgataattttcatcactctaatcccaaagaaagataatgctgatcaggtcaaagattttagacctatcagccttgttcacagctttgcaaaactaatcacaaagatattggcttctcgattggcttcaagactcaacgatttggtctctccaaaccaaaatgccttcattaagggtcgctttatctaggataatttcatgttggttcagcagacgactaaattacttcatcaacaaaggcatccttgcctgatgatcaagctggatattactaaagcttttgattcggtttcctggcccttccttattgaggtcatgcagaatctagggtttgggcagatctggagagatatcatttcagggctgcttctcacttcctctactcgagtgttagttaatggtcatccgggaagcataatttctcatagaagagggctgcgacaggggggatcctctttctccgatgctgtttgtgcttgtcatggatgtgcttggtcaacttgtctctaaagcagatgaggaaggtttgttacaacctctttctactaggcagcttcaacaccgggtttctctttacgctgatgatgtggttctttttattaatcctgtggcggaggacatgactatggtttcaaacatccttcagctttttggtgaggcttctggtttatataataataatcagaaatctagtgtctaccccatcagatgccatgaagacaatttagagattattcaacagttttggccttgtgaggtatctagctttccttgcaagtaccttgggctgcccctgtcgttacataaattaagaagggagcaggtgcacaacccattgtggataaaatagctaatcaactacctgagtggaaagctgatttgttgactaaagcaggaagaagtgtattggtgcaatctgttttgacaggggtgctgatttatagtgctatggctatagacctgccttctacttctttgaaggacattgataaaattcgaagagggttcctttggcgtggttgtaaaaatgccatgggtggccattgtgcagtggcctggggcagagtgtgcagaccttgagagcttggtggattgggtattttcagcatcactgaactgagttgggcccttaaattgcgttgggcttggctgcaaaaaactgagccaggtcggccctgggcatccctgcctttgcataccccgaaaaaattcgagagtttctacaagtggccttgtattctgagattggaagtggagcttctacccttttctggagtgatcgatggttgggtgggcagcggattgtggatatcgctccccgactttttgagaccattcctaagaagctgattaacaaaaggacagttcaggaggcgatcgaggataatggctggattaatgatattcctgggagtttatctgttggtgcacttgcagacttcctgcgtatttgggatttggtggcccaagttgatctataccccgaaaaggaggacaaacatatttttcggctggctgctaatggcaaatattcgactaaaagctgcttatgaggggctcttcattggatctgtggagtttgaaccttttgagcggatttggaaaacttgggctccgcccaaatgtcgattcttcttgtggctggtggctcacaagaaatgttggacaacagatagacttgagaagcgggggctggatcatccggaaaaatgtcctttttgtgatcaggagagggagacaattgaccatctgcttgtgaattgcgttttctcaagagaatgttggttcctccttctaaggcaattcgggctgcagggtttggccccccaaccaacgaatattaattttatggagtggtggcatcaagcaaatgaagctattcaggggtccttcagagatggcctaaactccctcattattctggacgcttggattttgtggaatcaccggaacagatgcatctttgatggcctttcccataatattgctaatttcctaatccatgttggggatgagcgccgtctgtgggagactgccggggccaaggggttgacctcccttgttgcttccctctctcatgtagcctagagttatatagatgagtcagtctatgttagtatcgtccaggccgccgtaaggcgtcagttgtaccccgatttattttagaccttgtttatttcttcttttaatataatgatacgcagctctcctgcgtgttcgagaaaaaaaagttggagtgtatttccacgcctcatacttggctcccgtatgagagggtaggttgtttgggaaccattcctctataattaatgaatcacagctctcatgcgctttccaaaaaaagaaagtgcggtactacacatgaaatggatttcatcattcttgcaattgagcaagacgatttatgtgaatcttacacgataagagtgataaggtgcgcatgagtgttctttttctttgggggggggctgaggccgttcatgtccattaaggcatgaacaaagcaacaaaaatacatgactgttcaacagggaagaaacgacctacagaacaggagaaggaagaaacatatgggtgctttcaaatgtgtgcgcaaaacatagtttatgttaataacataaatctttacttttcccttggcctagcatcagttgcccactggattagtgcaagtcttagacggtgatccctgtttaaccttctggagtggtgtaactgttccatgtttttgttcatgttcttagcgtgagctatattaggatcttcctatgtttggcaggtcccttgggtttggatagtggatggcagcacaggcttgttgttgccttgtgcgcctccttcctgaaaggactgtttcatattccaatgggcatccttgtctatatgtacttgagccttgctctcattaatctatcaccaattcccctagtccattgtatcaaagattcgagttctacctcgaattttacttctggtcctctagcgcgccggttcttcaccgtgcaacgccatgtccggctccacaccgccatcgcccaagggtgaccctgccaaggagaaggtagccgctgccgccaacctcgtccaacagctcgcctcggccaccatcaccggcgttctgtcggatgacgccaccactcgtcggcccttggaagcggccagcgccaccgctctggagaggcaacatgcctacgccttggccgccgcagaggaagaagcccgtgtcgccgcccttgcgcgtgccgatcgggagcgggccgtcgctaaggtcgtcgccgccgccctcactttgtccgatgaaggcgactcccctgcacctgctagcagatctccacgacgccatgctgctgcaggaggcagccgccctcctcagcctccatgcccaggccatcacgtcaacaacatccggagcctcgtccctatcgtcctcgacatcgactccgtcagcttcaaccgttggcgcgatcaatttttactgaccctctacaagttctctctccaggttcacgtccactttgacgctctggtcccctccccggattgggatcgaatggactgcgtcctcaagtcctggattctcggctccctcaccgacaacctcgccgagaacgtttcccagggtggcactgctcgggacacctggctcgctgtcgagtcctagttctttgggaaccgggagatacacgccatccggcttgagacacggtttcacaacttcatccagggcgaccttcccattgtcgagtactgtcgttgcctcaagatggctgatgacctcaacgccctgggtaaagtcgtctccgaccgcaccctcgtcctcaacgtgatccgggtctcaacgagtgcttcacccacgtcggtgccctccttcgtcgtgctcgacccttccctttcttcctcgacgtcccgcgaggatctcactctggaggagctcaccatgacgaaccaacaaccttctccggccgtcgctctcgccgccaccactgagcccttgcagcagtccccgcagcgatccagattcaactccgtgggggctgccaacgggaacgccaactcgcaccaagcgtggcggtaataatagtggtggacgacaacaacagcagcaccgccccaacggtgggcagcagctgcaggacagtgcacagctgcaattcggtgccaaacctgcggcgcaccagctggtccctggccctctgtctacaatctgtggacagggaccatccacatgtggccaggcgcatgtcctcccttggcgccacctcgtcctcagcagcatgctttcatcgcccaacaacaccttctcctctaacaccaactgagggggttgacccatggctgcgcttgggttctatcaccccatggtcagcctgccctcctaggacacccatttgctagcctctgctttcagcacggagacgctgcagcagcgccgacctccgagtggtacttcgactcgggtgctacttcccacatgacttcttccaacaatgtttcacatacctcttccccgcgggcgactgaaccatctccaacatcagcaccaccgtcatcgcctccatcgtcgctacccaagggtgcaattgatgtccagttagtgaccaacttgcactcgatggcgacacgggccaagctcggcttttgcattccagccctgatccatgctttgcacctctcctcgatgcccaagacctatcatggtggccttgcttacccgagttggcgtgccaccatggaggagcatgctgctcttctggagaatcatacttgggacctcgtacctcgaccatctcatgccaacgtggtgacaggcaaacgggtcttcaagcacaaatttcatgcagacgggacactgaagcggtacaaggcgctttgggttcttcgaggttttacccagcacccaggtgtggatttctcagagacatttagtcctgtggtgaagtcagctacagttcgcacagttctctctctggcactgttccgacaatggcccatgcaccagcttgatgtgaagaatgcttttctgcatggcactctgtccgagacattatactgtgctcagccgttcggatttgaagacccacacatctagattttgtttgctgattgaacaagtccctctacgggttgaaggctcctcgtgcatggttcagtcggtttgccacatacttgctctccattggggttgttgaagccaagtcagacacttcactttttgtcttccatcgtggttctgacactgcctatttgctgctatatgtcgacgacatcatcctcgccgcttcatcgtctgcactcctacgccggactatctcggccctgcagcaggagtttgccatgaaggatctcggtgttctgcatcacttccttggtatgcatgttcaaccctcaagagatggtcttctctctcagaagtagtacatggttgagcttcttgattgcgtagggatgtcagattgcaagccttgtttgacacctgttgacatcaacccgaaggttgcctctgcagatggtgagctggtgaccgacgcttcaggcttccacagtcttgctggtgccctaaaatggctgacattcacccgacctgatattgcctatgctgttcatcaagtttgtcttcacatgcatgctccctgggagccagaccttgctgccttgaagaggattctttgatacattcacgacactcttgatcttggccttctgctacgaccatccacaatgactgatttggtggtttacactgatgctgattgtgctggctgcccggatacgcgcaggtccaccttgggctatgctgcgttccttggtgacaacctgatttccttgtcttccaagcgttagaacactgtctcgaggtctagtgctgaagctgagtatcgaggtggggcgaatggagttgccgaagctatgtggttgcgcctgttactaaccttaggattgacaaatgatgattagtccctaaggactatataatatatatataggcagtagacctgggcctaatggggccttaacacccctcctcaaactcaatgtggaaatggaggatctgaagcattgagtttgatcaagtggaactgatgttgtgctcttgtttgtgctttggtgaagaaatctgctaattgagattctgagggtacatattgaagatcaatagtcttctgctgacaatgagaccgagtaaatgatgcatcaacaccaatgtgtttagtaagttcatgcttcactggatcatgagaaatctgtatagcactcaagttatcacataacagaggtgtaggagtgtcacaagagacaccaagatcagccaatagccagcggagccaaataatttcagcagtggtagtagcaagggcacgaagttcggcttccgcactggaacgagatatggccgcttgcttcttggatttccaagcaataggagaggatccaagaagaatacagtaaccagtagtagaacaacgatcaacaggatcacttgcccaagtggcatcagaatacgcatgtagccgaagggggctatcagaagcatagagtaaacatctggatcgtgtcccacgtaaatatcgaagcacccgaagcaaatgaccataatgaactgaagttggtgtagatacaaattgactcaacatatgaacagcatgagcaatatcaggtctggtgatggtgagataaacaagactacccacaatatgacgatatcgagtggggtctgctagaggtgtcccatccttcggacgaagttttaaatgaatatccattggtgttgcagctgtgcgagtatcagtaattccagagcgatcaagaaggtcttgtatatacttggactgcgacaggtaaaaaccttttggagtctgctgaacttcaatgcccaagaaatagctaagtggacccaaatcagacatctgaaattccttactaagatgctgcttgacatgagaaatatgttctgagttatcgcctgtaatcagcatatcatccacatataatagaagtaaagtgcggccttttggagagacatgaacgaacaatgcaggatcatgttcactagaagaaaaaccagcagctgtgatggcagagatgaatctctcaaaccaagcacgaggagcttgtttcagcccatacaatgcacgacggagacgacaaacgtgccctgatggagtatcaacccccggaggaggatgcatataaacttcttcatgtagatcaccattgagaaaagcattcttaacatccatctgggagatagtccaagaagatgaggctgcaactgcaatcaaggttcgaacagtagtcatatgtgcaacaggtgcaaaagtctcatcataatcaagtccttgagtctgttggaaaccacgagccacaagacgagctttatacctctcaatggaaccatcggattttgttttaactttgaagacccatttacatgtgataggaacaacatgtgagggtaaaggaacaatatcccatgtaccagtgcgttcaagagcagccaattcatcaatcattgctagctgccattcaagaatcccagaagcttcctgataagtagtgggttcaacaattgccacagcagtccgagggaaaccataacgatctggaggttcaatagtaccacgatcacgaagacgatatccctgattaaaaacatcattagactcagagttgttagtacaagactcaggtacaggatcagtatcaggaccggccgtagggatagagcgggaacgacgaatgtaggtttggatgataggtggtttggaagagaaagaggtggatgacgtggaggtggaaggtggtgttatgggaatgagaatatcagatgtggatgtagaagatgatggttcagatggaggaatggaaggaagacacatgaaagaagtagattctgtgggataataggtggagtgagtagactggttgtgaaagaaggggcgattttcattgaaactcacatctctagaaatccgaatacgacgagtagatggatcataacaacgatagcctttgtgttcaggactgtatccaaggaatacacactctacagattgagcagtcaatttagtccgctcacgtggtggtaacaagacatagcatatacatccaaacactcgaagatgatcatatcgtggagaagtcccaaaaagaacttcacccggtgatttaccagaaagttttgatgaaggttgtctattaatgagatacacggcagtggaaacagcttcactccaaaagtgtgaaggcacaaaagaagatatcaaaagagtacgagcactctcaataatatgacaatgtttgcgttcagcaacaccattttgggcatgagcaccaggacaagaaagttgagctagagtaccctctatggtcaatatctggcgaaaatgatcagataggaattcaccaccagaatctgaacgaaaaactttaatagtagcagaaaactgggtgtgaaccatgcgagtgaaggacttgtaaatagaaggcaattccgagcgacgtttcatgaagtaaagccaagtataacgagaatgatcatcaataaaaatgacataatatttatgaccacctttagaaacaaacggagctggaccccaaacatcagagtgaattagatcaaaaggtttagcagaatgggaattactagtaaaatatggaagttgtatttgttttccaagatgacaacctttacaatgaaaactagactcaacatgagtagagcctaaacatcctgactttattagagtagacagacgggatccacataagtgacctagacgatgatgccactgggcgaatgacgtcgtggggcccgaagcagcgagcacatgaggtgtagttgtaggggatgaaggaaggcgcaaggtgtccaagatgtaaaggcgaggcgaagatttacggcgacggccagtcccaatcacatcccctgttttgcgatcctgtacaaaacaagatgagtcatcaaatccaacaaaacaattgtgatcggtaatttgaccaactgatagtagatccatggataattgaggtacaaaaaatatatttgggacagtataagttgaatcagaaagagaacccttgtgggtgacatgacataaagtaccatcagcagtctgaacagaagtaccctcggtgacaggtgtagtagacgtcagccttgacttatcagatgtcacatgaaaggaagctccagaatcaagaacccaagatgatgacaaagcaccagcagatgaagtagcagcaaccgcaactgagcctctagaagatggtcctataccacgaccacgagtagcacgacggacacgaaaatcagccagcttctctggaaacttagcaaaacagttctcagaccgatgagtggtcttttggcagtgttcacaaggcggaaaggaagtgttcctagacctctgagtagcagccaacacactatgagaactcacaccagtaatagaggacatagacttcagacgagtctcttcagcaagcaattcggacaaagcctgagccatggtgagagtatctgaactgtgaaggagccttgcacgaagggaatcaaattcaggtcgaactcccataacaaatctgtaggtaaagaacttgtcaatgaacttgtgggctggacaaggcacagcggtacaagcgggcaccatggaggtcaatgcactcataatccgatcaaaagctgaataatattcatcaatggacatatcatgttgctcaatcacatgagtctgttgcataagggtatgtagaagagcaccactatcctgaacaaatcgatccttcagatgtgaccagatagccttagcagtggtaaatttggacagactcataatcatagttggtttagtgctgttgaccattgcagccattaccttgccatcatttatctgccaagtcttgattgcagcagcattgcttctatcagctgctaaaactggagaatcttcagtcaaatgaaatagtaatccgtgacctcttaatgcagtctggacacaaaaagcccattctggataattctgcccatcaagcacaatattgacaacaatagcgttggtcgacatagtgaatagcaataaaatgctgaagattagcagatctgaaaaaaaactggcttgatggtaccgagagtccgagactgtgcgaagtcacaggacagcagcagatctgacgggggctgctgcagcagatctggccggggctgcagcagcagatctgaccggcgctgcagacagtgcacaggcctgtgtgcggctgatggcacgcaggagtccggacggatccgtgcaggagcctgcggggacagcgcgcaggagactgcagcgacagcaacggcgcagcagacgggcagagatccgcgcagaaagaaggatccgcgtaggggcagagatccgcgcagagtggcggggcagatccacaacggtgcaggcgaccagcgcagatggatgacgcagagcagcggggcggagatccgtgcaggagatggcgccgcagaagccaacggcgcagcgcggagcggagtccgcgcaggagcccgccgcagaagccgacggcgcagcacggggcggagttcgcgcatgagcggcggcaccgggtggccgcgaccagcaggtcgcagcacccgacggcgcatcgcagggcgaagatccgcgcgggccgcaacgcgggacggagatccgcgcagagacggcggcgcccgcgactgcagcggaggatgggtggccgcgacagcaggccgcagcagccgacggcgcagcgcagggcggagatccgcgcgggccgcagcgcgggacggagatccgcgcagggacggcggcgccgcgactgcagcggaggatggggggaccgcgacggcggctgaggatggaaggccgcgacggcggacggcagctgaggatagggaggccgcgacggcggccggcggctgaggatgggaaggccgcgacggcggccggcggctgaggatgggaaggccgcgacggcggctaaaaaattaggaaaaaccctaatcgtaacctgcttgataccatgttactaaccttaggattgacaaatgatgattagtccctaaggactatataatatatatatataggcagtagacctgggcctaatgggccttaacagcgccatctcctcttggaaccccatgtgaccatgtctctctccgtcgcgctactctcgtgtattgcgacaacatcagtgctgtctatatgtcttccaaccccgtccaacatcaacgcaccaagcacatcgagattgatctttacttcgtcagagaacgggttgctgccggtgatcttgtcctgcatgtgccgacgacatcacaatatgcagacatcttcaccaagggcttcccatcttctgtcttcaccgaattcaggaccattctgaacgtgcgctgtggctgacgatctgacttgggggggggggtagcatgagctatattaggcaaagataatgtttggtaggtcccttgggtttgggtagtggatggcagcacaggcttggtaccttgtgcgcctcctccctgtttggttagttgattgtattaggcaaggatcttcctgattggactgtttcctattccagtgggcatccttgcctatatgtgctcgagccttgctctcaataatctatcaccaactcccctagtccactgtctcacacatgtaaatcagagggcttcatggactgtattattttgtactattctttattttctgaatgtgattgttattgttttcagttagttaaatttacctgttttcttctgtcctgctcagaggttgcaacggagtttgca

SEQ ID NO: 934 - DNA, 4683 bp, Zea mays
  Intron number 11 from transcript GRMZM2G006130_T06 (locus GRMZM2G006130) derived from phytozome v7.0 (chr-ID 3; pos 230008705 to 230013387 reverse strand)
aagattgcgggaaaaagttctaccgtggtaaacttatcaactacatttgtatttgcttcctttaaataagttgaaaatgtcttctccacaagtttcgtaaaaaaaagggtcttcagcacagtggcaattatgtacttgatgtctctgtactagcaaagagactttaaactgaacataactcccagtggaagtcgacaaaggaaatacttcacctacatttttttgtacatattaagcctgtttttagttgcatggaatgatagtctttatgtctgttaaacaggtaattacctcaaattctacaatgctataagagaggcctatccagacattcagatgatttcaaactgtgatggttcatctagaccacttgaccatcctgcggatttgtatgatttccatgtaaagtccttactgccaagtctgtttgtttcatttttttctctgccttgattctgtggttctgtctaattattcgatgtcaaggtcagcttgccttctcttaaatttaaacagtgcttctttctcttaggtctatactgattctaagactttgtttaacatgaggagcacatttgacagaacatcacgtagtggacctaaggtaagtctaagtctcattttcacaaggactcttatgagactgccctctttcacgaccagtcatttacatcgatcagggattcctggcattcacttgggagttgggatgttctttgggtagtatataaaaaatgggtcctttgatgctttgcaaaatccttaagagatggagggtacaattctccgaggtgttgtgattctgaataacgatgagcaatactcataaggagcttatgtgacgtgtggttctatttgcatgtttctctgaagaccctgaaactccagtgattttcttgcttatttatgacatcaccagtaccctgtccatacagtaaaaatgttgctgaaatgattcgaacacaggcctttgtgagcgagtacgctgtctggagaagtgacgcgggtagaggcagtcttcttgcttcgttggctgaagctgctttcctcactggtctggagaagaacaggtgatctctccttttggttgcaagttggttgatctgatccttattttcgttggcgggcttggggttctactactaccaaggatagtctttactgtgagttagatgacctttttgcagtgatatcgttcagatggcaagttacgctccactcttcgtgaacgacaatgaccaaacgttagtattcttggttttttttaccctctacttgttcttttcccgttgctctaacgctgcgatgattttgtttcgaacaaaacgagatcaggtggaacccggacgctattgtcttcaactcctggcaacactatggaactcctagctactggatgcagacgattttccgcgagtcaagcggcgccatgattcatccggttaatatcagttcccggtactcgagttcgctggccgcgtctgcgatcacgtggcaggatgcagagaatagcttcctgagagtgaaggcaagtagtagagtctgtcgcatcgcatccgtcctagcctgcgcggctaaaggtgtttcgttctcaagtggcttctgctgtgcaggtcgtgaacttcgggtcggacaccgttaacctcacggtctccacgagcggactcggggccagcgtcaacgcgctgggatcaaccgccaccgtcctcacgtctggcaacgtcatggacgagaactccttcagtaacccgaacaaggtatgcgtaccgatggtccatgcatgcactaagcttgttggtttctgaatggaaggagcgacgtgtggagcttgttctgaaccccaaagcttgctgcttgcaggttgcgccggtgaaaagccagctgagcaacgccgcggagcagatgcaggtcacgctggctcctcactccttcaccgccttcgatctggcgctggctgagcccaagcttgtggcggagatatgatgtgtgtgctgcacattacagtacacaaacagcgcgcggatggcagcaaccagagggtgtggagtgtggtgtgctgttagcgatcttgatcgataaaaaaggctttgtactggtgtaccacgatacaggataacgtactacgtactgttgcttcatgaaataaaaaccacatcaggtttttgcttggtgttggttggtttcctttctcctgtacgtgtttgctttgcatgttcatcaccatctactgtacgggatgatggtacattgatggtgagaacgacagcctcctgtggattaaacaaattgtcgatggatgccttcatggtaaagaactttatcatgaatcacggtatgtggctgtcaatgtttaatgagtatactgaccgcaagtttcttgctgctgccggtacaatgtttccatcacatattgacatattgtaatgcttaagagatgcttaagaggtttcttcgtcttaaaaattatcttgtgttaatggtggctggtgataagtggccagcagccagcttataaggatgagatgatcagtaaccacaatacaaggatggtatggcacccagttcactgctttggtttgtttgatgagtgtaaccaccaattaattgtttctgatggataccctgtgtgtctgaatttatatgttagctatctatttagtgtaccaaatgtattagattcatttatcttgccaaagacctagaaacaaaaacaatctctttctagtgtatggtaattctcactgtgcaaaactttacctgaatatttatagctggttctctctgtacacacagggacatggtttccgcacagaacttatatccatgcttttggatttgaaaccacgattcttgaggtttcctggtatgcactgtgttttcacatttaaaatcaagttcttcatgtttggacatatattacgtgttcatagatgtttcagatatttgatagattccatgcgactactgtaggaggttgttttgtagaaggtgactggctaagaaatgcattcagatggagagaatcaattggtccatgggaagagaggcctggacacttcggggatgtttggcattactggactgatgatgggcttggatattatgagttccttcaggtaccagtttacactgcttcactttatttatttttctttcctatcatgaccccctaagtattatattgaaatctacgtcaaagcttgcggaggacctgggtgctgccccaatatgggtattcaacaatggtaattgttttcagatttgttaaatcttttatcaacacggggcttctaaactgatggaatttctctcttataactcaggaataagccacaatgatgaagttgatactgtagctattgccccttttgtaaaggtatctttttagctccctagttatacctcgagtagactaagcagccttgaaaatttattgatataatgatataaggaccttcatttttttaatgtgttgtactttctcagccatgggtgcaaattaccattgtaaataaatacttagatattataatatcatttgtctttttttttagctacaaaccatatccaagattagaacttattcgttaatacaaatcctgtgtatctgagaaaaaaaaagattaaaactttattgctcagataacagtgagaaccatcacatttttttatcgaacacgcagaagagctgtgtatatttatattaagaagaaagaaataaggaccaaagtaggtcagtatagaagcaccacctcacagtggccacaaacgaagatacagaaaaacattcgttaggaagaactcaactcaacaaccaccacactaaaaaacctaaggaggccagatgacacgcaggcctgaagcacctgccttacaccacacatctgcctcctcgatgtcctgaagaaggcactgcacactcggggacaccccacaccccataaaaaaagcaacacatattatcagttttgaataatgctgaagttttattctcttttagttgtcttcatgaatgctgaaaaagatataacagtagtgggtgaccctttacttttcattcaggtagttcacatgccgagatgacgcttaacttgagttatacgctcacctttaccaagattgtccatgaactaattaattctgtttatatgaatagtaacagactcaataagataccattatctcctattgacttaggtaattcttatacttataattcttctacctttaattttattgaactgtttgttttctacaggatgtattggacagtctggaatttgcaagggggagtgcagattcaacatggggctctgttagggctgcaatggggcaccctgaacctttcctggtcaaacatgtcgcaattggaaatgaagattgcgggaaaaagttctaccgtggtaaacttatcaactacatttgtatttgcttcctttaaataagttgaaaatgtcttctccacaagtttcgtaaaaaaaaaggggtcttcagcacagtggcaattatgtacttgatgtctctgtactagcaaagagactttaaactgaacataactcccagtggaagtcgacaaaggaaatacttcacctacattttttttgtacatattaagcctgcttttagttgcatggaatgatagtctttatgtctgttaaacaggtaattacctcaaattctaca

SEQ ID NO: 935 - DNA, 17387 bp, Zea mays
  Intron number 1 from transcript GRMZM2G055462_T01 (locus G RMZM2G055462) derived from phytozome v7.0 (chr-ID 8; pos 1 16310892 to 116328278)
gggcgccacctcgcagagatacggtgtaggctcgcgaatccctctacttgctcccgtgcgagaccttccttttcctcccgcgcgcgaggacccaaaaacgaagaaacgatcccttaccgacgcgacggagggggacgggcgaagcagaaggagcgaaggtggtggtggggaacggagatgtttttcgatcccaattcgttgtccgtcttctcctttttcggttcgcagtttgatgggggaatatggacggtggtgcggaggcgtcgcgcggtgccacccgtcgtctatcctcacaccgcatcgggctatgctggtccgagtaggaaatgtttcggcatcgacctagattttcccgattaaattataatttaaaatatatatcttttttcttaattaaaatataatcggatataagaaatcattatctctactaattattaagaaggtaacgtaggccattcatgtgcccccgtctcctcctctgcttcagtgtcagttgcgtgtgccctcgcctgtcctgctcccgtctcccgatgtcgtccgcgacagccgccctgctcccttcgtcacgtgccgcgtccgccgtgatagggatccgagaacacccccgtggatgtgtctgagatttgaggcctcccccatcccttccccttcccttcccccatccccatcggcgatgcccggatccgcgactgccgccgtccaaccccagcctccgtctgtgaccgctctgtggtggctgaaagtcgcctagagggggtggatagacgaaacctgaaaattaaaactttatcccccaactagatcccttgattagtggttaaaacaaaatatacaattatcggagtaaaaactaaatccttgcttgtaaagagtattgctttcaaataatgcggaattgataaatcaatactactaataagtctatgagaataaatcacgaggacttagataagaagagtaataacacaagttctttcttgcaagatgttgcttcactaaatgagaatttaacttaaagcaacaccaaatagtattagcaaagaatagtgcaagaaaaacttagaaagggaaagatcaaacaaatcacaagcaataagcacacaagacacgagtgatttgttttaccgaggttcggccctcgaaggcctaatccccgttgaggagtccactaaggacgagtctttttcaaccctttctctctctccaccgatcactcaagatcggcgagctcttcttcttctcaaggatcacttaagaccccgcaaggaccaccacactctttggtgtctcttgctagcttttacaagcctccaaaactttggaggaagttcaatgggagtcaaaactccacgcacaaatgaacacaaagatgtagcacacactatctctcaaagaatctcacaaggcactagtgctgaactcaaatgagtagctctctcttgcttgctttctcttttgtggcacttgtgatgtttgtagtggtctaaatcttgtgtataggatggatcaatgaatatatgtgtcggcgtttcgagaccggggggtccctaggccgacgagtgaaatgtcgccgcgtgccccagcccagatgggtcggcgcgagacggagcacgaagggggaaccaaaggagggagacatgcaaaaaggggaaacccgcggccttcgtgttgtcctgcgcccaggtcgggtgcgcttgcagtagggggttatgtaaggaaaatggaccccgggccatttggctaattgagttttggtgtttgatgaacaacacaatccgtgaactaataagttttctagtgtttgtgtttgtagttcacaggatgcgaagagaattggaccaaggcaatgaggatgcaacacctcaaaagaagacataaaaagatacataggagtccaatactcaagaacaaagaagcccgaagaaatcagcgaagaaatccaagatgagggctgtcagcagcgcctggtggcgcaccggacattggtgtccggtgtgcaccggactgtccggtgaggcaccggacagtctgcgcagagaggccacagacaggcgctctctggctgtagcaccggactgtccggtgtgtcacgggcagacgacaacggtcggatccaacggtcgactgctacaggcaccaacggtcggctgacgtggtgtgcaccggacatccactgtgcagtgtccggtggtgcaccggactgtccggtgcacccgacgacagaaagctgctgctttctgtccaacggctagtttggggtgtggaggctataaataccaccccaaccggccattctcaagtgtgagagcccaagcaacataccaagacacatagtgcatatttccaagagctcaaacacccaagtgcttaatagaatcactcgatgattagcgtaggtgctttgcgaagtgcttaggttagttagaccgctttagcgcttgctttaggtgaaccctagattgttgagtgagtttagacaaacctcacaacccctcggctcttgcgtgtgtcgttgtaattgtaccgagtggggcgagagtcttgcgagaccgtgacaaccgcgtttgtgtcacggccgccaccgtgtaccggagggaacgaggcccgcggcgtttcgaccggaagctcgatagtggagacggcggggagcgtccgagaggagccggaagcggagcaccacttgcgcgtggagaaagcctgcggctctctacggagttactcgatcgaggtgcttggccctcgcgtgggcttccctttgcgtaggggcaccaacgaggattattcgggaccttgcgcggttccggatacctcggtaaaaataccggcgtcatccacgagagtttgcttctctactttgctctttaagtttccgcatttatattaaacatttaagtttcaatcttgtattcatacttatctagtgtagattgaaacttagcctttgcggtagagatagcaacacttagacaaaacctaatttgcacattctagtttgattattggcataggttttgctctagggatttaattgtggcctagtttagtaaaagttttagaagtcctaattcaccccccctcttaggcgtcacccgtttccttcaattggtatcagagcctggttttggctcatttgaaacgctttagcttcaccgctaaaagagccgacactttttagaggaagggatggatacccataggccaccatactttgacggcactaacttcccttattatagtgctagaatggcttgttacctagaggccgttgatctaggtgtttggagagtcactcgtgacgggatgaaacccctcaagaatcccgagaaacccaccacgagtgaagaaaaagaaattcatttaaatgctagagccaaaaattgcttgtatgaatctcttagcatggatatttttaatcaagtatttacattgaaaactgccaatgagatttggctaaaattgcatgagctccatgacggcacatccaatgtccatgagcaaaaacattgcctagtcttaaatgagtataattcttttgctatgaaagatgatgagcttgttagagacatgtattctcgtttgaatctaattatcaatgagctcaattctattggcattaataagctaggtgatgcggatattgtgaggaagattatctccctgctaccacaacgaagatatgggagcatcatcactatccttcacaacatggaggacttgggtaacatgaccccggccattgtgattggaaaaatcgcggcctttgagatgtcgcgaaaaatgtgtcggggagaggagccaacctcctcaaggccatatgcttttgcatgtgatgaaaggaagggcaaaaagaaggctcccactccaagttcctcaagtgaagaagaggaagaggaagaaagtgatgatgatgaagataatcaaccatgcacatcatcctccaaggacgaagaaacaatccgacgcgtcggaaaggtaatggggatgattcacaagattaatataatgggtgtacctctgcaggtagaggatcttctctttaacattgacagaaaaaagcaaagaaagagaggatgcttcgtatgcggggaaaagggccacttcagggacagctgtccaactatggccgaacccaaaaaggggaggaacaaaggcaaggcgctaacaagtgtcaaaacttgggatgattcttcaagcgaagatgaaccaccaaggacacgcagccaccgatcctcatcacgctcatcacggtcatcacacaaattccttatggcaagaggtaacaaaagcattccatcctctagtgatgaaagtagtagtgatgatgaaggtgagggaaagccctccatagatgagcttgcaaaagccgttgaatttttttaggatgtttgcactaaacaaaaagctcaacttaaaaccttgaaaaataagttgattagctctcaaaataattacaaaggtttgctagaaaaatttgaaacttttgcaaacttaaatagtgagctatcaactaaaattgagctattagagtctagtgctccatccactgctaccgatgatagcgttattaaaaagaatgaaaaacttaaggctaagttagctagctcccaagaagctattgaaaatttgctagagaaaatggaaattcttagcatacacaataatgagctaactactaagctagaaaacattggtagcaccccagtagcatctttagttgaaatacctgaaataattaagaaagatgcttctacttcctgctttgatttaattgatgattctaacccctgcaaccaagtctttgttgagaatattgttgtagagacatgttcggatgaggttgcaaaggaaaatgaacaattaaagcaagaagtggctcgccttggcaaggctttgtatgacaagaaaggcaaagccaaacaaatccgacctccacaggataacaccactgcgggagtgaacaagcctgtagagggagaaactgtgatttgtagactatgtcacaaggaaggccataagtctttccaatgcaaggcgatgaccgaggataagcaaaggcaaaagctcaagcaaaagctcaagcaaaagccatcaagcaaaatctccaacacctacatcaaaaaggttgacaaaaaggctgctacaccatatttgatcaagaagaaaaagaatggaaaggtgatagcaatcaaggccaacaagcaagccaacaaaggaaagggggccaaacgcatctgggtgccaaaggaaataatttcaattatgaaaagcaccaagaaggtttggatcccgaaagggaagtgagtggtccgaaggacaacgggaaatttggagacttggcaaattcgggatgtatatcatgggatacatcatattggatcaagtttattgccaagtaggttagtgaaaatttttggacccaaatttcccacccatgactaaggtaactaaatttattgtatctcttgtttttagatatgcgtatctatttaccttgtatctagtttacctttcttgcctagtattacatttgttatttacctttgttttaaattatgcatactaggtgaatcatatggtaggattgcttgttttcaattcatacacttaagcaaacctatatggcttaaaatatttatttaagcacgacacataacttctatatcactccatagtaaatgatgcatcaattgaaaattttgatttctacaagttgtatcatttaacttatatgtgccaaagtttggattatagataatttgcccctcttgatatcaaatcaaagtgcatgtctccaacaagtattcaaaactcgtatgcacatcttcagggggaggttactctataatctaatactttgagactaacaccttttcaagtctatttcatgtaatagtctcattgtaaggaaaatgaggtccccggagaaagacaacgatcttccactgcaaaatctccaagaactctcatgtctctcaagctcgccattgaatttcaatcggtatcttttgagactacatctagtatcatttacatgtcttctccaatatttgattagactatatttcatatcatatacttccatgttgctaaaaatgcataagtggttaactcatattatgttacatatgcataagggaagttagtcttttcaaatcatattttgcacctctatttctcacatgctttttcctaagtagaagatctctatcagggggagcttttcttcatctctaaagggggagaaaaactctttctaaaggagaatactcatttagggggagtaatcttttgaggacaagcttttatttacttcctacatgcttttaatgtcttccttttcggtggttgatgccaaaggggggaagtttagggaccaaagcaatgaaaactatatcaaacaccaaacaccacaaatttaaaattttatatctacaaatggtatttcaagtggttttggttatttggtcctaaaataggaagtaagtgaattatggagttagggggaggcttaagtccataatatcacattgtggggacaatcatgcatcttagcaagtaaaatgcatattttcattcaaatacttgtattatttgcttgctttggttgtgttgtcatcaatcaccaaaaagggggagattgtaaggaaaatggaccccgggccatgtggctaattgagttttggtgtttgatgaacaacacaatccgtgaactaataagttttctagtgtttgtgtttgtagttcacaggatgcgaagagaattggaccaaggcaatgaggatgcaacacctcaaaagaagacataaaaagatacataggagtccaatactcaagaacaaagaagcccgaagaaatcagcgaagaaatccaagatgagggctgtcagccagcgcctggtggcgcaccggacattggtgtccggtgaggcaccggacagtctgcgcagagaggccacagacatgcgctctctggctgtagcaccggactgtccggtgtgcaccggactgtccggtgtgtcacgggcagacggcaacggtcggatccaacggtcgactgctacaggcaccaacggtcggctgacgtggtgtgcaccggacatccactgtgcagtgtccggtgcacccgacgatagaaagctgctgctttctgtccaacgactagtttggggtgtggaggctataaataccaccccaaccggccattctcaagtgtgagagcccaagcaacataccaagacacatagtgcatatttccaagagctcaaacacccaagtgcttaatagaatcactcggtgattagcgtaggtgctttgcgaagtgcttaggttagttagaccgctttagcgcttgctttaggtgaaccctagattgttgagtgagtttagacaaacctcacaacccctcgactcttgcgtgtgtcgttgtaattgtaccgagtggggcgagagtcttgcgagaccgtgacaaccgcgtttgtgtcacggccgccaccgtgtaccggagggaacgaggcccgcggcgtttcgaccggaagctcgatagtggagacggcggggagcgtccgagaggagccggaagcggagcaccacttgcgcgtggagaaagcccgcggctctctacggagttactcgaccgaggtgcttggccctcgcgtgggcttccctttgcgtaggggcaccaacgaggattagtcgggaccttgcgcggttccggatacctcggtaaaaataccggcgtcatccacgagagtttgcttctctactttgctctttaagtttccgcatttatattaagcatttaagtttcaatcttgtattcatacttatctagtgtagattgaaacttagcctttgcggtagagataacaacacttagacaaaacctagtttgcacattctagtttgattattggcataggttttgctctagggatttaattgtggcctagtttagtaaaagttttagaagtcctaattcaccccccccccctcttaggcgtcacccatttccttcaggttacaagtgtccgcgtgggagagagcgagggactctacgcgtcgccctgtcctcccgtgcggccaaccctctgtaagagggccctggtccttccttttataggcgtaaggagaggatccaggtgtacaatgggggtgtagcagagtgctaacgtgtctaacggaggagagctagcgccctaagtacacgccatcgtggcggccggagaggttttggcacccggttcgtgtggtgtcatggccgtcggaggagcattggagcctggcggaaggacagctgtcggggctgtcgagtccttgctgacgtcctcttgcttccgtaagggggctgagagccgccatcgtcatagggcgtgcggggcgccatcattacttgtctggcggagcgagccagatgggacgccggtcttgttccccgtagcctgagtcagcttggggtagggaaatgatggcgcctcccgttgacgtggtcggtccgcgccctaggttgggcgatgtggaggctcctccgaggtcgaggtcgagtctgtcttccgtggccgaggtcgagtccgggcccctgggtcgggcgaggcggagaccgtcggctgaagccagggctgagtccgagccctagggtcgggcgaagcggagttcgtcgtcttccggggctgagcccgagtccgagccctaggttggggtgggagcgtagttcgccgtcttccggggctgagcccaagtccgagccctaggtcgggcggagcggagttcgtcgtcttctagggctgagcccgagtccgagccctgggtcgagcggagcggagttcgccgtcttccagggctgagcccaagtccgagccctgggtcgaggcggagcggagttcgccgtcttccggggctgagcccaagtccgagccctgggtcaggcggagcggagttcgccgtcttccggggctgaacccaagtccgagccctgggacgggcggagcggagttcgccgtcttccggggctgagcccgagtccgagccctgagtcgggtgaagcggagcttcctatggtgcttgaggccaggcctgactgcctgtcggcctcactctgtcgagtggcgcagcagtcggagcggcgcaggcggcgctgtccttctgttaggctggtcagtggagcggcgaagtgactgcggtcacttcggctctgtcgactgaagggcgcgcgtcaggataaaggtgtcaggccacctttgtattaaatgctcctgcgatttggtcggttggcgcggcgatttggtcagggttgcttcttggcgaagacagggcctcgggcgagccggaagtatgttcgtcgctggaggggggcctcgggcgagacggatatcctccggggtcggctgccctggcccgaggctgggctcgggcgaggcgtgatcgagtccctcgaatggaccgatccctgacttagtcgcacccatcaggcctttgcagctttgtgctgatgggggttaccagctgagaattaggagccttgagggtacccctcattatggtccccgacaatatgtggttgggagggcttgagtatgtcaactagatgacttagaatgctgcttgggctcccactccttgaagtggccagttggggtggtatttatagccaccaaccaaaatctagccattggtgaagtctgctggcgaagggcgcaacacgtcatcctatccgttagggttggagctggtcgaccgttggaagctttgtcctcatgtggcaccggacagtccggtggcacaccggacagtccggtgcccctctgactcgctgctctgacatctgaattccactgttcactttgcagagtcgaccgttgcgcgtagatagccgttgctccgctggtgcaccggacagcccggtggtgcaccggacagtccggtgaattatagcggagctgcgcctgggaaacccgaaggtgaagagttcgagctgaagcaccctggtgcaccggacactgtccggtggcacaccggactgtccggtgcgccagaccagggcagcctttggtttcctttatgctcctttcttttgagacctaacttgatcttttgattggtttgtgttgaaactttggcacctatagaatatataatcttgaacaaactagttagtccaattatttgtgttggacaattcaaccaccaaaattaaataggaaaaggtttgaccctatttccctttcaatctccccctttttggtgattgatgccaacacaaaccaaagcaaatatataagtgcataattgaactagtttgcataatatatgtgcaaaggttgcttggaattaaaccaatctgtatttcataagatatgcatggatgctttctttatatttaatgttttagaccatgcttgcaccaattgttttgtttttgcaaactcttttggaaattcttttcaaagtgttttgcaaaataatcaaagaataaatgaataagattttgagaagcgttttcaagatttgaaattttctccccctgtttcaaatgcttttcctttgactaaacaaaactcccccttaataaaatcctcctcttagtgttcaagagggttttaagatatatttttgaaaatactactttctttcccttttgaacataataagataccaatttgaaaaactctttttaaaatagggtgatggtgcggtccttttgctttgggctaatactttctccccctttggcatgaatcgccaaaaacgaatactttgagtgaaatataagcccttatactttctctccccctttggcaaataatatatgagtgaagattataccaaatttggagggctggcggaataccggcaaggaaggataatcccaatggcgttgagtggaagcgatgtctttgccgaatactccatttccctttcaatctaagacttaatacatgagatgctcatgaaaacatattagtcttagccttggcacaaagagagataagaaatatgcaaatataccaaaggaaagagacatgattaaaaggatatgtcaattaagcttaaacaattctatataatatagattgctccccctaagtatgtgctttgagaggaatataaatttttggtcttaaacgccaagtgcacataattaggttaatgagatcatgtctatatcatagagaatgtgaagtgcattgtgtcatagtataggtgtgatgctcatgacagtttatgcacttatgaaagcatgttatctcaagcatttacccttaaggatttcaaagaggcttaaggaccatccacctttggaacaaaggcagcttatcctcgttacaaggttaagctttaagctctttgacaataaaattatttcacccagtttaaacaaagatgtaagaatgaatgtttgagaagttaaactaggtatgaagtagagttaatgcatgaacatgctttctcttccttttatacaagatatgcaaggaatgtaggaagatttaggtacatgtatgaatgagattgaggagttttacccttttgtacctttacatagtgatgctctcttcattgtgctttgtccttagtcttattgaattcgcctaagacctatactcaagacaatgtatggaaatattttgcacaagagagagttctacaactagtgatccttttctaagtcattgttttagatatcaagtaaatcacaaattgcataaatatctcatgaattctccttttaacttagtgcatatcaagatagatgtcgattgaaattaccaattgaaatcaaattgaaattacatgaggcactaagaagcataagtgataattgaagttattcaatgatcaaacaacagatgcgatcaaaagaacaacataggcattagattttcaaacaagctcaaaaataggagaatccaataaatatgctactttaacattgaaagctacaatccttgataaaggtgacattattttaccaagttggattgaaatgtagtagcatgccttatgagaagcttgttctcatacaagagactatatgagattactaagataacgtgctagtctcaatataatcaagatatagaaataggctcccccgcatcaagaatgaaataaatgggtggatgcactcatttttaaaggcaaatagggagaagcacttttatctttgatcaaggcttaaaagatttgcaatacaatttatgcctagtattctcacaatgaaaagatttagaatgcttacaaccacaccattgaatgttttgaagatctcattatccaagtaggtgttgttgctcttgatgtcttcctttttcatttgagtgtcctcccttcatagttgactctttttcctttccaaacttattgaaaatactcaaaagagatgttagtagctcaagggaacatatgatgaaggatgacttcttagataagaaataaacacatttcatcatccaaaattcacatatacttgaagtaaattccttaatgttagcgcacatctttaggaaagaggaatatgcaccctttaaacattttgatcaatcatagaaaatttacttcttcatattgaatttattgatcattatttagaagcaaatcaatatgagaatatgtatagcaaaggcatgaaatagattctaatggacaagtgcattttgtgagaatgagattgaatgctcatctagtcgactttggtccaataaagaatctattcttcacaaaggcagaatatgataaattagagtaagcaaccattgatgggaactatatttgattgagaagatgagttctcatacctttgcttttaccttccttcctttgggtgaagagcaaccctttgaggcttgtggctttaacttactttcttgtagattttcataagtaagctcaagagatatgttattagtaatacaagcactagtttccctttgagaaattcattttgataaggaatggaaaatagaccactgaagcatggaaactttataatatgaactaggttattccatggtgtatgcttatttttgcttacaaaaacaagcatagatgattctttaagattatggaataaatctaattcataacatggagagcgatagatgtagaagaatcacatccaatataagcatgaagcaaaacagcataaatcattggattgacttttctttttatgttaaattacgcatctccaaagagaaacatattctctactagtgagactacatgggttacttagataagagcattagtctcactattctagtcatagagagaatttcccttttataagtgtcataaggatttgaattctttacatgacaccctattcttttaggaacttggaatatctctctatatctagaatcatggcaataataagataataagtgtaaaacatgccatgagttgctcaataatttaaaacatgtagattgccatagtatagaaatgatgaatgtacaatctaccatatgagaggaatttcttcaaagaatgatgtcatgatttttaaaaacatttgaagtgctttctttttctatgtgactacacaagacacataagaaatgataatttaagatatttgcacttagaagtataattgttaccatcctttggctttcctccatgttgtaggccttgatttttcggcatgggattaattctttatttcctacaacgttagtatcttccggagatgatatgagttttagatataacaattcaaaaataaccttgggtcaatcttggatataggtcattgaagattgatagcttgagttaaataaaaattgaattgactttctcaagcactccaaagcttcatatcatcttcttttcctgaaaagcttgtcaagcatattttggtacccatcgcttgatgggtccatcatggttagtcaacaaaaatctaggaacccaagagtcctttgtgttagcacttggtaaactcattacctttctaacacaagttgcaattttgggttgcctagttacatgagaattaattgacaagctaggagtgggatttttaccaatgggacaatctttgcattgatgtcccttctttcggcatatgtagcataggtgatcctcaagtcttgaagatttcttctttatttgtttctttcttgctacatggttagtgaatattttcttttctaacactatgcccttttgtttcaaatggggacaagacctaaacaagtgtcccttcttggagcatttaaaacaaagtttatcatccttgttaataatcaagtcatttttaatatagggacatgacctaatcaagtgccctttttcaaagcattcactacacttcttacttctcttagtgtgaagtgtgacttgattattaccttggatgttaccttttatggaggcatggttgaggcttttgtaagaggtattgattttcttcttttgtttcctcctcttggcaatccttgagtccttgacattttcttcaagggatttagtgcattccacggttgttcccatctcaagcttcttcaccatgtgatcacggttatcttgagaaggttgagcaatgcacttcccttttagttgtgtcaatctcatttttagcctctcattttcttctttgagcttttgatatgtatcatcgtttgttcctgcaaattctagctcaaaggaagatttgcttgtcgacggacaacaagcattagcacatggtagtatagtttcaatttgaatacatgtgcatgagtgaggttgttgtgattttaagttttctatcacaacctcatgagcaatatttaatatgatatgattatccataaaattttcatgagagcataggagcatatcatatttttcttgaaaagctagattttcaacttttagcttttctacttggtccttaagcaaggtattcctatttactaatgtaaagcgttatcttgctcaattgaaacagtttcatacctttggaccaaatcaacatgagagcactttagctcctcatgttctttagtcaactcgtcaaagtgtagcattttcatggagagaacatcttctagtctttgacgagcttcgctttgctctctcgctctttctagaagtttgagcatgaccgccttatctttttggcttaggcgagcatagagatgcaagaagcttctttcttcctcctcatcctcatttgtccttccgccatcattttcattagccacacaacatatgtgggaatcgaaatgggaagacaaaccttttggagaggtggattcatcgtttggtctccatcattcattttcttcttcttccttgcaagggttagtatcacaaataccaaaggaagtagaggcacaaaatgaactatcatgtttggactcatcaaatttagttttaattatagtccaaatatcatgcgcatcacgaatagattcattataattcattatgaaggcatgataatcttctttgctaagagaattacttaagatgtcataagctagatagtttaagcgtatacatctttgatcttcctcggaagtatttttcctatcataactaagaggaataatacttttgtctaagatttgttctaattgtggatctacggttctaaaagcatttatcactctagaagaccatgaatcataattagaacaatcggaaagtaatatctcaagagttacctccgtgttctccttcggagttgtcttcttgttcttttgggatcttctacgagccatcacttcgagttgttagactcaatatgaagtgcctagctttgataccaattgaaagtcgcctagaggggggtggataggcgaaacctgaaaattaaaactttatcccccaactagatcccttgattagtggttaaaacaaaatatacaattatcggagtaaaaactaagtccttgcttgtaaagagtattgctttcaaataatttggaattgataaatcaatactactaataagtctatgagaataaatcacgaggacttagataagaagagtaataacacaagttctttcttgcaagatgttgcttcactaagtgagaatttaacttaaagcaacaccaaatagtattagcaaagaatagtgcaagaaaaacttagaaagggaaagatcaaataaatcacaagcaataagcacacaagacacgggtgatttgttttaccgaggttcggccctcgaaggcctaatccccgttgaggagtccactaaggacgggtctttttcaaccctttccctctctccaccgatcactcaagatcggcgagctcttcttcttctcaaggatcacttaagaccccgcaaggaccaccacactctttggtgtctcttgctagcttttacaagcctccaaaactttggaggaagttcaatgggagtcaaaactccacgcacaaatgaacacaaagatgtagcacacactatctctcaaagaatctcacaaggcactagtgctgaactcaaatgagtagctctctcttgcttgctttctcttttgtggcacttgtaatgtttgtagtggtctaaatcttgtgtgtaggaaggatcaatgaatatatgtggttgggagggcttgagtatgtcaactagatgacttggaatgctgcttgggctcccactccttgaagtggccggttggggtggtatttatagccaccaaccaaaatctagctgttggtgaagtctgctggtgaagggcgcaccggacagtccggtgcgccaccggacaatgtccggtgcgctgccacgtcatcctatccgttagggttggagctggtcgaccgttggaggctttgtcctcatgtggcaccggccagtccggtggcacaccggacagtccagtgccccactgactcgctgctctgacatctgaattccactgttcactttgcagagtcgaccgttgcgcgcagatagccgttgctccgctggtgcaccagacagtccggtggtgcaccagacagtccggtggtgcaccggacagtccggtgaattatagcggagatgcgcctgggaaacccgaaggtgaagagtttgagctgaagcaccctggtgcaccggacactgtccggtgcgccagaccaaggcagtctttggtttcctttatgctcctttcttttgagacctaacttgatcttttgattggtttgtgttgaacctttggcacctgtagaatatataatcttgaacaaactagttagtccaattatttgtgttgggcaattcaaccaccaaaattaaataggaaaaggtttgaccctatttccctttcagtggcgcaggcgctggaggcatccacaggaccgcatatttcatggcgtcgtggactggtggcgcgacatcaacgagtcgccactgtggcaggaccgcatatttcacgcgctcgccgtgctctacaa

SEQ ID NO: 936 - DNA, 16106 bp, Zea mays
  Intron number 4 from transcript GRMZM2G435248_T01 (locus G RMZM2G435248) derived from phytozome v7.0 (chr-ID 2; pos 1 23922716 to 123938821)
ttgtgagtggaacattcatgtttgtttgcctttaattccattttactgtaagattaatgatagcatttgttggattaatgtgggcttggcccaaattaatattcaataatagtcaatgctaatggcccactttaatgctatggtgtactaattatttagtaccatattggaagttcaaaggacaaatcaatcaacttaaataggtggaccattggtgcatctattgagaagttgagaaaaggatgaaggactgccacacgcgcgcgcgcgccgccgccgccgccggccgggccgtggccgtggctcgtggctcatggctcgtggtagatcggaccttggtccgaatattcctttcaaacggttgcgcattttgcctggagcgatgaccgtcatgataaccgtccgtttcctgtcttatggctagtaacggacgtcagttactgtcgtcagtttccagttctaatgcgcgaccgtttctgtccgttgttcttctccctccttctgaccgcctataagaatggagagggagggctcttccagttacgcgaattatctcacgcgaattgcaaacaacacattcccgtcccatcttctgcgagcacagagagagtgggagagcaggcctccgaaatcaccgaccgcagagatacacttgcacgggtgtgcgggcgatcagatttttggggagcgtcttcgcgactgctcgcgtgatctgtttgtccagttcgtcgccttcccgagttgacgcgtgctgctgttcttcttcccgacgaccgttcgagggactgcacagcgtacatcttcctgcaccgacttcgtacggctacatcgaacaaacacacgagatgtctcgtgtgaatggagccactgatgccttgagcatcggtccctccgctgggtacactctgttcttcgtatttgtgcatgtttcattgctgtttactgcttatgcgagtagttatacacacatgcacatacatgtcatcacatatatcgcactgtttttctggattaaattaaaactaaaaatgcctaactttctaacaatccaaaaatctgatattaggcatttttctgttagtggttttgctgctgcgttaaaaccaagtgaaccttttgatgggacgttttacaagagatggcgtagtaagatgatactgtggttgaccgcaatgaactgctatcacgccgcacaggggaaacccgaacagttcactcctgaagaggagagaatgttggacgttgccgataacctgtttcgaggcgccgtgattggcgctcttgccaacaagtatgttgattcttatctaacgtgcacatctgcaaaagagttatgggatgcattagatgagaagtttggtgtttctgatgctggtagcgagctgtacatcatggagcagctatttgactataagatggtggaaaaccgtcctgtagttgaacaggctcatgaaatacaggcactggctaaagaactcgaacaattcccatgtgtcttgcctgacaagttcgtggccgacggtattatcgctaaactgccaccttcttggacggactttgctaccactctaaaacataagagacaagagtttagcgtggctgagcttattggttctcttgatgttgaggagagggcgagagcaaaagacactcgtggaaaaggagttgagacttctagtgccaatatggtacaaaagaagaactccaatgtgaaagggaattaggctttcacctagtccctaattaattttggtggttgaattgcccaacacaaacacttggactatctaagtttgcccaagtgtatagattacacaggtgtaaaaggttcacactcagccaataaatagaccaagttttggattcaacaaaggagcaaagtgggaaccgaaggccctctggtccgagagcaccggactgtccggtgtacaccggacagtgtccggtgcaccaccggacagtgtccggtgcaccagaggactccagctcaaactcgtcaccttcgggaatttccagaggcactcgcgctataattcaccggactgtccggtgtacaccggacagtgtccggtgcgccaaggaagagcggcctcaggaactcgccagcttcgggaaactccaacggctagtccactataattcaccggactgtccggtgcaactccggagcaacggctacctccgcgccaacggctacctgcggcgcattaaatgcgcgcgcagcgcgcgcagaagtcaggcgcgcccatactggcacaccggacaaggaacagtgcatgtccggtgtgcaccggacacccaggcgggcccacaagtcagaagctccaacggtcagaatccaacggcagtgatgacgtggcagggggcaccggactgtccggtgtgcaccggactgtccggtgcgccatcgcgcagacagcctcccaacggccacttttggtggttggggctataaataccccaaccaccccaccattcattgcatccaagttttccacttcccaactactacaagagctctagcattcaattctagacacaccaaagagatcaaatcctctccaaactccacacaacgccatagtgattagagagagtgatttgcttgtgttctttcgagctcttgcgcttggattgctttcttctttcttgatcctttctttgcaatcaaactcacttgtaattgaggcaagagacaccaaacttgtggtggtccttgtgggaactttgtgttccgagtgattgagaagagaaagctcactcgatccgtggatcgtttgagagagggaagggctgaaagagacccggcctttgtggcctcctcaacggggagtaggtttgcaagaacccgaacctcggtaaaacaaatctccgtgtctcacttgcttattcgcttgggatttgttttgcgcctctctcgcggactcgtttctttattactaacgctaacccggcttgtagttgtgtttatatttgtaaatttcagtttcgccctattcaccccccctctaggcgactatcaattggtatcaaagcccggtgcttcattagagcctaatcgctcaaagtgatgtcgggagatcacgccaagaaggagatggagaccggcgaaaagcccactacaagccacgggagcacttcatcggaagagtcccgcaccaaaaggagggagaagaagaagatctcctccaacaaagggaaggagaagaaatcttcttctcaccacaaagagaagaaggaaaaatcttcttcccacaagccgcatcggagtggggacaagcaaaagaggatgaggaaagtggtctactacgagaccgacacttcatcaacatcgacctcttactccgatgcgccctccgtaacttctaaacgccaagagcgtaagaagtttagtaagatccccctacactaccctcgcatttctaaacatgcacctttactttccgtcccattaggcaaaccaccaacttttgatggtgaagattatgctaggtggagtgatttaatgcgatttcatctaacctcactccacaaaagtatatgggatgttgttgagtttggtgcacaggtaccatctgtaggggataaggattattatgaggatgaggtggcccaaatcgagcacttcaactcacaagcaacaacgatactcctcgcctctttaagtagagaggagtataacaaagttcaagggttgaacagcgccaaggaggtttgggatgtgctcaaaaccgcgcacgagggagatgagctcacaaagatcaccaagcgggaaacgatcgagggggagctcggtcggttccggcttcgcaaaggggaggagccacaacacatgtacaaccggctcaagaccttggtgaaccaagtgcgcaacctcgggagcgtaaagtgggacgaccacgaaatggttaaggttattctaagatctcttattttccttaaccctactcaagttcaattaattcgtggtaatccaagatatactaaaatgacccccgaggaagtaatcgggcattttgtaagttttgagtgcatgatcgaaggctcgaggaagatcaacgagcttgatgatccatctacatccgaagctcaacccgtcgcattcaaggcaacggaggaaaagaaggaggaggctacaccaagtcgtcaaccaatagacgcctccaagctcgacaatgaggaagatggcgcttgtcatcaaaaagcttcccgccaaaatcctcaagcaaaggagggggaaagactacaagtcccgctccaagaaaggtttgctacaaaatgtggtaaagcccggtcattttattgctaaatgtcctatatcaagtgacagtgccgaggcgacgacaagaaggggagaagaaaggagaagaagagatactacaagaagaagggcggcgatgcccatgtttgtcgggagtgggattccgatgaaagctcaagcgactcctccgacgacgaggacgccgccaacatcgccgtcaccaaagggcttctcttccccaacgtcggccacaagtgcctcatggcaaaggacggcaaaaggaagaaggtaaaatcaagatcctccactaaatatgaaacctctagtgatgaaaatgctagtgatgaggaggataatttacgtaccctttttgccaacctcaacatgcaacaaaaggaaaaacttaatgaattaattagtgccatccatgaaaaggatgatctcttggacacccaagaggacttccttattaaagaaaataagaagcatgttaaggttaaaaatgcttacgctctagaagtagaaaaatgtcaaaaactatctagtgagctaagcacttgccatgagatgattgacaaccttaaacatgaaaatgctagtttaaatgctaaggttgattcacatgtttgtagtgtttcaattcccaatcctagagataataatgatgatttgcttgctaggattgaagaattgaacatttctcttgctagccttagagtagaaaatgaaaatttaattgctaaggctaaagaactagatgtttgcaatgctaccatttccaatctaagagataaaaatgatattcttcatgctaagattgttgaacttaattcttgcaaaccttctacatctacctttgagcatgtcactatttgtactagatgtagagatattgatgttaatgctattcatgatcatatggctttaattaaacaacaaaatgatcatatagctaaactagatgctaaaattgccgagcacaacttagaaaatgagaaatttaaatttgctcgtagcatgctttataatgggagacgccctggcatcaaggatggcattggcttccaaaggggagacaatgtcaaacttagtgcccctcctaaaagattgtcaaattttgttaagggcaaggctcccatgcctcaggataacgagggttacattttataccctgccggttatcctgagagcaaaattaggagaattcactctaggaagtctcactctggcccaaatcatgcttttatgtataagggtgagacatctagttctaggcaaccaacccgtgctaagttgcctaagaaaactcctagtgcatcaaatgaacatagtctttcatttaaaacctttgatgcatcttatgtgttaactaacaaatccggcaagatagttgccaaatatgttgggggcaagcacaagggctccaagacttgtgtttgggtacccaaagttcttgtgtctaatgccaaaggacccaaaaccatttgggtacctaaagtcaagaactaaacttgttttgtaggtttatgcatccgggggctcaagttggatactcgacagcgggtgcacaaaccacatgacaggggagaagaagatgttctcctcctatgagaaaaacaaagatccccaacgagctatcacattcggggatggaaatcaaggtttggtcaaaggtttgggtaaaattgctatatctcctgaccattccatttccaatgtttttcttgttgattctttagattacaacttgctttatgtatctcaattatgtcaaataggctacaactgtctattcactgatgttggtgtcactgtctttagaagaagtgatgattcaatagcatttaagggagtgttagagggtcagctatacttggtagattttgatagagctgaactcgacacttgcttaattgctaagactaacatgggttggctctggcatcgccgactagctcatgttgggatgaagaatcttcacaagcttctaaagggagaacacattttaggattaacaaatgttcattttgagaaagacagggtttgtagcgcatgccaagcagggaagcaagttggcacccatcatccacacaagaacatcatgacgaccgacaggccgcttgagctactccacatggatctattcggcccaattgcttacataagcatcggtgggagtaagtattgtcttgtaatagtggatgattattctcgcttcacttgggtattctttttgcaggaaaaatctcaaacccaagagaccttaaagggattcttgagacgggctcaaaacgagttcggcttaaggatcaagaaaattcgaagcgacaacgggacggagttcaagaactctcaaatcgaaggcttccttgaggaggagggcatcaagcatgagttctcttctccctacacccctcaacaaaatggtgtagtggagaggaagaatcgaactctattggacatggctagaaccatgcttgatgagtacaagacttcggatcggttttgggccgaggcggtcaacaccgcttgctacgccatcaaccggttatatcttcaccgaatcctcaagaagacatcatatgaactcctaaccggtaaaaagcccaatatttcgtattttagagtttttggtagcaaatgctttattcttgttaaaagaggtagaaaatctaaatttgctcctaaaactgtagaaggctttttacttggttatgactcaaacacaagggcatatagggtctttaacaagtccactggactagttgaagtctcatgtgacattgtgtttgatgaaactaacggctctcaagtagagcaagttgatcttgatgagataggtgatgaagaggctccgtacatcgcgctaaggaacatgtccattggggatgtatgtcctaaggaatccgaagagcccccaaaagcacaagatcaaccgtcctcctccatgcaagcctctccaccaactcaaaatgaggaagaggctcaagttgataaagaagaagatcaatcaaatgagccacttcaagatgacggcatagatcaagggggagatgcaaatgatcaagacaaggaggatgaagagcaaagaccgccacacccaagagtccaccaagcaatccaacgagatcaccccgtcgacaccatcctcggcgacattcataaaggggtaaccactcgatctcgtgttgcacatttttgtgaacattactcgtttgtttcctctattgagccacacagggtagaggaagcacttcaagattcggattgggtggtggcgatgcaagaggagctcaacaacttcactaggaatgaggtatggcatttagttccacgtcctaaccaaaatgttgtaggaaccaaatgggtcttccgcaacaagcaagatgggcatggtgtggtgacaaggaacaaagctcgacttgtggccaaggaatactcccaagtcgaaggtttggatttcggtgaaacctatgcacccgtagctaggcttgagtcaattcgtatattattagcctatgctacttaccatggctttaagctttatcaaatggacgtgaaaagtgccttcctcaatggaccaatcaaagaagaggtctatgttgagcaacctcccggctttgaagacagtttgtaccctaaccatgtctataagctctctaaggcgctttatgggctcaagcaagccccaagagcatggtatgaatgccttagagatttccttattgctaatggcttcaaagtcggaaaggccgatcctacactctttaccaaaacacttgaaaatgacttgtttgtatgccaaatttatgttgatgatattatatttgggtctactaacgagtctacatgtgaagagtttagtaggattatgacacagaagttcgagatgtctatgatgggggagttgaagtattttctaggatttcaagtgaagcaactccaagagggcaccttcattagccaaacaaagtacactcaagacattttaaacaagtttgggatgaaggatgccaagcccatcaaaacacccatgggaacaaatgggcatctcgacctcgacacgggaggtaagtccgtggatcaaaaggtataccggtcgatgataggttcattactctatttatgtgcatctcgaccggatattatgctttccgtttgcatgtgtgcaagattccaatccgaccctaaggaatcccaccttacggccgtaaaacgaatcttgagatatttggcttatacacctaagtttgggctttggtaccctcggggatccacatttgatttgattggttattcagatgccgattgggcggggtgcaaaatcaatagaaagagcacatcggggacttgccaattcttgggaagatccttggtatcttgggcttcaaagaagcaaaattcggtcgctctttccaccgccgaagccgagtatattgccgcaggccattgttgcgcgcaattgctttggatgaggcaaaccctgcgggactacggttacaaactaaccaaggtccctttgctatgtgataatgagagtgcaatcaaaatggccgacaatcccgtcgagcatagccgcactaagcacatagccattcggtatcactttcttagagatcaccaacaaaagggagatatcgagatttcttacattaacactaaagatcaattagccgatatctttaccaagcctcttgatgaacaatcttttaccaaacttaggcatgagctcaatattcttgattcccgcaatttcttttgctagattgcacacatagctcacttatatacctttgatcatatctctttcatgtactatgactaatgtgttttcaagtcgatttcaaaaccaagtcataggtatattgaaaggaaattggagtcttcggcgaagacaaaaggcttccactccgtaactcatacctcgccgacgctccaagtcactctccattcatgggggagaaagcacgaacaccaagaaaaggactttgtctttgggggagagagtaggagcccaaggcaaaaggtccggacttcgtctttgatataatcttaactcatttatttcatgaccaaaggggaagatagcacttcaagggctctaatgattccgtttttggcgattcatgccaaaaagggggagaaatgagcccaaagcaaaaggaccgcaccaccaccaccaattttaaaaaaaacttagtactgaatattttcaatttgtttcctattgtgttctaaagggggagaaagtagtatttcaaaaattgatatatcaaaaccctcttgaacactaagaggagaatctcatttagggggagttttgtttagtcaaaggaaaagcatttgaaacagggggagaaaatttcaaatcttgaaaatgctttgcaaaattcttattcactacctttgactacttgcaaaagaactttgaaaaggatttacaaaagagtttgcaaaaacaaaacatgtggtgcaagcatggtccaaaatgttataagtaagaaacaatccttgcatatctagtaagtatttatattggcttaattccaagcaacctttacacttacattatgcaaactagttcaattatgcacttctatatttgctttggtttgtgttggcatcaatcaccaaaaagggggagattgaaagggaattaggctttcacctagtccctaattaattttggtggttgaattgcccaacacaaacacttggactaactaagtttgcccaagtgtatagattacacaggtgtaaaaggttcacactcagccaataaatagaccaagttttggattcaacaaaggagcaaagtgggaatcgaaggccctctggtccgagagcaccggactgtccggtgtacaccggacagtgtccggtgcaccagaggactccagctcaaactcgtcaccttcggaaatttccagaggcactcgcgctataattcaccggacagtgtccggtgcgccaaggaagagcggcctcaggaactcgccagcttcgggaaactccaacggctagtccactataattcaccggattgtccggtgtgcaccggactgtccggtgcaactccggagcaacggctacctccgcgccaacggctacctgcggcgcattaaatgcgcgcgcagcgcgcgcagaagtcaggcgcgcccatactagcacaccggacaaggaacagtgcatgtccggtgtgcaccggacacccaggcgggcccacaagtcagaagctccaacggtcagaatccaacggcagtgatgacgtggcagggggcaccggactgtccggtgcgccatcgcgcagacagcctcccaacggccacttttggtggttggggctataaataccccaaccaccccaccattcattgcatccaagttttccacttcccaactactacaagagctctagcattcaattctagacacaccaaagagatcaaatcctctccaaactccacacaacgccatagtgattagagagagtgatttgcttgtgttctttcgagctcttgcgcttggattgctttcttctttcttgatcctttctttgcaatcaaactcacttgtaattgaggcaagagacaccaaacttgtggtggtccttgtgggaactttgtgttccgagtgattgagaagagaaagctcactcgatccgtggatcgtttgagagagggaagggctgaaaaagacccggcctttgtggcctcctcaacggggagtaggtttgcaagaaccgaacctcggtaaaacaaatctctgtgtctcacttgcttattcgcttgggatttgttttgcgcctctctcgcggactcgtttctttattactaacgctaacccggcttgtagttgtgtttatatttgtaaatttcagtttcgccctattcaccccccctctaggcgactatcacaatgcatcacataataataaaaagaagaacaagcaacagaatgccacgaagcccaagcaggcagcctcgttcaaaaagaagaacaaaggagctggttgctttgtttgcgggagtactgatcattgggcaagcgcttgtccagaccgcaaatttaagcaagagaaaaaaccagctcaagagaagaaaacagtaaacatggttgttagcgagactgcagaaggaacatcggggtatggtaatcttttacctactgttctttcagtgtgtcaatcccctgagtggtgggctgataccggtgctaatattcatgtgtgtgctgatatttctttattttcttcttatcagtgcaaagggactggagccttgctgatggggaacggatcacatgcgcgtgttcttggtgttggtacagtcattctgaagtttacttcgggaaagacggtgctattgaagaacgtgcagcatgtcccctccatcaaaaagaatctagttagtggctctcaattgtgtcgagatggctacaaaattgtctttgagtctaataaatgtatactgtctaagtatggaacgtttgttggaaaaggctatgacagcggaggcttgttccgcttatctttgcatgatgcgtgtaataagtctgtgaacaatgttgtttcgaatgagtcgtatatttggcattcacgactttgtcatatcaattttggttgtgtctcgcggttagcagatttaaatttaatcccgaaatttgatttagtcaaaggttctaagtgccaggtgtgcgtgcaatctaagcaacctcgcaagcctcacaaggctgcggaggcgaggaatttggcaccactagacttaatacattccgatttatgtgagatgaacggaatattgactaaaggaggcaagcgatattttattacttttatcgataactctactagattttgttatgtgtatctcttaaaatcaaaagatgaagctttgcattattttaagacctacaaagctgaagttgaaaatcaactcgagaggaaaattaaacggttaaggtctgatcgtggtggagaatatttttcgggtgatttttctgatttttgtgtggaacatggtattattcatgagaggacaccgccatactcaccacaatccaatggggttgctgaaagaaagaaccgtactctaactgatttggttaacgccatgttagagacttcagggctatctaaggaatggtggggtgaggtgatcttgacggcgtgtcatgtcctgaataaagttcccacaaagaacaaagaaatcacaccattcgaggaatgggaaaagaagaaattaaatatctcctatttgcgcacctggggttgtttggctaaagtcaatgtgccaattaacaagaagcgcaaattaggaccgaaaactgttgattgtgttttccttgggtatgctttccacagcattggatataggtttttaattataaactctggagtaccggacatgttggttggtacaattatggagtccagagatgctacgttttttgaggacgaatttcccatgaaagctacacatgatacgtctaatgatgaaccaacgataccccatgagcattttattccggtagaacacactgaggaatcccatatacataatcatgtggaaaatgacaatgtatcaactcgaaagagtaagagaccaaggattgcaaagtcctttggtgttgattacattgtatatcttgtggatgacacaccaagtaccattgaagaggcatattcctctcctgatgctgacttttggaaggaagcaataaggagtgagatggattctattatgtctaatgcaacttgggaggtagttgagcgtccttatgggtgtaagcccattggaagtaaatgggtgttcaagaaaaaacttaggcctgatggtactattgaaaggtacaaggcgaggcttgtaattaaaggctattcacagaaggaaggtgaggatttctttgatacttattcacctgtggctcgattgaccacaattcgtgtgctactttctttggctgcctctcatggtctactcgtccatcaaatggatgttaagacagcattcctaaatggagagctagatgaggaaatttacatggagcagccatctgggtttgtagcaaacggtcaagaaggcatggtgtgtaaattattgaaatctttatatggcctaaaacaagcacctaagcaatggcatgaaaagttcgatagaactttgacatctgccggttttgttgtgaacgaagcagacaagtgtgtatactatcggtatggtgggggcgagggagtaattttatgcctatatgttgatgacattctaatcttggggacgagtcttgatgtgattaaagagacaaaagactttctgtctaataattttgaaatgaaagatttgggagaagctgatgttattcttaacattaagctactgagagaaggcattggtgggatcacacttgtgcaatcccattatgtggaaaaggttttgagtcgctttggttttagcgaatgtgaacctgctccaacgccttatgatcctagtaagctattaaagaaaaatcgaaggatagctagggatcaattgagatattcccaaataattggttcactcatgtatttagctagcgctacgaggcctgacatctcatttgctgtgagcaaacttagtcgatttgtttcaaatccgggagatgatcactggcgtgctcttgagagagttttgcgctatctaaagggtactatgagtttaggcatccattataccgggtacccaacagttctggagggttattgtgatgcaaactggatatctgatgctgatgagatatatgccacaagtggatatgtgttttcacttggaggtggtgctgtttcatggaagtcttgcaagcagaccatcttaacgaggtcgactatggaagcagaactcacagcattagataccgcttcagttgaggctgagtggcttcgtgaactccttatggatttaccggtggttgaaaaacctgtgccggctatttccatgaactgtgataatcagactgtgataattaagataaacagttctaaggataatatgaagtcgacaaggcacataaagaggcgtttgaaatctgtcaggaaattgagaaactccggagtaatagcgttggattatgtccatacgtctaaaaatctggcagatcaatttactaaggggctatcacgtagtgtgatagatagtgcatcaagtgagatgggcatgagacccacctaaagtttatcatagtggtaacctgttctatgtgatcggagatcccgtgaattagaatgatgaaacaagctagtggtagactgagaggaaagacccttaataaggctcatttcagatgcatatctttccttactgtaaggtaggttggtgtttacaccttaatatgttccaagtggctttgtgaagcaaagatgttgtcctacagaacatctttagaggaacatacctatatgggttaactgctagtcacagtttatgagatctgggtggtttctagatacccatgaaaggctatggagtttgacttatatgctccaaccagaggggatgcgttcagcaatctagtactggtaaagagtttagatgaaactcattccacgcaaaactgccaattcaaggcctagtccattgtgcagttgtggtcaagtgtagtctaagttctaggtggatgttcaacttaacagtctccatcgaaacaccagtatatcaaacgtttgagatgatgagagcttttttgtgtgacttagcatttggtggggattgttggattaatgtgggcttggcccaaattaatattcaataatagtcaatgctaatggcccactttaatgctatggtgtactaattatttagtaccatattggaagttcaaaggacaaatcaatcaacttaaataggtggaccattggtgcatctattgagaagttcagaaaaggatgaaggactgccacacgcgcgcgcgcgccgccgccgccggccgggtagggccgtggccgtggccgtggccgtggtcgtggctcgtggctcgtggtagatcggaccttagtccgaatattcctttcaaacggttgcgcattttgcctggagcgatgaccgtcatgataaccgtctgtttcctgtcttatggctagtaacggacgttagttattgtcgtcagtttccagttctaatgcgcgaccgtttctgtccgttgttcttctccctccttctgaccgcctataagaatggagagggagggctcttccagttacgcgaattatcacttgcacgggtgtgcgggcgatcagatttttggggagcgtcttcgcgactgctcgcgtgatctgtttgtccagttcgtcgccttcccgagttgacgcgtgctgctgttcttcttcccggcgaccgttcgagggactgcacagcgtacatcttcctgcaccgacttcgtacggctacatcgaacaaacacacgagatgtctcgtgtgaatggagccactgatgccttgagcatcggtccctccgctgggtacactctgttcttcgtatttgtgcatgtttcattgctgtttactgcttatgcgagtagttatacacacatgcacatacatgtcatcacatatatcgcactgtttttctggattaaattaaaactaaaaattcctaactttctaacaacattttcattggttttctgattcaatgccatttctaacctaacatctagatatgtgttcactgatttatcatcacattcaccctaacccgtattatgttgtgtgtgccctgaaatgcttttatttaacttagccacttgatggtataattcctcttctgtatgcatttttcagaaacctgctgccccactaaagaaaacatttgtggc

SEQ ID NO: 937 - DNA, 23290 bp, Zea mays
  Intron number 4 from transcript GRMZM2G024411_T02 (locus G RMZM2G024411) derived from phytozome v7.0 (chr-ID 9; pos 1 46482953 to 146506242 reverse strand)
agaatctctacaataaacttcaacaagaaaaacaggtttgtcttttagcatatgtatctgtcggtgttttgggtccgaccgcacacccggggttgcccctcaaggtgtttttaggagtaggacggtgccaacgactgtagcaaaatggttcgtgccggtcgcacgagggacagtggacaagatttgcaggttcgggccgcttagaggtgcgtaacaccctacgtcctggtgagtatatgagcgtggttacaagagggttctctggatagaggacgcagagagtttatgtgggtggctaagtagaacagggtcgatcgttctgaaggggtgccccctaggccttatatactcgaccgtggggcagtacacgtgagtatgataacaacaagtagctaaaagatagtgaacctcttgagtttatccctacgtaacccttgccgacttatcctcgcatggctccgttgcatgggggcttcagcgcgggaaagtcaggtctctgttgcgattcattcgttcgacgttgtgggccgtctgggtttgcactaatcagtctcacgtcttcttttctttgttggttgtctttccctaggcccacgaaagaatgaccttacgaattattgggcccttgggcctttcgtgaggccttttacttcttagtggacccaggggatatctatcccccacaagcccccgatctttgggttgatttagaggtaatcaactcaaagatccaaggtccaaaaaatgacttcttgctgtcttctctagctctgatcactcgttcgaccaaagtttggttttgtgcttgtgccttagaggttggcattttggattgtaagactctggacttcattgggtgcaccggaggtgcacccaatgggtgtagcccccgacctttgagtagattttagaagataatctattcgaaggtcttcttcccaaggttatctccattcgcgctcctgcatctcggttgaggatcggtcttttcaatcttgctctacgccttagaagtcggcgctatatcggcttagaataatactccatggggtgcaccggaggtgcacccaatgggtgtagcccccgaccttcaaatggattttttaaggataatccattcgaaggtcttcctttcgcttgtggaaactggcatgaagctattttgcattatgctttggaggtcagcattatgtcatcaatattttgctgcaaaggtcagcgtatattttgtctttagcagccgagtttgcaatccatccatatcttgctaggtagtgcaatttatttgcttctgcgattgattggacgtttgacgaacgttttctgtctagtcttcacgtcgcttctgtcggccatatcttgtactttgctggctatatttggctttcctctgatccttactgatatctcatttttgtcttgaggcattcactgcatgctctgcacggatgtgtccgttttgaaaaatatactgataattcctgggcgtcccccccaatgggtgtgggcaagggacggcttggtacactgagtgttttagccggttgcctctgagtagtaatgcgatgggacggctagtgtaatcatatcctttgcgctgttgattacagtcccaatgggtgtagtgttgcatgaaacggcatccgccgtctgacgtgtcttcagatgggtggaagtgcttattgaatgccttgcgactgttcagtgaccgcggttagaagtgagcggttgcctttcccttctataaataacccctttgcttctctggtttctttacatctcttcgctgctccttactgccttcttttcctcccctctgtccgcttccaccatgggcaagaacaacaagcgcaagcgcgagccgactcctccatcggaggatttcggtgactcggaatactcggaggaggagttttcctccgagtccgaggggtctccggctcccgtctctcccccggcgtcgtccgatgactcggacgactcccaggggatagccgcggaggtctggacgtacatccgggccgtcgagcgctccgggctcgagggctcggatgagtcggagtactcctcggatgaggaggactcggacggcggcgacgaggatgaggacgacgacgacgacgacgacgacggcgacggcgacggcagcggcagtggcaggggcggcggcgacggcagcaggggcagcaccaagggcgacagcagcaaaggcagcaccaagggcggcagtagcaggggcagggccagtggctagatgccactggtcttcttagatgttagtatagtttagtatagctagaataatgtagtagtaattagtgtagtttagtagtagtagtaatgtagagtagaagtagggaagtaccaactcgtgaagagttggtttgtaaactcgttaacttccctttaacgaagaactgtcgttgatccccccttttcgatgacttgtcgttgcttttcctgaatgttgaactgattcttttgatatagtagaaacaacgccgagcgatgtggaggttgacatcagcgttttagaagtaactccaagcaatcgaacacaagacccgcgttttagaggtaatgccgaatgatagaaggccggcatcggcattttagaagcaatgccgagcgacagaatacggggtcggcgttttagaaacaacgccgagtgattgaaggtcggcgtcggcatttttagaagtaatgccgagcgattgaacacgtggtcggcgtgttagaggacacgccgagtgattgaaggtcggcgtcggcattttagaagtaatgccgagcgattgaacacgcggtcggcgtgttagaggacacgccgagtgattgaaggtcgacgtcggcattttagaagtaatgccgagcgattgaacacgtggtcggcgtgttagaggacacgccgagtgattgaaggtcgacgtcggcattttagaagtaatgccgagcgattgaacacgtggtcggcgttttagaggcaacgccgagtgattgaaggtcggcgtcggcattttagaaataatgccgagcgattgaacacatggtcggcgttttagaggcaacgccgagtgatagccagcttttcaagttactttgaggaaaataaccgaatgatgaggtggcacgtcggctttcttggaaataactgtcggatatccacgtggcatgctgggatttcggagatgaccgccgggtgatgactgggcgctttttttgaaagggtatctggctcaagaatatcccttaagagtcgcgcttttagccgcctttgctttccgtgccctagttcttgcatttccgcatctgaatcttctctgccactcgcctcctactctgtttcgccagtgagaagcaagatggcgcccaaaagaaaaactgtgaactcgtctgctgcagtgatccccgcaatcgaccccaacagccagttacccttcgcaggtaaccacatgtctgtaatttctgaagctgagcttctccgccttgtctccatcggggttcttcctccgcgggaactctgttcttggcgggtttgccacgggactactgtcccaaccgaagatacccacgagtcagtagtttacactcctttccttcttcgcggcctcggccttcccatatctccttttttccgtggcatccttgatttttatcacatcaacctgactcatttgaaccctaattccattctccaaatctctatttttgttcacctttgcgaagcttatcttggcgtgctgccgcattttggcttatggaaatatctgtatcactgccgtcctgggatggccggggggcaacatcagttggtcggaggtgccagtttggagatgcgccgtgggcggaagaccgagtatctcgagatacccctcaaggacagcattaaaggttggcgtctggagtggtttataattgataattatggaaattctctcccttcccgttcaggaagacagccagacgttcgtactccgagttggactgagtctcccacggatcaagaagtggccgaggcaggcgtgttgcttactgaagtcggattactgaaagagagaggtctgactgccgaagctgtggtcacagattttgttttcaaaaacattcagccgctgaaagacagggcctatccggcatatctttaccgagggctggccgactcaacccgagttaccaataggagaattccttctgctgatttggtaagccgactcgaaatgatccttaggggtaaagtttcaaacgttggtgctccagtggcatactcggcttggaacctaccttctcccaaagctttcaccctttttgtgtccaatccgcccgtgactgatagcaatttgggtcttagagtgcgaccctctgctgaagaggtccgttccttagttgcttcgctcggggagatacctgatgatgaacggcagatttattttgaagtgcccctgaaccctagtgatgcagacataaatgatatgctcgatctgctagctgaggattcatctgatgctgctcctgatggtacattggcagtggtgccccttccagaggttgatgcgaccttggatgtcccgaaacctgtcagtactcgcccgaggcgccctagccgaaccagtcagcccgagccttctgctgatgagcagaagaagaagagaagacgcctccggcgagtatccagctttgacgaggatgccagtaccttagctcctgctgctgaagaaatgactgcaactggccttgctgacgttgatcccaatgggtgtgctccgcctgctgctgaccccaatgaggatgttgtttgtgctgttactgtggaagatgaagaggaagaaaatgaaacttcattaactcggaaaaacagtcggcagttcgtcgctagcggtggaagtagtggagttccttctcctgccttgtctgtccttattggtctgcaagaaatgtccatggccaattttgatcaagctctagaggatatggtccctgagaacttgttgttggaacctgcagatgctgatgcaacagaaacttgtgcagccgtgccagatgctgggttgaggtcatcccgtgcctcgtcgaccttagagcatgatctcgagggtcgggatgctgacctggatcgtcctgatcccatggaagtagctgaaggcccatcaaccttagaggtggtcacgacagagagcttggatcccttgaatagtgctgacacgtgcccagcccccgaggatgtcgccggggagaactcagctcgggtgaggagtgtaggccactacccagcccccgagggtgttgccagggatgacccggctcgagtgggcagtgccaaccttgacccagcccccgagggtgtccgagcgaggtctccttcctgcacttccatggatgttcatgtgggttcacctccacactctggcggcatggtggtggctcaaactccggatcagggggtcgctttagaggacagcatccccactggtctggcgttaggctctgctgaatgtactgagctcattcctactggtctgctgcaagctgcttcgggtggtggtctggcacctggtcatcagctgatttctcctgacttggggatcccttcgtttttttccaacctccaggtgctgtgctgtgctttagtttgatttttatgttgcatgaattgttgccattatgttcatccgttcttcttatcaggctttggtggatggagtggtcggtcaactgaagtcgcagggtgcttccatcccggaggtggcttcatctcttgagcgttggaatccggtgttgcttcggggtcgtgtatctgagttggaagcaactaatgctggttagtgttctttcttcttcttctttgttcttgtccgtggattgttttaccttctgacctcattttgtttggatacctcttgatagggatgactcgcggatcacagttcttgaagaaaaacattcccaagatcaagctgaaatggctcgacgatgcgctgacttcgaggagaagtattctcagagtcagatcgagttgagtcaggtctctgcggctttggatgatgccaacgctctgagttcttctcttcatgctcagcttgactctgagaaggtagcttacgaacccgtgcttcgccttatcatgctcttggattctgaatgagttgatttttgcttgtaggaagaaaaacgcatccttgctgcttctcgcgacaacctggacagattgtaccgagattccagcaactcgctgaccatcttggagaggagccaccgttttacgatggaggaactggaaaatcagcgtcgtcagctgcaagaatcctcggacgaagtgacccgccttacacagttgctatcagcaaaggataccaccatcaagggactccgagcttctaagaaatccattgctcaggagttagaaactgctcagcaggctgttaaagttgccgaagaaactgctgtcactttcaaagctcagcgcgataaggccctggacaaggccattcgggcgggacgaatcttgatgagaagacccggcgtggttgtccctgaagatataagagctgatgtgaatgctgcccctgattcctcgaatcgcccttcttcgtcagtcgttcctgagaaagacattggaaaataaagaaacagttcgcgtgctctgagcgcgcagttagcatgatcaagtacccgttagagtttatcggcttatcattcgaatgacatcatcactttcttattgtatccgaatttcgaatttgtggtaacgctacatgatgattatgaagtttgtttgtgggatatggaaatcatcccctgaactgcataagcgcgagtatgctataccggtttaagccgtaaatgacttttagccgataactccgttagtagggtatagtggtccccctaggtaaagtaagcgtgaacatgttgcaccgccttaagtcgttgccgacttaagtcgattgctccgtttgtagggcatagtggtcaccccgagttaagtaagagtgagcatgttgcaccgccttaagtcgttgccgacttaagtcgattgctccgtttgtagggcatagtggtcaccccgagttaagtaagcgtgagcatgttgcaccgccttaagtcgttgccgacttaagtcgattgctccgtttgtagggcatagtggtcaccccgagttaagtaagcgtgagcatgttgcaccgccttaagtcgttgccgacttaagtcgattgctccgtttgtagggcatagtggtcaccccgagttaagtaagcgtgagcatgttgcaccgccttaagtcgttgccgacttaagtcgattgctccgtttgtagggcatagtggtcaccccgagtttgagagcacctagagggggggtgaataggtgatcctgtaaaaacttaacttatagccacaaaaacttgttagaggttagcacaataattgccaagtgggtaaagagaagatcttgcacaatacgacaattacagagaattcaacacagaggagacacggtgatttatcccgtggttcggccaagtacaaaacttgcctactccacgttgtggcgtaccaacggacgagggttgcaatcaacccctctcaagcggtccaaagacccacttgaataccacagtattttgccttgcttatctttatcccacttgcgaggaatctccacaaattggagtctctcgcccttacacttaagattcacaaagaagcacggagtaaggaagggaagcaacacacacaaatccacagcgaaacgcgcacacacacggccaagattcaagctcaaagactatctcacagtttctcacaagaacagagctcgaatcacttagaatcacaaatggatgcgcaaagactgagtgtggatgatcaagaatgctcaagagttgcttggtgtgctcctccatgcgcctaggggtcccttttatagccccaaggcagctaggagccgttgagaacaaatctggaaggccatctttgccttctgtcgtcgggcgcaccggacagtccggtgcacaccggacagtgtccggtgcccgattcctttccttaaatggcgaagccgaccgttgcagatgcgggagccgttggcgcaccggacatgtccggtgcacaccggacagtccggtgcccccttccgaccgttggctcggccacgtgtcctgcgctgatcgcgcgaccgaccgttggtcctggccgaccgttggctcaccggacagtccggtgcacaccggacagtccggtgaattttagcctacgccgccagcaaattcccgagagcggcctcttcggctgagatagcctggcgcaccggacactgtccggtgcaccaccggacactgtccggtgcaccaccggacagtccggtgccccagaccgaaacagcctgttggctgtacacagccaactttcttctcttcttcttcttcctgtttctaatacttagacaagtatattagtacacaaaaccaatgtactaagacttagaaacatacctttgctctagatttgcactttgttcatccatgggtattgattcacatttaagcacttgtgttgacactcaatcaccaaaatacttagaaatggcccaagggcacatttccctttcaatctccccctttttggtgatttatgccaacacaacataaagcaactggaacaagtgcaaaatcacttcaaataaaaactcaaattggttttgattcaattttggcatatatggatcatcctttgccgccacttggtttgtttttgcaaatcaaactcaaatctctatttctatgtcaaacacacatgttgaggcataaagagagttattccaaaagagattgatcaaagatttcaaaaactacccctatttcccataatcaacacttctccccacaagaagccaacttttgacaatagagacaatacgagataataaaagccttttgacacaacaaaaactctattctactattttcaaaatctctcaagtggtagctgatccatttatcactttggcctttattttctccccctttggcatgaagcaccaaaacgggatcaatcttggccttttaaccccagtgcctcaccaaagtcttcaattaagagcaaatggcaataagatttcaggagatgaacttggaattagttaccctctcatcggagtgcagtggaagtctttcatggtccaagtccaccttttccctttcaatcctccttcgagactaaattatcaaactcaagcacatggttagtctcaaagggtcaagttgtaacacatctccccttaaacatgtgcatcactttgcaacggacttgtgaggtccagggagtgtttgtacaacttgagcaccataataagcaacaaaatgcaaaaaggaacatgatcaaaagcataagtacatgtatgctacaattcaatccaggttccgcgaatctatgacatttagctcactacgcaacctgcaaaaggtcttctcatctagaggcttagtgaggatatcggctagctggttctcggtgctaacatgaaacacttcgatatctcccttttgctggtggtctctcaaaaagtgatgccggatgtctatgtgctttgtgcggctgtgctcaacaggattctccgccatgcggatagcactctcattgtcacataggagtgggactttgctcagattgtagccaaagtcccggagggtttgcctcatccaaagtagttgcgcgcaacactgacctgcggcaacgtactcggcctcagcggtggatagggcaacggatgtttgtttcttagagttccatgacaccagggaccttcctaagaattggcacgtccccgatgtactcttcctatcgaccttacatccagcatagtcggagtctgagtatccaactaagtcaaaggtagacccctttggataccagagcccgaagcaaggcgtagcaaccaaatatctaagaattcgcttcaccgccactaagtgacactccttaggatcggattgaaatctagcacacatgcatacgctaagcataatatccggtctactagcacataagtaaagcaaagaacctatcattgaccggtatgatttttgatcaacggacttacctcctttgttgaggtcggtgtgtccgtcggtccccatcggagtctttgcgggcttggcgtccttcatcccaaaccgctttagcagatcttgcgtgtacttcgtttgggagatgaaggtgccgtccttgagttgcttcacttggaacccaaggaagtagttcaactcgcccatcatcgacatctcgaatttctgcgtcatcaccctgctaaactcttcacaagacttttggttagtagaaccaaatattatgtcatcgacataaatttggcacacaaacaaatcaccatcacatgtctttgtaaaaagagttggatcggctttcccaaccttgaaagcattagcaattaaaaagtctctaaggcattcataccatgctcttggggcttgcttaagtccatagagcgccttagagagcttacacacgtggtcggggtaccgttcatcctcgaagccagggggttgctccacgtacacttcctccttgattggcccgttgaggaaagcgctcttcacatccatttggtacaacctgaaagaatggtgagcggcatatgctagcaagatacgaatggactctagcctagccacaggagcgaaagtctcctcaaagtccaaacctgcgacttgggcataaccttttgccacaagtcgagccttgttcctcgtcaccaccccgtgctcgtcctgtttgttgcggaacacccacttggttcccacaacattttgcttcggacgaggcaccagtgtccaaacttcattgcgcttgaagttgttgagctcctcctgcatggccaatacccaatccggatctagcaaggcctcctctaccctgaaaggctcaatagaagagacaaaggagtaatgctcacaaaaattaactaatcgagatcgagtagttactcccttgctaatgtcacccagaatttgatcgacgggatgatccctttgaatcatcgctcgaacttgggttggaggtgccggttgcgcttcttcctccatcacttgatcatcttgtgctcccccttgatcaagcgcctccacttgaggtacctgttcgtcatcttcggttgggggatgcaccatagttgaggaagaaggttgatttcgttcatcttgttcctgtggccgtacttctccaatcgccatggtccgtatagcggccgtcggaacatcttcttcatctacatcatcacaatcaacaacttgctctcttggagagccattagtctcatcaaatacaacgtcgctagagacttcaaccaaacccgatgatttgttgaagactctatacgcctttgtatttgagtcataacctaacaaaaacccttctacagctttgggagcaaacttagaatttctacctttcttcactagaatgtagcacttgctcccaaatacacgaaagtaagatacattgggtttgttaccggttagaagctcatatgacgtcttcttgaggaggcgatgaaggtagaccctgttgatggcgtggcaagccgtgttcacggcttccgaccaaaaacgctcgggggtcttgaactctccaagcatagtcctcgccatgtcgattagcgtcctgttcttcctctctaccacaccattttgttgtggtgtgtagggagcggagaactcgtgcttgatcccttcctcctcaaggaactcctccacttgaaggttcttgaactcggacccgttgtcgctccttatcttcttcaccttgagctcaaactcattttgagctctccttaggaagcgcttgagggtcccttgggtttcagacttatcctgcaaaaagaacacccaagtgaagcgggaaaagtcatcaacaataactagaccatacttacttccccctatgctcagataggcgacgggtccgaagaggtccatatgcagcagctccaggggtcttgaagtggtcatcacattcttgctgtgatgtgctcctcccacttgtttacctgcttgacaagctgcacaaggtctatctttttcgaaatgcacgttagtcaaacctatcacgtgttctccctttagaagcttgtgaaggttcttcatccccacatgtgctaagcggcgatgccacagccagcccatgctagtcttagctattaagcatgcatctagaccggcctcttcttttgcaaaatcaactaaataaagtttgtcgtctaatacacccttaaaagctagtgaaccatcatttcttctaaagacagacacatctacatttgtaaatagacagttataccccatatgacataattgactaacagatagcaaattatatccaagactctctactaaaaatacattagagatagaatgctcattagaaatcgcaattttacctaacccttttaccttgccttgattcccatcaccgaatataattgaatcttgggaatccttattcttgacgtaggaggtgaacatcttcttctcccccgtcatatggtttgtgcatccgctatcaataatccagcttgaacccccggatgcataaacctgcaaggcaaatttaggcttgggacttaggtacccaactcatgttgggtcctacaaggttagcacaaatattcttagggacccaaatgcaagttttatctcccttgcatcttgcccctaacttcctaagcaacaattttcttatcctttctacaaaatagcaaaggaagcaatttagagcacaaataaatttcggaaggttcattcactactttcctaggagcattatgaactacatttctcctaggcatttggtgaacaacatttcttctaaacacatttctaccatgcataacatgagaactagaagcagtcatagcataagagtcataagcatgtgaatcaaaaacatcattacttctaaaagcatttctagagtatctcctatcatagtacatgaaagcatgattcttcttaacactattagccataggagccttccctttctccttggtggagataggagtcttatggcttgttaagttcttggcttctctcttgaagccaagaccatccttaattgaggggtgtctacccactgtgtaggcatcccttgcaaattttattttatcaacttcactcttgctagtcttaagttgagcattaagactagccacttcatcatttagttttgaaattgaaactaagtgttcactacaagcattaacatcaaaatccttacacctagtgcaaattgtaatattttcaacatacgagttacttgctacttctagtttagcagttaaatcgttaatttcaccttttaaagaagaaatggtttcattacaagtagaaagttcacaagaaagtattccatttcttttaacttctagagcaagtgaattttgtgcactaacaaatttatcatgttcttcatataagaggtcttcttgtttctctaaggttatatccttttcatttaaggcatcgatcaactcattaatcttagctatcttagttctatccaatcccttgaataaactagagtaatcaatttcatcctcactagattcatcatcactagaagaatcataagtattagcattacgagtgattaccttcttttcccttgccatgaggcaagtgtgatgctcgttggggaagagagccgatttgttgaaggcagtggcagcgagtccttcgtcgtcggagtcggacgaagagcaatccgaatcccactcctttccaaggtgtgcttcgcctttggccttcttgtaaaccttcttgttctctctcttcccatttttcccttgctcctggtcactatcattttcgggacagttagcaataaaatgaccaagcttaccgcatttgaagcatgatcgctttcccttggtcttggccttgcttggctgtccctttcgaccttttagcgccgtcttgaatctcttgatgatgagagccatctcttcatcattgagcccggccgcctcaacttgcgccaccttgctaggtagcgactccttgctcctcgttgcctttagagcaatgggttgaggctcatggagtggaccgttcaacgcgtcgtcgacgtatcttgcctccttgatcatcatccgcccgctcacgaattttccaagtacttcctcgggcgtcatcatcgtgtacctgggattctcacgaatattgttcacgagatgaggatcaagaacggtaaaggacctgagcattaggcggacgacgtcgtgatccgtccaacgtgtgcttccgtagctccttattttgttgataagagtcttgagccggttgtaagtttgagttggctcctctccccttatcatggcgaatcgtccaagctcgccctccaccaactccatcttggtgagaatggtgatgtcgttcccctcgtgagagatcttgagggtgtcccatatctgcttggcattgtccaagccactcaccttattgtactcttccctgcacaaagacgctaagagaacagtagtagcttgtgcatttctatgaatttgttcatttataagcatagggctatccgagctatcaaatttcattccattctccacaatctcccatatgcttggatggagagagaataagtgactacgcattttgtgactccaaaatccgtagtcctccccatcgaagtgtggaggtttgccaagaggaatggaaagcaaatgcgaattcgaactatgttgaatacgagaataatcaaatgaaaagttcgaattgaccgtctttttgtagtcgttgtcatcatccttttgggaagaagtagactcatcactatcatcgtagtagatgatctccttgatgcgccttgtcttcttcttcttcccttccttccgtctatgccccgagccggagtcggtaggcttatcgtcctttggctcgttgacgaaggattccttttctttgtcgttgatcacgattcccttccccttaggatccatctcttcgggcggtaagtccctttgtgaagagaacggctctgataccaattgagagcacctagaggggggtgaataggtgatcctgtaaaaacttaacttatagccacaaaaacttgttagaggttagcacaataattgccaagtgggtaaagagaagatcttgcacaatacgacaattacagagaattcaacacagaggagacacggtgatttatcccgtggttcggccaagtacaaaacttgcctactccacgttgtggcgtcccaacggacgagggttgcaatcaacccctctcaagcggtccaaagacccacttgaataccacagtattttgccttgcttatctttatcccacttgcgaggaatctccacaaattggagtctctcgcccttacacttaagattcacaaagaagcacggagtaaggaagggaagcaacacacacaaatccacagcgaaacgcgcacacacacggccaagattcaagctcaaagactatctcacagtttctcacaagaacagagctcgaatcacttagaatcacaaatggatgcgcaaagactgagtgtggatgatcaagaatgctcaagagttgcttggtgtgctcctccatgcgcctaggggtcccttttatagccccaaggcagctaggagccgttgagaacaaatctggaaggccatctttgccttctgtcgtcgggcgcaccggacagtccggtgcacaccggacagtgtccggtgcccgattcctttccttaaatagcgaagccgaccgttgcagatgcgggagccgttggcgcaccggacatgtccggtgcacaccggacagtccggtgcccccttccgaccgttggctcggccacgtgtcctgcgctgatcgcgcggccgatcgttggtcctggccgaccgttggctcaccggacagtccggtgaattttagccgtacgccgccagcaaattcccgagagcggcctcttcggccgagatagcctggcgcaccggacactgtccggtgcaccaccggacagtccggtgccccagaccgaaacagcctgttggctgtacacagccaactttcttctcttcttcttcttcctgtttctaatacttagacaagtatattagtacacaaaaccaatgtactaagacttagaaacatacctttgctctagatttgcactttgttcatccatgggtattgattcacatttaagcacttgtgttgacactcaatcaccaaaatacttagaaatggcccaagggcacatttccctttcagagttaagtaagcgtgagcatgttgcaccgccttaagtcgttgccgacttaagtcgattgctccgtttgtagggcatagtggtcaccccgagttaagtaagaatgcaagtcaatcataaatgagccgagtatctttgaaatctctctttattgatgacgtatttccattatacagaatacatggtcgccccggctgttttgagatacagctaggggtaaaattttcggaggtgctctatgttccaggagttcccaacttctgtgccatccatctgggtgaggcgatatgatccgggacgagtgacctctgctactatgaaaggtccttcccataagggtgataacttgtgccgtccctcccctttagaattcggcggaggacgaggtctcccatcgaaaagaaacatcgccgcacaactttgtcgtggtagcgccttagagtctgctggtatcgtgctgattgaatcactgcattcagtcgttcttcctcaagtacgtcaatatcctccagcctagtggcttcggcttctgctatgctttcgaagatcaatcttggcgccccaaacttgagatcagcaggtagcactgcctccgacccatagaccatgaagaaaggagtgtttccatgcagggcccggctaggttgggttctcaagctccaaacaacataaggcaactctcttatccattttcctgcgaacttttcgtttttatcaaagatcctttttctaagtgcctccaatatcattccgttggctcgctcaacctgcccgttggctctcggatgggctacagatgcatacttgatctgaatgcttttttgctcgcagaagtcaaagaattctgaactggtgaagttggatcccaagtcggtgatgatactgtttggtatcccaaatctgaatattatgctttgtatgaattccacggctttagcagaggttaaagaggcaatgggctggaactctatccatttagtgaatttgtcaattgccaccaatacatgggtgtatcctccttgagctttcttgaaaggtccaatcatatccaatccccagcatgcgaaaggccaagttactggtatggtctgcagctgctgtgctggcatgtgctgttgctttgacaggtattggcaagcttcgcatctctgaactaactcggctgcgtcgttcttcgccgtcggccaatagaatcctgacctgaaaaccttcccgactaatgttctggatgctgcatgtactccacactgccctgcatggacttcctccagaagttgcttcccggtggacgagagaacgcacttcatgaggacgcctgacgcgcccctcctgtataatacctccccaatgagtgtatagtgagctgattgtctggcaatgcgctctgccgagttcttgtcatctggttcttcttcattctttatatacttaataatcggttgcctccagtcatcagagtctgactcaggttgatctatgatgttgcactcttctatttgatccgtcgagatgctcggctggagaattccttgcacaaagattccgggcgggacctgagtccgaccggatccgagcttggacagtacatcggccgccgtgttccgatctctttctatatgatgaaactccagaccctcgaatttatcttctagcttccggacaacggcgcagtattttcccattgaatcacttgaacaatcccattccttgtttatctgactgatgactaccagagaatctccatacaccatcagtctcttgactcccagtgatatggcgatgtttaatccgtgtatcaaagcttcatactcggctgcgttgttagaggccgggaatagcagctggagagcatacttgaggtgctcgcctccaggtgcagtgaagagaattcctgctcctgctccctgcagtttcagcgagccatcaaaatacattcgccatacttctgcggtttctggattatccggtacttgctgttctgtccactctgatacgaaatcaaccagtgcttgagttttgatggctgtgcgaggtcggaactcgatatcatgggatcccaactcgcaagcccacttggctattcggccaatggcttccttgttgtgaagaatgtcccctattggaaaaccagtaactactatgactttgtggtcgtcaaagtagtggcgcagcttgcgggcagttagaagtactgcatataatagcttctgaacttgaggatactttttcttcgatggacctagaacctcactgatgaagtagacaggatgttgtaccggataggcatgcccttcttccactcgctcgactaccaacgcagtgcttaccacgtgagtcgtgcaagagatatatagcaacaaatcttcagctggttgagttggcgtagctcgccggggcggctttagtactggtggtgttgtcaggaatttcttcagtgcgtctagagcttcttgtgcttctgacgtccattgaaacttctccaccttcttgagcagtttgtaaaatggcagacctttttctcctagcctggatatgaatctgctcagggctgccatacatccagtgagtcgctgaaccttcttttgcgactgaggggcttccatcttcatgatagcttcaatcttatctggattagcttcaattccccggtggctgacaataaatccgagtaactttcctgctggtaccccgaagacgcatttctcaggattgagcttccatctatatcttctcaggctgttgaaaaccagctgtaagtcttcgatgaagttttccggattctccgttttaatcaccacgtcgtctacgtaagcctccacacgcttgccccagtgatcggctaagcatgtttgaatggctctctgataagtcgctccagcgtttttgaggccgaacggcatggaggtataacagaaagcaccaaacggggtgatgaacgccgttttttcctcgtcttcttttgccaaactaatctgatgatacccggaatagcaatctaagaaagatagcacagaacatccagcggtggaatccaccacctgatctatcctcgggagcccgaagggatccttcggacagtgtttgttgagatcagtatagtcgacgcacatgcgccaatccactttattctttttgagtacaagaacagggttggctaaccactcggggtgtaatacttctctaataaatccggccgcgaccaagcgagctaactcggcacgaatggcctctctcttgtcgggcgtgaaacgacgcagcttttgccggatcggcctcgcctgaggatagactttcaatttgtgctcggccaactccctcgggactcccggcatatccgcaggttgccatgcgaatacgtctcggttatcttgcaggaactggacgagcgcgctttcctatttgtcattcaaactggagctgatgatggccgccttgcgctcatcggcaaaccccaggttgatccgcttggtttcttcaatcggccgcatagaggtcgcggcctgagcttcgtttgccggcacggcgaggtcttcctcaggcttagagttcgccggtgtagaaggaaccgttgacggcttggtggtgagggctgcttggatggccattcggaaacattctgcggcgccttggaagtcggcgcgcacagttatgattccttgcggtcctggcatcttcagtatcatgtaggtatagtgcgggatggccatgaatttggctagccccggccttccgatgatggcgttgtaaccgcagtcgaagttcgccacctcgaacctcaggaactcggttctgtagttatccggagtcccgaaggtgaccggcatgtagatgtggcccagcgggtattccccttccgtcggcacgatgccgaagaagggagtgtctgactcgtggagctctttgaggtgaactcccaagccttggagcgtacgggggaaggtgacgttgatgctgctccccccgtccactagcaccttctttacccggctctctcggatcaccggatcgacgaggagcgggtatttgcctggatggtcaaagttgagccattgatcctcccgagtgaaagtgattgggtgctccgaccaccggtacggggcgggagggccggtggtcgccaccagtatctggcggtcgttgagcttttgttgtcttttgttctcctgcgacccatgtccgccgaagatgacgttgacctccctgtcaacgcgcgggaaagctcctcctcccccctcctccggctgatggggctgtcgtggttcacctggccctcccctcggcggaggaggcggtaggggttggaagggtcgaccatgtccaacggagtgcttgaagtcccggcagttacgtagagtatggcgcatgtccttgtggtacgggcactgggcgtcgaggatgtcgtccagcgtgcgctcgcctccgcgtggtcctcctcgggcgcgagaggcaggcggtccggcggcgtgtacttcttcgcgaggcctcttctcccagcgtttgtcgggtggctggttcgcgtcgcgtcgtggtgctgtcgctgcgggttttgctcctccgatgaggtcccgggcccgctcgtcggcggtgatgtagaggtcggcttcccggaacagctcctcggaggtagtcggcgccttttgtagtatggctcggacgaaagccgagtcgtcagatcctctgtagaagtcctcgatcacggccgcctctgtgacctcggggatgcgatttctcatggtctggaacctcttaaggtatgaccggagagtctcgtctccccggcgcttgatggatttgaggtcccatggttgcgcgggcttgtcggagagagactggaagttggcggtgaagcgccgactgaagtctccccagtcgtcaatgcagtgtcggggtagatgtcgtagccactgcagcgcatcttgcccaaggacgatgggcaggtacgtggtcataacgtcttcagatgctccggcagcccgagcagcggtggtgtaaacggctaaccagccccctggatcctgcttaggttcatatttgtcgacattggataccttgaagttgggaggccattggatggccctaaggcgcggagtaagggcggatactccgcacgtgtcctcctgtcgtcggggatgacgtctgtcccggggaggggagtggcggtggtggttcctcgaccgtccccgggtggtaccaccagttgaagctgttgccgactcagtccgggtggcctggctttgagtcgggaagccatgatctcggtcatactcctcccgacggcgaatttcgttctcgtgccgccgttcgcgcgaagcattgatagagcttcgcgcgtctcggcgactgttgatggcgtgtcgcaaatcgttcggcgggtgagcgagcggtagaagatggttggctgcctgagtgaacaggcgtcggtatccctcggcgtcgggagtccgaggaagtccgtcagctatccgagctagaacgcctccgacttcgctcggcgtgttcatagctcgggcgaagtcggggttcaagttgcgcccgaagagcggattctcgcgtcgttgccttgcatcttgctcggcttgctcctgagtccgacggcgatcacgtcgtcgggagttccttcgttccctgaagacacgttcttccggagtttctcctatctctgagacctcgtctcgcgagacaggctgctccggatccctttctccagctgcgtgatgtcgtcgaacgttcctgcgtcggttccttcgtcggcgggattctcgctgaggcggttcttccccaggcgcgatcggttcatcgtcggagatggcgggcgactctgctctcccgatgaagaggacgtcggggtagaacggtattcctgccgtggcgactttctttccgttctcctttgaggtcggaggaacgggaagaacgacttgcctctccctggtctccttctttctcacgacccgtgtccattctttcgtcggggaagtagacagcggagtcttctgggtcagcgagcttctagctccagcctccccggagacgatctttttccgaagagccggaggtagcgtctttccagcatttttggagtttgttggaggagacttctgttccggcagatctgcgaggcggtgtagaattccttcttcgtccgctacagatgagattgtcccgaagcagaatataaatccgggacgcacggcgatcttgctgtggaaggtgacggccattgagctagcttggatcgtcgacacaccccctacctggcgcgccagctgtcggtgttttgggtccgaccgcacacccggggttgcccctcaaggtgtttttaggagtaggacggtgccaacgactgtagcaaaatggttcgtgccagtcgcacgagggacaatggacaagatttgcaggttcgggccgcttagaggtgcgtaacaccctacgtcctggtgagtatatgagcgtggttacaagagggttctctggatagaggacgcagagagtttatgtgggtggctaagtagaacagggtcgatcgttctgaagtggtgccccctaggccttatatactcgaccgtggggcagtacacgtgagtatgataacaacaagtagctaaaagatagtgaacctcttgagtttatccctacgtaacccttgccgatttatcctcgcatggctccgttgcatgggggcttcagcgcgggaaagtcgggtctctgttgcgattcattcgttcgacgttgtgggccgtctgggtttgcactaatcagtctcacgtcttcttttctttgttggttgtctttccctaggcccacgaaagaatgaccttacgaattattgggcccttgggcctttcgtgaggccttttacttctttagtggacccaggggatatctatcccccacagtatccataaatccagtaccagttactgttcttcatcagatgaacaacacaaggcagttcatgaggttgtggaagttgtgttgcgttcgatgcagcagg

SEQ ID NO: 938 - DNA, 2364 bp, Zea mays
  Intron number 1 from transcript GRMZM2G019571_T01 (locus G RMZM2G019571) derived from phytozome v7.0 (chr-ID 7; pos 1 63543949 to 163546312 reverse strand)
ttgtgttgtacatcaaagtaagtatgatctgctcgtgcagtattattgtggaggaaaatgcaaatatcttggttgccatcgtctttgtggttctaagggtccaatggattagctttgggatgatatgagtatttccttttagattattaattcatactaattttgcaagtttgcatgtttaaatcaagtcatttgcaccacagtattttttttatcaataggatttgtggtatggtaccgttacccaataggaacactggtggaaccaaggctaggccaacccctgcaccccccccccccccacacacacacacacaattgctgttttattttagtttcatacaaatctgcaaagcttatagcctgtacagtatactagaagatactatttaaatgataatttgtacctagtagagtctactatttaaatgatgaacttttctgtattatttcccctgctgtcatgtcatgtctcatgatgaaaagatgccagaacacatcatctcttcctggtccaaaaaggtcaaagaaatcctagaaagccactaaaattggtgcaggtcatagtttagaatggaggttgagatctttagaattatagcaaatcttcatagagcataaaacttattatgtgaaacacactgtgttaagatcgaggagcaattaggaatatattttgttcatgctctcccataatggtagcaatgaaaggctgaagaaagagttctaacaggcggtgagataatacaaggaaagtcaatgaggtcttcgatataattccgacattgactcagattcatcaggctttcaaatctaaaccaaacacatgccaagattttatcaaagcctcggtttatgccgttcttccaggtttatatatgctacttgcccttgtatcattccaaacacactattccaacaatctcacgtgcagaagtgcattggcgctattgacgggacacatccccattaccatacagaaaagaaggtcccaccttacagaaacaaaaaaagggacattgtcccaaaatgttatgttcacttgtgacttaatctcaaattcactttcgtctcttgtgggtgggaagaatctgctatgatgcaggagtcatatgttctgctcttatgaaggggttttatgtaccatcggggaaattctaccttgatggtggatatgctaacactccatcattcttagcaccgtgccgatgagttaggtagcgagtttagaaggcatggatcatcgcagagaaatgagtaagcaaactacaatgacttgtttaatcatcggcatgcacagcttcagaatcgtattgaaggggcatatttgggttgttgagaaaacggtttacaattctgaatgtgggatgtgggaatgcactacccaattgagaatcaatacaaaatggttggaagcagagggttgaagaaatatcactaaggacttgttcggttacatgggatataatcccaccatggatttaatccgggtattgattgggtgaatccatatctcacacccaatcccatggtgggattaaatccatcaacaaatccatgtgactttcaaagctagttattcttttgatccatggattctaatgtaaacttgtgcaatatctcatggatttgttccatacctaatggactatggatagaatctatgtcttccatagtttaaaaaattcccaaacctttgggttatattccatgatgggtttaaccgaataaaaaaaattaagtagtcatggattattttggggcatggattgaggcatggatttaattccaatccatgctaatccagagcgggattggtgtaaacgaacaaagcctaaacggttcaatagaaaataccgaacttgattctgtagtctatgactggccaggacccttttttttttcaaaacgaaccacactgtacattgctgtgcaaagtttctattggtaattgataatgaagcaggagaaaatacaagatcatagcccttgtacctactggttggtcctaacaagacagcagaacctccaattgaaataagtcactctgaacgaagagcgcagaacatggctgctgcttctgattccattggcatcaatttatagagaagtacatcgatgtcgtggatatgcaagacttaactaataagcagaagttagatgctaacgagctcttccaatctgagatatcgtcgcatatttatgaaaacaaaaaaaaaaatgaaatgttcaattaatttggctaaacaagtaatttcacagttatatttgcttgttgacttcgttttatcctgtttttgtagcattagatcatctaaactaaacctatattctgagacgatgcttgcttcatattaactgcag

SEQ ID NO: 939 - DNA, 5157 bp, Zea mays
  Intron number 1 from transcript GRMZM2G054465_T01 (locus G RMZM2G054465) derived from phytozome v7.0 (chr-ID 9; pos 9 8488123 to 98493279)
cgccgccgccacccttcgtactgctctctcccaaggtgcgcccacacacccgcttcgccatccccaccgccgactccttggcttgttttctccgactccgatcctacctacctagctagttattatagccttatagcttgtcgacctcataaatctctccacgtagttctttggatgggtcgtccgtcgtcgtcgctaagataggaataggaggattaagaacctctccgctcggtcaggttgagcttggcaggctagaactagaagcttgtgccctcgcaattttttatttttttagctttctttctgccagcgcagatctccagggactatagtacgttatcgttttggttttggaggctggttgttgaccattacccgtcccagcaaccagtgtaccatatctagctgttcaacgcatctgactccgaggccgactacatcggttcagctgaagtttaccctgaataccgttttattctgtagattgtattattcgcagaataaagtttaaatatagatatagatatagatatagatatggataagctactgaagatagtctgactataacattttagtactagttcttcgaaaaacaaagtattgtctgtttcttcggatagttggggagtatcggatataacacgaaggtcaggaaccatggatgcacccatgattgcataaaagttcttttttttacggtttcagaagcatgtttaggttctttcacctctgggttggagtatgacggcttcaaatgctacaccaaagtcgcggaggggaccattttttagttcctgatcgggtatagttggatacttcatgaataagtggttgggtcgtagctaggccaggcattgaaagctggccgacatgtttttgagaattattatattcaaaatggaccgggttgaatctcacacatgtttgggagctaaaggtgagtatatggctgagttgggctatggaagggcattatcagtggcggagcgctcggtatgccgagctatgatgctcgccataccttactccatcctccatcgtgaggaaccggtgcttcaggctcagacagtagtggacagagaacaccaaggtcgagagtgagatggcaaggcgaagctgtcgatgaagcgcgtctcctcactcttccatggcgtcgtccgctgacctcctcttcatgcccttctagtgcgagcactcgtcgatttactgccttagtgccttgcactcaaggcctttatgtccaactcaccccacctcccatccgatgtctcactcttcatatccttgccacagacgcgccacaagtctccatcgacagttctgcactcacactgctctatagcctagacccatagcgctcatgcctcgcgccccaccctacctcaaagtcgtgcgcagctccgcaaccctacacgacgacgcctgcattacctggcatctacagttctccactgccataccttgcttttcatttccatacctcgcttttcatttgtgctccgtcactggtctgtctgatttgatgactacatttagacttgtttggatccttatttgaagtaatttttttagataatactccatccatcctaaaataaaaattcgtttttacctttttagttgatttatacgataattaatatatttgttttactctctagattcattatcatccatttaaacatagatataaaaataaaaaaactaaaatgattaatattttgagacggaccgattgttccggcttcaaccccatcgaagacaaggtatcagtcgcaaattattggagagaaatatccgtggttataaattcactcgcaaaagctataggacattatgacagagtttggcatcattgaccaatcctaaaaaaacgatgaccgtcaataggagtcaaaaaaaattgcatagctactgtcctactgactccaagttttggcaagctaaaatctgcatctcctgttgaccaataagtcactgcaatcgtgcccagagccttagccactatgtcccctgaatacaacctgcatgaaagtttttagtcgacatttctaaaaaataatgtaatttcttgatagcagtacggcccaacataacgtagaagcacctatcaacaactttagcatattatatcgctctgctagcacactttaatggttacaatacatcatttaaattctttggcagttgagttccaaatgtaaaaaacacgccaaagaaatcttacaaaataacattaaaaaatatgtgttgaatggtttccacgtggcgaaaaacaacatatttttaccatcaagtcaattccttctcgctaggttatccactgtgaggacaacagttttaaaataccacataaatattttattctttagagctagtttagaaatttaaatccactcgctaccagacacagctgctttgccgaatgtttcaggactcaggaaaagacacttggcaaagaagttagtttgttgcatagctaacggttgtcaactatagacgactactaacggcagtttaccccttgtttcgtcgagagcttgacgatcggcaaagaagcctttgccgagagtcattctatgacgagcgcttggctctcaacaaatggggggtctgtgctgagtgtggcactcgacgaagcaagttttgtcgagtgtctgataaattgcactcggcaaagatcgagacactcggcaaaaagccgaattccggtagtaccttcggggttagtttttctctcaatccccgaaaatcccggaggggatttaagtttccaaactaattcttaaaggtactttttgttctccaaatttcattgttaggaagtctggatgttgttgttgataagaaacttatacatatatttaaccgagtaatgtccattttttctttaaattccaaataagcttaccaatacctactgtaattttaaaatcataattgtggcaactaagtgctgcaattctagtagtttgtttcccaccgtatttagaacattggctattgttgcttaatttcaatgaacaatattgtacaaaagaggatattcatttaaagacgggtcacgatccatttgtcctttttttaaaattgttgtatttggtttgcctcaatagtttttagtatagaatcattgtcctaaaatttactctgtgaagaggtagcatcccaacatgaaagtccccccggaaagagccatcgtcatctttgattaaactctaaaataccttctcctccgtttttttatttatcacgttttagttaaaaaataaactaatggacgacatatatttgaaaatagggaagtatctgataaaattctgggggaaaaccatctaagttctggtgctttatcattttccttttggaatattgcctctcgcacctcttggttaataaaccagacgcaaacagtggaaagggattacagcaatactgacgccacaatgctgccgccacacctgcaactccagcacaatccaggctcatcgccgtggacatgcagatcatgctcttggccttatgcgaacaacgcgcatctcaggctaacaaaaatgcatgctatgaccagacttagtctaatacttatcgtgtatatcacgcactgacgtatcacacggcatactggcctctcgcgcttgcgtatatgccgagtcaacagcagctcacacgatttcttgatttgccgatgcatacacaaaaacagaattaaacatgcaaatgctaatggcaagattgtttctaacagcaacagggcaagagcagagagcttcactgctgtgcacaccgaagcaccgagttgctgccagcaggagaagcttgagattcaccactagggccagctcgaatgcgggcgccagtgtgagcatccctaagcaatggtataacctcatcgccgacctgccggtgaagccaccgccaccgctgcacccgcagacacaccagcctctgaatcccagcgacctctcccctctgttccccgacgagctgatcaggcaggatgttagcggcagatagtggagatagatccgagacaggaattggaggtaggaagcaggaactggggattcaggaagatagcaagagattcataggaacagaggaagcagaggttagagacgaagaaagaaggtatagttctgtttacagtctgaatatctcccctttgtcctatggacgatctcctctaaatactcgttcaactggctcacgacacaaaattacattgctgaccactctgggccgctcagcttcacaattgccgtccgggctcgctcactctgtcccggcccaattgtctttatgtccttagacgtagcctgtatctgtcactggatgcctgacattcccccctcttaagatttggcttgccctcaagccaaaagcatcacgaacttgaggtcgaagaccattctgcccggatcccatggagttagcaagccaatgatccatatcaaatatttaccacaactgatcatttgtgtcactccaatagaggcaagcatcagatgaagctcatgaaaattatagccattagccacttctagcatttctgatagtaaatgtctttctatgttggtggctaactcctgtgaccaagacttgggcaatagaatattaggaaatgaaaactgtgcaccacaaaatatctcaactgatgatgaatacttgagctttctgaaaaataatagactgttcatgcctgtaattgccaataaaatcagctgtgatatgaactgaaattgtctaattatgctagctgagaaaaattcaccatgtgactgctgccaatatattggtagttcagaaaatagaaactgggttaattcctgaccatcccaaggagcaaacatatcagcttcaatgaaatgtccatggaagtgttgcaaactcagtagatcgaagccatagaatatcatgtgcatcctctcattgtgttgaatgaagtagcaatcaggagcaacgattagccacaccacacctctgtcatgctgactgtataaatgagtaactccagaaaaattcctaacagtccaagtaaacaccatgacacccggaatcgagcaaacaatggcttccttcaaaacaccaggtcgacctccatataatatgccttctcccatcacatctatgcaggtctggtgctgtggc

SEQ ID NO: 940 - DNA, 11021 bp, Zea mays
  Intron number 2 from transcript GRMZM2G008864_T01 (locus G RMZM2G008864) derived from phytozome v7.0 (chr-ID 2; pos 9 8167266 to 98178286)
tgcttcagtggccacaaggaacctttgcctccaaggtacccttttttcccactcttgattagctggtaacacctaaattatgaccataaaaaggactcttgtcgttgcatatgctcctcaaaatcttactatgttcttttatccaacttactatcttcaattattcttttctgcatgcctctagaatcacaaggaaaactacaaacaaaaatatattatttttcttcttttgttactggagtgctgtgaagccttcctgctgagttaaaggtcctgggttcagggcagcttctttgtaaactgcaggggtaaggcttatctcggttattctctctggaccccactcatgtgagaaccgctagactggatctgttctttttttctatagtggagatagttgcacgtaatggcagatcacaatcatattattaaaaatttgcagtaagaaggggtctcgttaaagtgcctggaaataataaaaaactcagtctgggaggaaatgaccaccctctcggtattatattaagaagagaccgaaacaatggtctcgactgagaaaatccccgaaccctggctctcatcactaacgggccatcgtcaagtgtccactttgtaacggcccaaccggagggtggcacacaagacatcgtcaaccgagagcggatggggcacaacgaggggattttttaaccaacccggaagattcgccttcgaggggaatcgaacccgggaccactgttcttaaggcgtcgcctaggcgacccggtggtggtccaacgcctaggtgccttgcccgcctacctcacgtaggcgtcgcctaggcatccaggcggtggtacaatgccctgtcttgccatactgctttaaaaaccatacctgggacttagaggtgctactcggaagactttaaccactaggctaaagcctttaaccgctttaaaagaactttataccattattttttaataagaaaaatagaaaaagagtccaaacaacaaagaccgctaggttataattatcttcaatgctattcataataacctacgcaattgccatcaacttgctcaatttgaacaataacagtcgtactgtcaaaatttttagttgcatatagattgttggaagaattttttatttctgtgatttttcagtctttaattaacccctttgactttcttcaagcattctgcttttgtttcttgaccaacatatgatgtgatcttagttgatgaaataagattgtgccaaattagaaaagcaaatgttcaggatttttttatattttacgaataactgaaactattttctgttaattagctgatttaattgccccctgttttagtagttttcttttttcgataaaggaaatttatttcatcagaaatgaaacatagtcctggcctcttcaaagtttatatttggcctgatggtatgaaaaaccttaactatccttcatctaaacatgataaaggatagaaaacacacaagagttcaacaatagaaaaaacaacaattgactaaacttctaatctattgctaaatcgccattcatttcgagcgaagatgtccatcgtaattatctctagctgcagtgaagcatcctttagcaacaattggttcttcttctgcagtaggctccagtactaaatccaataagtgctcttgtaaatcacgtgcattggtgacataacaattgcattgttaaaaataacaccattttgacttgtccatattgcccacaacatggttgcaactcctaccatgtcaaggacgtcgggacctagggtagccgacccttgactacgtagttcgtagccatggtccgtcgtcgccgatgaggttttgcccttctgccgtcggcttgttggagaagagagaggtgggagattaggataatgatcttgcttaacttctcaagctctggttacaggaggaatatatggccaagtgccttaaccaatctctcctagacttaaggaataaggatagaaaataatctctctttccaaccaatctctcctagacttaaggactaagaatagaaactaatctctctttccaaacttatccactcgcggtggcctcctcctcctgcccgcgcagcgcgttctgtggcacaacgcacgtcacgacaacacctatatgtgcgcccccgcatgacatatctcccccctcgagacctagctcgtcctcgagctaaaagtcagggtacttgatgcggaactcgtcgaggtcctcctaggaagcagactccgccggctcgccgcgccagtggacaagtacctgacgaaccccacgtgccaaccgagtttgctcaacacgtagcggctctggaataaccgctccattgtggagggccagcagggctggaggcgaggcaagaggtgcgtcgttgaacttcttgagcacgccaacatggaacacatcatggagtcaggcccccaagggtagttctaggcaaacagcgtcatcattgatgatctcaatgacgcggtagggtcccacaaataggggcttcagcttccccgtggtcctcctaggtagggacgcctgtgcctgctccaggcggtagcgtatatcagccaagaaggcctcgcgagcctccatgtcctgggcgacgatggccacccgtgtctcttctggctcataagagcggatggaaggagggtcacgaccatataccacccggaacgacgtgtcccggagtgaggtctggtacgcggtgttgtaggtgtactcggtccacgacaaccagcgcaaccactagcggggacgatctccagtgaagcagcataggtacatcacgatgacccggttggcagcctctgtctgaccgtctgactgtggatggaaagctgatgtcatgtgcaacctaatgcccataagccgcatgagctcgcgccagcacgtcgaagtgaacaccaggtcgtggtcggagacgatgcactgtggaacgccatggaggcgaacaatgtcagcgaagaaggcccacgccaccgactcagccgtgtatggatgcgcgaggggaacgaagtggcagtacttgctgaactggtcgacgacggagagaatgaccgtattcccgttcatcctgggtagcgcttccacgaagttgagaccgatgttggcccaaaccaccgacggcacgggtagcgacatcagcaaccccgttgggtgtagatgcttcgacttgtaccgctgataagtggggcatgactgcatgaattcttgcaccaaacgacacatgttgggaaaatgaaagtcgcggtggaggcggtgaagcgtgcgatggacgccctcgtgcccatccacatggatggcctccatgatctcctacagcagcggtgaggtgggtgggatgtagagacgccccccgtaggcgaccatgtcgtcgaccactgtccaaggcgcgatgcgtgtacccgcgcggacctcgtcatggatggccaccagtgccggatcattggcctgcgcgtgacgaaggcggtcgatgaattcgaagcgaggcgtcgaaatggccagtaaggcgacctcctccgtgtcacggcaggagagggtgtctgccatggtgttggtggaccctgacttgtattcgacggtgaagtcgaagcccaacaacttaccgactcaatggtgttgcgggattgtggcaagtcattggtcgagcaggtacttcaggctgtagtggtccgtcatgacggtgaagcgtcgcctccataggtacagccgccaatgccgtacagcctggacgaggccgatgagctcccgctcatgcggcaagcgagcgatgacgtagcaccaccgacttgctgaagaacgggacgggatggccattctggacctgcaccgcaccaaagccataggtagacatgtcgcacttgacaacgaatggcttggcgaagtctagcagtgccagtactggggctgacgtcatcgcccctttgagggcactgaaagttgctgctggttgtcgttctaggtgaagccctccttcaaaagtgttgtgagaggaacaacgatggtgtcgtagttgtggacgaacttcctgtagtaccctgccaggacgaggaagccacgcatcgcccgcatcgagcacgattgaggccagtcgtggatgtcctggactttgtcccgatccgtggccacactggccgaggatatggtgtggtcgaggtaggcgacatcgtccacgccgaaggagcacttggatcgcttgacgaagagacgatgctggcggagcaccgcgaggacgacgcgaagatgatgcaggtggtccgcctaggatgtgctgtatttcaaaatatcgtcaaaaaagacaagcgcaaactggcggaggtaggcgcgcaacacatcgttcatgagcgactggaacgtggcaggggcgttgcatagcccgaacgacatgaccaagaactcgaagaaggtgtcatgcgtccggaacgcggtcttgtcgatgtccagacctgatggtaatcggatcggaggtcgagcttggtgaagaattgggcgccatggagttcatctaggagctcgtcgacgaccggaatggggaaggcatccttgatggtgatggcgttcagcgcacggtaatcgatgcagaaccgccaagagccgtccacctatctgacgaggaggatcggggatgagaacgccgagctgctgcgctgaataatcccctggtccagcatggacgcacattgatgctccaattcatccttgtgcaaagcggggtatcagtatggtcggattgccaccggtggcacccccggcaccaaggtgatgatgtggtcacggctgcgcgatgggggcaggccgtgcagctcgctgaagatgtcgtcgaaatccaccaagagctcctcgaggagcgagctgctagccgtggtcgtgctcatagccagcgcacgagggctcgccagcccctgccagcagaaagcacgaccttggtatgtgaaggagaccacgcggttgctgaaatcccacacgatcgggtcgagcacggcgagccaccgagtgccagtacgacattgtatcccgccaagggcatgacatagagatcagtggggaacgaggcgccaccgatggttagcggaccgtcacggatgacaccgacgcacgcgacgctttcgccgttggtgaccacagccatgaggcgcggttggtgctgtagaggcagtccagtccgaaggtcagcggcctccgagatcaagttgtgggtgctaccggagtctagcagggcgacgagggatgcagattcgagcccgacctctagttgcatcgtgtcggtgaaggcgaccctggctagggcttggagggagaacacatgcgcgtcctcaagtaccacgtcctcgacagtctttgtggctgccctgtcttcctcctcaaaaccctcgaggagaaacaactgcttgcgcacacggttgtggcccctggtgaatttttcattgcaattgttacaaagcccgagatgacgacgtccttcttgtttcgcctgggtgaggcgtttgatggggtcgccctcgatggtgattgtccagggagtaggcgctttggcacccaacggcgcgggtagagccaggtggccagccgaagtcggcagcagagggcgggatggtggtctgacggccggggcggtgtactgctcctgtagttcgaactggcgagccaagctcatggcggtggccagggactgagggttttggttccagacgtcgatgctgagcggcggttgaagaccacttgtgaacaactagaccttctgcgcctcttaaaggagaccaggacgagggaggagcgcctggaaataatcttgatactcggtgaccgtgcccgtccgccgacttttagccaattcggctagcggggcagagcgcagtggtggcccataacgcatgctcaacagctccttgaagtggcgccaggacggggtgccttcgtccgtctggaccatgaaatgccacatctgcgcgccctccaagttgtaggaggccatccaaaccttctccatgatccgttgctgatggaaatacgactcacagcgattgatgaagatcagcagatcggttttcccgtcatagcgaggaaaatccatcttctggaaccttggtggccgatcatggtggtgctgcccatcgtgcccccccatgtcgctcgatgaggaggcagacttcttctggagctcggccgcagtcgtcttcagggacgccacaatcgtggtcagagtctcgatcatcttggcaagatcggcgatggtcggttcagacatggctaaagggatcaatgtagcgaccgatggtagcgagtggggtgggttgggtggtggcgcagcggtgggggatgttgcggcggcggagcgaatgaagacgaggaacgccgggtagccgataccaggttgtcaaggacgtcgggacctagggtagccggcccttgactacgtagttcgtagccacggtccgtcgttgccggcgaggttttgcccctctgccgtcggcttgttggagaagagagacgagatattaggataatgatcttgcttaacttctcaatctctggttgcagaaatatatggccaagggccttaaccaatctctcctagacttaaggaataaggatagaaaataatctctctttccaaccaatctctcctagactttaggaataagaatagaaactaatctctatttccaaacttacccactcgcggtggcctcctcgcgtgcgcgcagcgcattctgtggcgctgcgcatgtcacggtggcgcctgtacatacgcccccacatgacataccataaattgtttattagtatctagtttcactccatccaaccaatgccaaaaaatgtgatacattttgtggagccttgataccagatactatcaaaacaatttgccaaataaatctagcaaagtcacactgtaagaacaaatgatctatagtttcattgcagttacaaaaacaacatttcaaactccccttccatctacgtcttgctagattgcctttttgtaagaactacacccattgtttaaaaggcgtcgcctaggcgacgcctaggcgtcgaggcgacaattttggctaggcgtccgcgccgcccaggtgccattgagtatggcgtccgcctaggcgcggtaggcgtcgcggcgacgcctttctccctctgggcgacgccttagactagggtttgtagtgggctagggtttgcactgggccttaggcgcgttttgggctttcactgtgcgcgcgatctctccgctgcggaaatttcagcgccgcgccctgcgtgggcaaatctccctgcgcggcaaatctccctgcgcgcacggcaaatctccctgtgctctctctctccctgcgcacgctctccctctccctgcgcgcgctcgcggctgctgctctgggtgcgcggctactctcccctgcacgcgcgctccctgcgtgcggctgctgctgggcgcgtgctctccctgcgcgcggctccctgcgtgcggctgctgctgggcacggctgctgctccctggccgcgcacgctcgctgcctgctgtgctagctgctgcctgctactgctggtaattctcatcccctgttttctcatcccctcctcccctgcttccctgttttctcatcccctgcatcccctgttttcagactgtgcagcgactagcgacaagccgacaacataatgtcttctcgaaatgaagctccatcttctgtggctggtgagtacgacccgaagagcgatcctacccggaagccacggaagtctactgatccagggtggaagtatggattttggccagatcttcaaaataaagataaggtggaatgcaccctatgtggccaggttgttagtggagggataaagaggttaaagcaacatttggcaggggcatatggagatgcaaagttatgtcccaaggctaccagtggaataaggaaggagatgacaagttatttggaggcaaacaagagaaaaagaccaatgtttctagatgaagatgaagaagatgatgaagtggtggaggtggcagcagcagatggggcgaatgatacatctgatgtggagtctcaagcatccaaggtgcagcctagttctggtacagcagccaaaaaaagacaatcgaccttgcaattttaggcaaacagtaaagcacagccaaagacagccaagtccgtagttgggatgttgcggaaaacaccagaggaggtggtggatgagagactttcaggctcttatcagcccacaatcttggctagtgcaaaaagcaaggaggacaaacactatgtggacatgcagtgggctttgttcttctatgagtgcggtgtacctttcaatgccgcagcagctaggcagtttcagattgcaattgaggccacaacacagtttggttcagggtataagcctccaacaccttaccaactaggcgagccattgctacaagaggctgtgaagacaacaaatacaatgagggaggaacatgagcgtgcatggaaacactatggttgcacactcatgtctgatggatggtctgataggaggggacgccatctcattaacttcttagtgaacagcccagagggcacttattttttagagtccgttgatgcatctaagaagtacatgatgcatacatgcttgctgatttgcttgagaaaaaagttgatgagattgggagagacaagggttgtacaagttgttactgataatggtgccaattacaaagctgcaggcaagcttctaatggagaggattcctactttattttggagtccatgtgctgcacattgcttggacctaatgttggaggacataggaaacttgaaggaattcaagaaaccaattgcacgtgcaaggcgtgtgacaactttcatataccgacacgggagaattcttgctgccatgagagagaaaactggtggggctgatcttgtgaggcctgcagccactcgttttgctacttcctttctcacattgaagagcttgtacaagcacaaggatgctttgaaggctttatttgcaagcacagcttggactgataacagattgtcaaagaccagtgctggattggatgtgtataacattgtcttctccacacagttttggaattcagtagaagattgccttagagcttcagggccactacttattgtacttagggtggtagatggagatgagaggccagctatgccagaggtccaagcattgatgaaatgtgcaaaggaaaagatcaatcaaagctttgctgtccaaagcaagaagactttactcaagaaaatcataactataattcaacggcgttgggagaaacaaatggatcacccattgtatggggctgcaatgtatttgaacccaggaaagttgcatcctctcataagaaatgatgatgatgctactgttggtcagctaagaggttgctttcttgatgtgcttgcaagaatggtagatgatgaggaaactagagacaagatcaattctcaagcaatggattacgagtttcttagaggagcagctttttcaaataagatgaccaaagataacctacaaactatgaccccacgtaagtgtttgtggctgttactagtttactacttactagttgttgctagtagcttgctaaattgttgtgatgttattgcagttgagtggtggcgttcgtatggtggtcgtgctattgagttacagagatttgctagacgtttggtgagtctttgtgcgtcttcatcaggttgtgaacgcaattggagtacctttgaatttgtaagttattatgtgtgcctcctcaagtcctcatccacctacttggctacttttgtatccaatatttcgggattaaatgaccaagtgttttctcttttcttattttgtagatccatataaagaaaagaaaccgattgttacataagaggttgaattctattgtcttcatttcctacaacagaaagatgaaagctaggttccaaaaactatgccagaagaaggggaaaaactttgatccattggttcatgaggacttcaactgggacaatgagtgggctgattctttgcatgtagtccctgaaggtgggcgtgggtgtgagtgtgaccttacatgggaccttgtggataatgccattggagcatcgcaagcacttcgtggccgaaacttaccaagaagggcccataatgtgtattcaagaagaaattctgttgctgcacaaaacatgtcagaggctgaagaggaagatgaagatgaagatgttcgacatgacgatgcagaaatcacagattgtgaagatgaatctaatggtggcaatgatggtgaagaaggggaggcacccaatatcccaggagagtttgatgatgatttttgagcgacgggagacggggagagtagctattgctagattgcattagcatatttgctgcattactaactgcagatagttactattaattatgccattacaaactatctatgtggctatttcagatttggacatttggtattgtgttgttttaaattttgtgacttgctattgttcctttagaaactactttgtggctatttcatatccattattatgctattgtgaatttgtgatgatttctagtttatgagctgtaacagctgtttggttgcttggtattttgtaacagctgtttgtaacagctgtttgtaacagctactaaggcgtcgcctaggcgcccgcctaagtcgcctaggcggtcaggcggtggctgggcgcctagttccgcctagccgccttttaaaccatgactacacccttatacacatacaacaagaaaattcttatctttagtgggattttgattttccaacaatgcttaagcataggaataactttgtggtttgaaaggtgattacatagactgtactgaaaaaatgcccccttttgtaggtaaccgaacgaacatgtcttgccttcattgagctgaatagtagttttcttgatcgaaatttatatcaaaaggtttttcttaatttggcaggttatattggacaccgagaaacaaaaagctactgt

SEQ ID NO: 941 - DNA, 942 bp, Zea mays
  Intron number 1 from transcript GRMZM2G350319_T01 (locus G RMZM2G350319) derived from phytozome v7.0 (chr-ID 9; pos 2 4474354 to 24475295 reverse strand)
tgcggcggaacgcgctctaccgcccgtcgctcaaggttcagcccttcctttgtgtatctcacttcgtgatctcggtttgggccccgtgaagtcgtgtgctacgggtgttcctgttgttagatctgatcatgggagtaggatttgaacacgggacaaattctgtgagatgtttgctgatatgaatctgataatgaggtgtgtatgccaaattttgtctccggggctggaattcttaatacgattttggtagttggagtatgctaagaaatatttcatctgtttgctagattgccactggtggggaaaatgtaacaggaataggctcgaacactgggaataatactccagggcaccattgtttgttttatcattgcgaaatcagtacagtttcatgccactaagggcctaaggcagggtgttcaactattcatcactcatcagttgctcagccatgcaaaatagttctcagccatgtgaaattattactgttttctctgacttttgtatgtcatgtgtacttggaatcttaggtggacttctatagctggttattgaaagctaaaatctgttagatggcacaacacttggattagttcatattctttgttatgcaataagtcccattttgtttttcaatgaaggtgcacaactcgtggtgctggttgtttcattgctatggttagctattagctgtactgatggttatttatctgatattttatcaaatcacagacttaggcaccaatttctagctgttcacagtttgaatcagcccacccttttgctttcctctttgtactttgttttcccaatgaccaaggttgcatgctctgattttcttttccgcgtgattggttcgtttccccgtttgtgcagctgcacccgtggtgatttaaagcacacattgtttggtttccatctgtccgcgtacagcctgagcag

SEQ ID NO: 942 - DNA, 9227 bp, Zea mays
  Intron number 1 from transcript GRMZM2G038554_T01 (locus G RMZM2G038554) derived from phytozome v7.0 (chr-ID 7; pos 1 08433790 to 108443016 reverse strand)
ctcgccccccaactctcgtcgtggcgtcgttcgtcgtgccccctgtgccagagctcgccggtcgtgctcctctgcccaacatcggcaaccttcacagctcggactccctcacctcctccaccaggcaccatcctgaaagggaaatagggttaaccttttcctataattaattttggtggttgatcgtcaacacaaacacatggactaactagtttgtctagaattcatgtattacaggtgcataaggttcaacacaaaccaataaaatattcaagttagggacccaattcaaaagaagcaaaagaaacttgagtgtgttgtggcctggcgcaccagaccgtccagtgtgccaccggacagtgtccggtgcaccaggaccgtacaggggtcaaccagccactctcgggaaacgcagacgcgctctgctataattcactggactgtccggtgtgccaccggactgtccgtgagccagtggagtaacggctacctgcgcgcaacggtcgactctgacaacagcacagtgaaacgcagaagtcagagcagcgagtcagagtggcaccggactgtccggtgcgccaccagactgtccgatgccacaagaagacaaaggcgccaacattcaactgctccacaccctaacggttgggtgacgtggcggcgcaccgaacagcgcacagtacctgtccagtggcgcatcggactgtttggtgcgcccatcgccagcagccttcccaacggctgtggaagtggttgggggctataaatacccccaaccacctcattcataacgatccaagcattccaaacattgcattcaatacaagagcaaaagacttcactccaagacacatcaaatagattgaatcctctcctagtctccaaaatcaactcaattccaatagagacttttgagagggtgttcttgtgttcttttgttgctcttattgcttggcttggcctttttattttctttctcttatcctcaagtgctttgtaagcaaggcaagagacaccaagtgtgtggtggtccttgcggggtcttagtgacccgtgagattaaggaagaaggctcactcggtctaagtgaccgtttgagagagggaaagggttgaaatagacccgatctttgtgacctgctcaacggggactaggttctttggaatcgaaccctagtaaaataaatcaccgtgttcactcgccttatttcttggttgatttgttttcccattcttttcgacttgaattatattctaacgctaacccccgaccttagtgcttgcttaaagttataaatttcaggtttcacctattcaccccccctctaggcgactttcaattggtatcagagcctggtgcttcattagagtctaacaactcgaagtgatttcaggagatcacgccaagagggagattatgaccggcgacaagtccgcaagctcggggaggactctctcaagggagtccggcaacaaacacaaggaggaatcctcttcctccatcaagtcgcatcggaaaggtgacaagaagaaaaagatgaagaaagtggtctactacgagaccgactcttcgtcaccttccacatcaagctccgagtcatctgtcacttctaagcgccatgagcgcaagaagtataggaagatgcctcttcgctatccccgtaattctaagcacgctccattactttttgttccccgaggcaaaccaccatattttgatgatgaagattattgtatgtggagtgataaaatgaggcatcatctaacctcactccatgaaagtatttgggatattgttgagtatggagcgcaggtacctaaggtgggggataaagactatgactcggacgaggcctcccaaattaggcactttaactcccaagccacgtctatactcctcgcctccttatgtcgagaggagtataacaaggtacaagggttaaagagcgccaaagaaatttgggacgtcctcaaaacggcacacgaaggggacgaggtgactaagatcaccaagcgggaaacgatcgagggagagctcggtcgactcatccttaacaaaggagaagagtcgcaagcaatgtataaccggctaaagtccatggtgaaccaagtgcacaacctcgggagcaccaagtgggatgaccatgaaatggtcaaggttattcttagatcacttgtttttcgtaatcccactcaagtgcaactaatccgtggagaccctagatataaacagatgtctcccaaggaggttattggcaagtttatgagctttgagcttatgatcaaagactccaaacacattgtcaacttggagcaaggtgccacctcaacacccaaggtgcaacccgtcgcattcaaagcgacggaagaaaagaagttggagtctacaccaagtaagcttctaatcgacgcctccaagcttgacaacgaggagatgacgctcatcatcaagagcttccgccaaatcctcaaacaaaggagggggaaagattacatgtcccgctccacgaaggtatgctaccggtgtggtaagtccggtcacttcatagctaaatgtcctatttctagtggaagtgatagggacgacgacaagaaggagaagaagaggtactacaagaagaagggcggcgatgcccacatatgtcgagaatgggactctgataagagatccatcgactcctcctccgacaaggacgccgccaacatcgccgtcaacaagggcctcctcttccccaacatcggccataagtgtctcatggctaaggacagcaaaaagaagaaggtacaatctagagccaccccaaatatacaacatctagtgatgaggttagctctagtgatagtgaagataatttaatgtctctctttgccaaccttagcatggaccaaaagaaaaaaataaatgaactaattgaagccattaatgaaaaggatgaactcttggatagccaagaggacttcctcattaaagataacaaaaaatttggtaaactaaaaaatgtttatgatcaagaagtagagaaatgtgaaaatttatctaaggagcttagcatttgtcatgattcaatttctagtcttagaaatgaaaatgctaatcttgtttctaagattgaaaaatttgaatgtttgcaatgactatattttctgtcttagagatgagaatgctagattaaaatctaagatagaacaattaaatatttgcaaaccttctacatcaactgttgagcatgtttccatttgcactagatgtagagatgttaatgttgatgctatagatgatcaccttgccatgattaagaaacaaaatgatcatatagctaaattagatgctaaaattgccgagcatgagctcaaaaatgaaaaatttaaattttctcgtagcatgctctataatgggagacgccctggcattaaggatggcattggtttccaacaggggagcaatgtcaagcttaatgccccaaaaaattgtctaactttgtaaagggcaaggctcccatggttcaggatagtgagggatacattttataccctacaaactatcccgaacataagattaggaaaattcatgctaggaaacctcataatatttctcaccatacatttatgtacaaaaatgaggcttctagctcaaggcataccactcatgttaaattgcctagaaagaaaattcctgctgcatcaaatgagcataatgtttcatttaagacttttgatgcatcatatgttttaactaacaaatcaggcaaagtagttgccaaatatgttgggggcagacacaagagtccaaagacttgtttttaggtacccaaggtgcttgtttctaatttgaaaggacccaagaccatttgggtacctaagaacaaggcctaaaattgttttgtaggtttatgcatccggtggttcaagttgaataatcgatagcgggtgcacaaaccacatgacaggggagaagagaatgttctcctatgagaaaaatgaagatccccaacgagctatcacattcagggatggaaatcaaggtttggtcaaagacttgggtaaaattgctatatcacctgaccattctatttccaatgtttttcttgtagattctttagactacaatttgctttatgtttctcaattgtgtaaaataggctacaactgtctttttactgatatatgtgttactgtctttagaagaagtgatgattcaatagcttttaagggagtgctagagggtcagctatacttagtagattttaatcaagctgaactagacacttgcttaattgctaagactaacatgggttggctctggcatcgccgactagcacatgttgggatgaagaatctccataagcttctaaagggagagcacattttaggactaacaaatgttcattttgagaaagacagggtttgtagcgcatgtcaagcaagaaagcaagttggagtccaccatccacatatgaacatcatgacgactgataggccgctcgagctactccacatggacctattcggcccgatcgcttacataagcatcgatgggagtaagtattgtctagttattgtggatgattattctcgcttcacttagatattctttttgcaggaaaaatcacaaacccaggagaccttaaagggattcttaagacgagctgaaaacgagttcggactaaggatcaaaaagataagaagcgataatgggacgaagttcgagaactctcaaattgaaggctttgttgaggaggagggcatcaagcatgagttctcttctccctacacacctcaacaaaaatggtgtagttgagaggaagaatataactctactggacatggcaaggaccatgcttgatgagtacaagacaccggaccggttttgggccgaggcgattaacatcgcctactactctatcaaccggttatatcttcaccaaatcatcaagaagacatcatatgaactcctaactggtaaaaagcccaatatttcatattttagagtctttgggagtaaatgctttattcttattaagagaggtagaaaatctaaatttgctcctaaggctgtaggaggctttttacttggttatgactcaaacacaagggcatatagagtcttcaacaaatccactggattagttgaggtttcttgtgacattgtgtttgatgaaactaatggctcccaagtggagaaagttgatcttgatgaactagatgatgaagaggctccgtgcgtcgcgctaaggaacatgtccattggggatgtgtgccctaaggaatccgaagagcctccacaaacacaagatcaaccatcaacttccaaccaagcatctccacctacccaagatgaggaacatgctcaaaatgacgggaatgaagatcaagaggatgagccacctcaagaggaggacaatgatcaagggggagatgaagatgatcaagacaaggaagatgatcaagaaattcagggtcaaagactgccacacccaagagtccaccaagcaattcaacgagatcaccccgtcaactccatccttggtgacattcataaaggggtactactagatctcgagttactcatttctgtgaacattactcttttgtttcctctattgagccatacaggatagaggatgcactaagagatccagattgggtgctagcaatgcaagaggagctcaacaacttcatgagaaatgaggtatggcatttagttccacgtcctaatcaaaacgttgtaggtaccaaatgggtattccgcaacaagcaagatgagcatggtgtggtgacaaggaacaaagctcgacttatggccaaagattattcacaagttgaaggtttggatttcgatgaaacttacgcacccgtagataggcttgagtcaattcgaatattacttgcctatgctacttaccatggctttaagctttatcaaatggacgtgaaaagtgccttccttaatgaacctatcaaggaagaggtctatgttgagcaatctcccggttttgaagatagtgtgtatcctaaccatgtttacaaactctcaaaggcgctttatgggctcaagcaagccccaagagcatagtatgaatgcttaagagattttcttatcactaatggcttcaaagtcgaaaaagccaatcctactgtctttactaaaactattgcaaaagatttctttgtatgccaaatttatgttgatgatattatatttgggtctactaacaaatcaacttgtaaagagtttagtaggatcatgatacaaaaattcgagatctatgatgggggaattgaagtatttcctaggatttcaaatcaagcaactccaagatggcaccttcatcatacaaacaaagtacattcaagacatacttaagaagtttgggatgaaggatggcaaacccatcaaggcacccatgggaaccaatgggcatctcgacctcgacatgagaggtaaatccatagatcaaaaggtataccggtcgatgataggatctttattctacttatgtgcacctcgaccggatattatgctttccgtatgcatgtgtgcaaggttccagaccgatcctaaggaagttcactttagggccgtaaagagaatcatgaggtatttagtttacactcctaagtttgggctttggtaccccaagggatccacttttaatttaataggatattccgatgacgattgggtagggtgtaaaattgataggaagagcacatcagggacttgccagtttctggggagatccctagtgtcatgggcttcaaagaaacaaaactcagtagctctttctaccgccgaagccgagtacattgccgtaggccattgttgcgcgcaattactttggatgaggcaaacccttagggactatggctacaaattgagcaaagtccctctcctatgtgataatgagagtgcaatctgcatggcggataatcccattgaacacagcccaactaagcacatagacattcggtatcactttctgagggatcaccaacaaaagggaaatatcgaaattgcttatgttaatacccaaaaccaattggtcgttatctttaccaaggcactagatgagaaaacctttagcaaactttggaatgagctaaatattcttgattctcggattttttattgaaacattgcacacatagctcatttacataactttgatcatatctctttcattttggtacaaatgcatatttcttattatttttgtgccaaaactacgactaatgtgtttccaagtttatttctatactaagtcatagattgaaagggaaatggagtcttcgacgaagacaaggcttccactcaactctaacggtatcatttacccttcgtcgtcaatccacaaatctctcaaattggtataatccttcactcatatttcctttaccaatgggagagaaaatattaaaaatggccctcaaagtctccgtttttggcgattaatgccaaaggggagaaagtattaagcccaaagcaaaaggaccgccaccaccatttcaaaaaatttcaaaataaagttttaattgatgtctttcacattggtatctatgaaatgggaaatttcttcaattggtatctttgaaaggtcaattttcaaattggtatctatttcataaccctattgaaagctaagaggagaacttcatttagggggagtttttattaagtcaaaggaaaagcatttgaaacaggggagaaatttcaaatcttgaaaatgcttcttgcaatcttattcatatacctttgactatttgcaaaaagttattgaaaatattttccaaaaggatttgcaaaaacaaaacaagtggtgcaaatgtggtccaaaatatcaaataaaagaaaaagccatccattcatatctagtgagatttccaattggtttaactccaagtaacctatgcacattctaaatgcaaactagttacatttctacacttattatttgctttggtttgtgttggcatcaatcaccaaaaagggggagattgaaagggaaaaagggttaaccttttcctataattaattttggtggttgattgtcaacacaaacacatggactaactagtttgtctagaattcatgtattacaggtgcacaaggttcaacacaaaccaataaactattcaagttagggacccaattcaaaaggagcaaaagaaacttgattgtgctgtggactggcgcaccggactgtccggtgtgccaccggacagtgtccagtgcactaggaccgtacaggggtcaaccagccactctcaggaaaacgcaggcgcgcttcgctataattcaccggactgtccggtgtgccaccggactgtctggtgagccagcggagtaacggctacctgcgcgcaatggtcgactctgacaacagcacaatgaaacacataagtcagagcagcgagtcagaggggcaccagactgtccggtgcgccaccagactgtccggtgccacaagaagacaaagtcgccaacggtcaactgatccacaaccctaacggttgggtgacgtggtggcgcaccgtacaacacacagtacctatccggtggcgcaccggactgtccggtgcgcccatcaccaacagccttcccaatggctatggaagtggttgggggctataaataccccccaaccacctcattcataaccatccaagcattccaaacattgcattcaatacaagagcaaaagactccactctaagacacatcaaatagattgaatcctctcctagtctccaaaatcaactcaattccattagggacttgtgagagggtgttcttgtgttgctcttgttgcttggcttggcctttttcttttctttctcttattctcaagtgctttgtaagcaaggcaagagacaccaagtgtgtggtggttcttgtggggtcttagtgacccgtgggaataaggaagaaggctcactcggtctaagtgaccgtttgagagagggaaagggttgaaatagactcgatctttgtgacctcctcaatggggactaggttctttggaactgaacctcggtaaaacaaatcatcgtgttcactcgccttgtttcttggttgatttgttttccctctgtttctgacttgaattatattctaacgctaacccccgaccttaatgcttgcttaaagttataaatttcaggtttcgcctattcaccccctctaggtgactttcacatccccagcgctccctgctccagcaagtttcc

SEQ ID NO: 943 - DNA, 1081 bp, Zea mays
  Intron number 6 from transcript GRMZM2G006429_T01 (locus G RMZM2G006429) derived from phytozome v7.0 (chr-ID 9; pos 1 36553979 to 136555059)
ttggaagaaaggcatgttcttattttctcttgcagttcatgtatttctccactccctttgtagttgtatgcacattcttggtcatgaagcttttttagcgtgtgcaaattctttgttcactgattcattcttgatactctgtttaggagcttggggcatatagtaacaatgcagaaatgcttcacaaattatgctgcatgttttggtctcattcatttcccatgtgtttggtgttgcagaaataaaaagatccattagcagaggatagttcacatttaggaagcagtgcagtagaaactactaacctagtttgtccattctctttggttaggtacagttggatgttccagtcctggtgtcctgggaattccattctatgttctcatttcctacactggcacaacctgttctttcatggcattgccattttccctttgtactatttcgatgccttggtaggaatccacttccaaacattattggagacatgttgcatcacttgaatatataggctcaggttgcctttcatgtttaggatttaaaatgtagaggaggaaaaaagagtgagtcacattctggttgtggtcgatgaggtttttacttaaaaattcacaattggataaagcatgtctgctatttgcttcttgcagttccaaaaggaactcctgtaatgtaaaaaaaaatacttttgcttgtatacacttagcttcttgtaacatgttgtcttggaaattaggttgtataccacaagagtctgtttgcttaaattcactagaatgcttgattgcatgatgttgttcctactaaatttgttgtcttattttatcagtagaagtttgaggttccttgatgcagtttgcgctagaatggaaggtctttctaactactaggagcagttcatttatcctatttggctgttggagatctattaccagttgatgttctgtttgctttttgaagaggaaagacatcctgctattacctctctgtctgcccatttgggacttttcagatatcccttaacttgtaatctacacctttcgcaggttgggaagtaattttccaccaaaagcaaatctgc

SEQ ID NO: 944 - DNA, 11558 bp, Zea mays
  Intron number 1 from transcript GRMZM2G092913_T01 (locus G RMZM2G092913) derived from phytozome v7.0 (chr-ID 1; pos 6 818159 to 6829716)
agtctacatgttttgtgaaagtgcattcatcccttttgtgagttttggtgatttggataacaacacatttaaaggtctaacaagtttgctaagtgttgaacaggaaattcagtatgatgaacatacttgaatagtgtataatgatcagtgaacaaggttcaacacaaggtcaaataaccagtgagacaatgcaaatggatataatatggtctctatattggtttgaatatatggacaagtcctgagaaataactatgcataaatatgatcataatagaggttgaagtgattaagaggattggtcaagccaaagtgaataagatatgaggaatcgtgaattggcttgaccatattactattagtccatatatgaatatatgagaatcaaactagagcttgattgatcttagcagttatatctagatgacattcaagcaaggttcacaatattgaagaaatgattctctcaatggatgctcaataggatgtgactcaagaatggcttgatagggtgaagatagcaaggaaagggcttcgaggaactaagcgaaggtgaaggccaagcgacgacttgtagaccgaggtaccatggctaaggtgaagaagagagtacttgcactaagtcgatgaactaatcagctatgaagagttacaacatgttgatgcatcagtaaggtgacttgaagccatgatttgaactcatatatggttaaatggcacaagtcacaggctcgatttgtgtttgcttcaaaaggtgagacaaagatgtttgtgatccttatgaagcaacatcatggagaaatcacacttgagacaccaatgactcaaggagtttacttaattatattttatttaacttgagtataggaatcgtcgtactatcaagggggatccaaaaagaaggttggtgttggtactaaagctcaaaatccttgatctaaaacttccattttacccttgttaatccttagtgaaagtatgtagtacaacctttttaagtctatcttggccaaaattgttttttggaaaaacaggttcaaccggttttaaaacaggttcaaccggtttttgcactgttcacctttttggaaaatactggttcagccggacactcaaccggtttttgtctggtggaaacaggttcaaccggttttaaaacaggttcaaccggtttttgcactgttcactttttttctgccagtctgctgtgtcagccaaaaagttgtgcgcaactttttgaaaaaccggttcaccggttttgggaccggttcaaccggtttttgggcagaaaagtcaaaaacggctagttttggagccccacctatatatactcactcccacctctctcctccacagcagagcacgacttggactccatttctaacctgagaaacacctcccactctctctcacacacctcttgcctctcccatttcaaatctttggagagaaatctttgagtgagattgaagagctgcgattttggtgcttcatctctaaatccctcttgctcttcttcattcgagctttggtactacatcgagttctttgtggattcattactcttggagcttctagctcctagacgactaggtgtctcttgtgagtctccaaatcttgtggaagaccacaagaaagtttgtattacccgctcgtttgagcaaatattattgtgtgggcttgacctttgtggtcggcaaagggaggattagggttgaaagagacccggctctttgtgggcgcctcatcgaggaagtagggcaccttggtggtgtgaccgaacctcgggataaatcttgtgtctcttgtgttcttgctcattgtgtttgtttgtgttcttcgttctctcaccattgcgtggaagatttgtttatatctttttggtgtgtggattttgagaagtgcccttctcagatctactactttgaaccctgtggatcatttagaacatctcatttccaaagtcaactgggtgaatttcgagatcaattcagttttacccagtttgcttctagtttttgttgaaaaattttccacttgcctattcacccccctctaggcaactttcaattggtatcagagcctaatccttgttctaacgcttaaccgcgtgaggaaagatcatgtcggggggactaagaaacaaaagtgcttctaagcttgaaaaagttgaggttgcctcgacttcatcttttggtgcagatgttgatcctagggcaatagatcttgccatgagaatcgccgaaaggatgttcctcaaaatgaaggaagatgaggcgaaggacaaaattgaagaagaaaatgatcgatggagaccaaacgacgaatccacctcttcacaaggttcgtctttcaaaaccacttctcatatgtgctttgttgctaatgagagtgacagtgaaagcgaaagtgagggtgaggaggagcatgaaagtgatagtgaagatgaggatgatcttcaaaaattcttcgctcaactaagcaagaagaaccggatgagcttgctcaaactcatgaaaagagcagaagaacaaaaggaaatgcttcataagcaagaagatatcctcatcgaaaaaatcaaagacttggagaagttgaccaaagagcatgagaagctaaagtgctctcatgatgatttggtccaaaggtatgatgacatttcaattgagcaaattaaagttgttcatcattcatcatatattgctcaattagaaaataaaaatgctatgctcaagaacacaatagaaaagataaatattgaaaatgtagctttgcaagaaaaacatgatatgcttatgtactctcataataaatttctggattcatatatcatgttagaaatggctcatgaggttgtgttaactaatttgaaatcataccaacctcacatatgcacatgtactcaaatagaaactatattaccatgtgctaacaattgttgttatcaagcaaaccaatcttccattgagctagaattttcaggaacaagtaatgtttcctatgcaaaagaaaacaatgagctcaaggaagaaaatgagaggctaaaaaggagcttgattcaattgaagggaaagtgtcatgctcaaccttctcaagataaccatgataatatggtgaaaaagcttgagaaggggacaatcgtagcatgcacaaacccccttcaaaagaatgctaagttccccaagaaaggcatgagcaaacatcaagagaagaaagccaaagctcatgacaagtgcctcaaccacacctccacatgctccacacaaggtaacaaacaagtcactcttccaaataagagaagatgcgctagaaagtgttatcaatgtcatgagaagggacatgagattatgtcatgtccctacacaaaggatagtggcttaactttagaaagaaagaggctcactaaccatgtagcaaacaagaagcaaggcaaaaaggagtcttgcaaaattaaaaatcagatttgctacacttgccgaagaaagggacacctatgcaaggattgtcccaagagtgagtatcctaagcctaccatgtcaactcattcatattcacttaggagacccaaaaatgacacttgtgctagaaaggtaattagttcacctaaaactagcacaaaggccatttgggtgcctaagtatttattagctaaccttggtggacccatccaaaaataggtaccaaaatgtacttaataagttttgcaggtacctagagatggtatgaagctttggggtgcttgagcggtttaactcaattcttatctcaagctatcaatcttacattgtctatcctttaagattgacccaaagatgaattgagttgttatatcactaactttatattcatctctagcaagaacttgtgttgtagggaataaggattaacctttgtgggaatcaagcaaaaggcctacaaccaagtgatatccaaaggacggtaacaattaattcttaagtgcacattgcttttaattagtatattcctttgtgtcttttgtagctacataggaaaaataaagcacttgagaatgaacttaaaagattttaccgtgccttggaaaagttccaatcatatggtagattgcaagtttatatttttatattgtgacaatttacatgatttaaattggttgtatttatcttgtggcatatttcaaatttatcatcgtattattgccatgacctagacataaagaggattatcccatgttcttaaatgaatagagtgctaagtaagaaattcaaattcttaaagcacttgccaaaaggggaattctctatatgactagagttgtgatactaatgtttttatctaagtgtttatgtagtctcacaacatgagaatgtgtttctcaaattgaacgtgtcattcaacattcaaagaagatcaatccaatactatgtgatgtattctctcttatttaaattggttttgagtcttctacattaatcactcaccatgttatgaattaaacttgccatgtaaacttaattaaataatcatgatattttcaccttgtttaaatcagtgttatgcatgatgcttgtaagggtaatttagttcatatcatgaggtttccttattttagtaacctttttgtcattcatatactagaggttgctaaataggaaactattgcttgtgttactaatgcaatctcttttaagctatttcatgaaattcataagtagatattgtgctctttcaattggtaaaatcacaagctttaaaggttaatcttcacctaaaagaaagattaggaatgctcaaggcaaaggtatggaactaattgcttcaattggtagttgatcaatagtagttcctttcaagtggcatactttcaattagtaataatctattttatgaaaagaaatgtcaatatgaaggttaaattccttttggattaaatttgtaaattggtgcatattgttagttcactcatccatgtgcattaacttaaaaggaatttaatttatgcctttatgcttcataaatgatgatttatttgacattcatatataaatatcatcattcattaaatacttcattgtactactaatacctcttttcaaagtgcttttttactagttttaaaaggaaaagagataacaagctaaagaaggaagtctccacaattgaagaaaagaagaatacttagatgacaccatctcatatagtaagatctttcaattgatataacaaatggtacattctatatggtggtaagtattcttaggcataagttaattcattgcaaatttttcatgccttgaccaatatatgtaatgtactcctcttgagaatcttcattgaattgaaagtgcatttgataagtcattcaaatacttgatgcacatatctagtgggagaacattatatatcttgtgtcgtagagaataagtttcccttgagttagctatactaagacaatccaattgtaaatttgtatgtcattcttatggattgtaatctttgttttcaaaatagctactcttgatgcattttaaatttccttatcgttaaatctaaaagtgcacaagaatcatttttgttgatattcatcacatacatatgcactaacatggatatgatttttaaactgtaaaaggtacaattagtgatccatactctctaaatcttgtaaacctatattttgatatcttagaaatctatttcaatcggtatccatatgcttcacattcaattggatcactaagttgtaaattccatgcataacttgtctttatgatatgaatgtttgtgcgactaaccttgataagctaggtgtacccaaggtcaagctaggttcatcatcaagaaggcaacacaatgatgtatcaaaaaaagggagaaaaggcttctattcttaactctagcttttatctgtgtgattaaatattgacttgaaaccatgtaagatggttgtcaagtatatgatcactccttcaatggatcaagttgggtgctcgataatggatgcataaatcatatttggagatagtagcaagggtggtaacaactgaatctcaagtgcatattattttcaaatcttatatcttttgtgacttgtgtagccactaaggaagaagaagcacctgaggatacacatcagttgttgattatgaaataaaggtcaaattggaagatgaatgaatattatcatatggtcaacaatccaaaattatgtgacgtattctctatctagttaatttggatttgattcttctatattagacactcaccataatatggattaagtcaaccctttagacttcattgaataaccatgcatattatccatgtcattcaaaatatattgtgcatgagggttcaaggaaatttagtccatattatgatgtttctctattttagcaacacgcttgtcctccatatataaagggttgctaaataagaaactagtgcttgtgctactaatgtcatctcttgtgtcgagtttatccatagaaaatctatgttaagagatggtgcttgttttaaattggataaatcacaagcttaaaggatactattcaactaaagtaagatgaagttgataagaggccaaggtatgaaaacttcctctcctttagttgttttagtattctatccttagtgggatgtaccatagtataggttaatttccttgtaatataaaacgttcaatagtgcatataactttgacatcaactatatgtttgcactaatttaaaggaatttaatctatccttttgggtttcaagaatgatgattcattctcaatccacatataaggattatcatttgtgaaaccctcccttgtgtttctaatgctctcttttctaaatgtttcaataaggtctttccaagtgctttcaagatggattcaaaatctacgaatataagagtattggttgtttcaatcattgagtttcaatgggtctcatatcaagtatgattgaaccaagccaagatgaatgaagttcaagatcgcctagttggatgaaatcataaagagaaaagaaatcacagtgattcaagaagggagttacactttttgtcaaccaaataatgaagatgcagtgacatatttatatgatatccttcattatgaggtttgaggttcatattagcatgctttaccctttagaatttcaattgatatactttcagttcttaaactttcaattggtttaattttcatcatctatgtaaagcatgttatgttaaaccaagatatagtgcaaacatctcctttaacctcgtattgttgatgtgcatgggtgtactttgagtactcttgcatgcacaaattgagggagagtttagcctatatcttgtgagactaatgaattctttcaagttcatgttgtgtagtctcacaccttggagaacatcaaatgaggatgagtggttccaaggaaatgatcaaatatttaccacatgtcaccccatggattagttctattggggaacgatatgtgttctctagcataaattcaattgtttcaaatatattatgccttgaccaagatatatgatgaactcctctaagaatcttaattgaatcaattgcatgttacaagtaattcaagtacttgatgcatacatttagggggagctcattctatatcttgtgtccttaaagactaacattttcttttagtgaatttgtgtagttctttgaagagaatgagtttctcttgatcgtttaaagaggataagtttctctttgaaatgtcaagtctatcaaaagctaagatagaaattcatgattataatgaagaccatatgacatggaacaaaggtgtgtcactccatgaactattgtattacatttgtgtatctaggctcttacatgctagtgtgtgcatgtatatgcaatatcttaagtcacatcataaggttgcacttgtggtgatgattaaagaatctctagatatttgattaatacctcttgtggtgatgtcataagttagtattaagtcatcttagtgaggtatgagtcaaatatgctaacttctcaagaatcttggcttaaaatattgcatatcatgtctattagtataccttttgattatgagtaattccttaaattggtgcaatttcatattttcatactttatttgtaccaaggttcaaattgtagaacttaatcccctggcctcacaagtccaagtgcataagctaaacaagtattcatcacttgtatgcacacatttagggggagaatggtctataatttgaatctttgagactaacttcattttcaagtctattatgtgtgtagtctcaaattagaacggaattttcgggcaaagataatcgcttccactgcaaatttgatgggtatcaaagattctttgctccaataaatgtatcttctatacatttcataatagaatgagtttctcttgtatatgctactccaacgtcatctaaaattggtaaatatgtatcacatccttttggattgcaaatgtctgaagtagcatagcttataaattctcttgtctagaacttaattgattaaatagtgcacatgttccttatgttgcatgattatgttcaattgatactccttgtatgccaatggtactttaagttgtaaataagtactctcaacaggtatcaattgaattcatatatatgtgtgcactaaaacttgagaagaacttagtataatatgcaattagtgatctgattatctatcaaactgtatcaattggtggttttcaattgatatttttcgtacatgatcactagttgtataattcatacttgtgcaatcttcatgatgcctcttgttatgataagaaaatgctaggtgacatctagactcgaggtatcaagatttatctttcaattagtatgacaatattcatttgatatcttggacctatgtcacaattatgccaacaagagattgcaaaatgaactctaaatacaacacaagtgtggaacacccctttgaaaaggtaaaacgcaaaggtacatcacttatgacacttctccattacctttgtgccatataaggatccttttcatgatagtgtgttcaaatcttgattaatcataatttctaccctttatattctttatatctttttttttggagatttatgacaaagggggagaaattgtgcattaaagcttacctttagtcttatgtaactaagtgtaagaagacttttgaaaagggggagaaataattgacaaaagggggttgaatcataagtaaaacataagatgaaggaaattgatgagtgcataatatgtcatgagcatcacgtttatttatgacacaaagcaccctatgaatagtatgatataagttgtcttcactctttgacccaaatatgtggttttggcatttgagtacaaaattggtattttctgaaatgcacatatttagggggaggaaactatatcataggattcaaaatcttatttatcaaatcttatgtaagctttatatgtgttgtcatcaatcaccaaaaagggggagattgaaagtgcattcatcccttttgtgagttttggtgatttggataacaacacatttaaaggtctaacaagtttgctaagtgttgaacaggaaattcagtatgatgaacatacgtgaatagtgtataatgatcagtgaacaaggttcaacacaaggtcaaataaccagtgagacaatgcaaatggatataataatatggtctctatattggtttgaatatatggacaagtcctgagaaataactatgcataaatatgatcataatagaggttgaagtgattaagaggattggtcaagccaaagtgaataagatatgaggaatcgtgaattggcttgaccatattactattagtccatatatgaatatatgagaatcaaactagagcttgattgatcttagcagttatatctagatgacattcaagcaaggttcacaatattgaagaaatgattctctcaatggatgctcaataggatgtgactcaagaatggcttgatagggtgaagatagcaaggaaagggcttcgaggaactaagcgaaggtgaaggccaagcgacggcttgtagaccgaggtaccatggctaaggtgaagaagagagtacttgcactaagtcgatgaactaatcagctatgaagagttacaacatgttgatgcatcagtaaggtgcttgaagccatgatttgaactcatatatggtgaaatggcacaagtcacaggctcgatttgtgtttgcttcaaaaggtgagacaaagatgtttgtgatccttatgaagcaacatcatggagaaatcacacttgagacaccaatgactcaaggagtttacttaattatattttatttaacttgagtataggaatcgtcgtactatcaagggggatccaaaaagaaggttggtgttggtactaaagctcaaaatccttgatctaaaacttccattttacccttgttaatccttagtgaaagtatgtagtacaacctttttaagtctatcttggccaaaattgctttttggaaaaacaggttcaaccgattttaaaacaggttcaaccggtttttgcactgttcaccttttgggaaaatactggttcagccggacactcaaccggtttttgtctggtggaaacaggttcaaccggttttaaaacaggttcaactggtttttgcactgttcacttttttctgccagtctgctgtgtcagccaaaaagctgtgcgcagctttttgaaaaaccggttcaaccggtttttgggcagaaaagtcaaaaacggctagttttggagccccacctatatatactcactcccacctctctcctccacagcagagcacgacttggactccatttctaacctgagaaacacctcccactctctctcacacacctcttgcctctcccatttcaaatctttggagagaaatctttgagtgagattgaagagctgtgattttggtgcttcatctctaaatccctcttgctcttcttcattcgagctttggtactacatcgagttctttgtggattcattactcttggagcttctagctcctagacgactaggtgtctcttgtgagtctccaaatcttgtggaagaccacaagaaagtttgtattacccgctcgtttgagcaaagattattgtgtgggcttgacctttgtggtcggcaaagggaggattagggttgaaagagacccggctctttgtgggcgcctcaacgaggaagtagggcaccttggtggtgtgaccgaacctcgggataaatattgtgtctcttgtgttcttgctcattgtgtttgtttgtgttcttcgttctctcaccattgcgtggaagatttgtttatatctttttggtgtgtggattttgagaagtgcccttctcagatctactactttgaaccctatggatcatttagaacatctcatttccaaagttaactgggtgaatttcgagatcaattcagttttacccagtttgcttctagtttttgttgaaaaagtttccacttgcctattcacccccctctaggcaactttcattttggagtcttggtttagtcctctgtgtattcg

SEQ ID NO: 945 - DNA, 2826 bp, Zea mays
  Intron number 2 from transcript GRMZM2G011667_T01 (locus G RMZM2G011667) derived from phytozome v7.0 (chr-ID 1; pos 6 6795491 to 66798316 reverse strand)
ttcaggtagctattcacttgccacttgtgaattgtgatctcatctcacaaacgtatcgggcacatgcggtgatatatgcgataaccaacaggataatgatattgatacattatttggacgactgagttatgttaaagcggattatgctgcatgtttgacgtgagtttgaaaatgaagtcaaattctcagtctcatttagcttaaactgtttaccaaactgcattggtagattatgtacgaattttagttcttgcactgatttcatatggctacatctgtagggtagaatttgatattttcaggatcttttacttcgaatttcttatgcctacaattgatggtgcaatttgctaatcatttgcagggaaaggaagtcataggtcatctatttactattactcttaatagcatttattaggacatgtttaaacctccaaaactaatagttagcaactaaaattacctgaaaagtttagaacatgttcactaaagaattagttaattgttagttataccccctaaatagctattaatgttagctgacttaacctagctaaaactagctaagggcatgtacaaccctgagacgacgattcagttttccatgtacaggagacagttaagaaattgtatgataaaaccctgagactatagaccataaatgcagttaagacacaatatgtatagagagtcgtgtagagacgagctctttccgaagagcacgtctcttaaattttttcagttagccccctagagccctctcaagagccccttatttaatggagttgtacatgccctaacaggtggttgatgaccaagttgtccccgaccatttctacatgttagcttatcagaaaaagagatacagataataaggatatttagcttattagaataatctattaggtttagacttagaacccctagttaatagttagccagctaatagtttgccgactaatgtagctaacaacttgttaccttgctaaaaattagggtggaggtttagagcaggacatcagtggtctaaactaccgtactgatatgactgaatattcctaaatcacgtgagttacaacgatgtaaggctgtaactggttccttttgttccgcatttgctcactatttttcttagaaggaaacattgccgtttattttttatctgaaagttgtatcatcgccttgtattcccatcagtgctcatgtagtttaccatagcaagttaaatgaagggataatttaactgtataaggctagtttagaaactcaatttcctttgaaaattggaggggattggggtctaattctaaggatttgattttccaaagtagccattagaaaagaagaggactgcgggtggagtaaaatcttctcactcttagcaaatccgaactctggcaccaataattaataggggcaaaatcatgaataaaatcgaggaagtacgaccgctgaggcttatcggatatggcagcactcaaatatgcagaaattgatcaatcatttctgttattcatttgattcttctgtttcccaagagggagaaacgtcgtgggatgcaggccccaaagaacaacacagaggtaatatttctggggctatttgtatttacatatgaggtttaggtcaaatgacagataatgtcctgcaagattttggaactggatttgtattgtataaacctgaatataatagctattcttaaaattttgaagtagtctgatagcattattgtggcatacccttcctacgtaaattcaaacaaggcaaacacattttactgtgctttctttcacaaggttcttccttgttactgaaacaggagtcttgagtaagttttttaagctctttggaatcacgttgtcttttggattgcctgttttcacctctcatgaagtcatttacctaagcctgagcagtagttatgtgattatgtttccttttgttatgcttatgtcagaggacgaatcctagcttgttagttcagttaaaggcgcgatttacaaagttgctgttacattatgatggaaaactaacatttacgattctttgaattgaatcaatcgattaacctgatatcactaggtttgttcttagtccctaattgtgtcagagtttaggaattgatcattaggggttattcaatgtgcgaacatctgaatgaactagaggcataagaactgagccacacacataaatgatgttcctttcaacagcagtcagcaacgcacaaaccttcattctatctactcttgttatagttcaatgtattttcaggctacatctcatatatttgtttggataaaaaatctataatatacgtaaggataaaaactatccccctccccctttccacccccccaacaataatcatggattaggaattgcatacttccataagataggtcaacttcttctgttatcagtagataattccattggtagagtatgttacaagtgatgcatttaaaatatataaacaggaggcgtgcgcaatctagagatcaactaccgtccaattatgattatgatatactccgcataatttaattcattcttttgtttctggaactataaactgttgcatgtccagatgtagttcagtcatcaggctcatgatgtcacaaatgtaccttaatatggtttctatgaatttaggatagacttataactaaactttgaaaattggtggaatgtcaattctaaacctaataacttatctactctactaagtaaattccaattctttcatgaggttttacatacacttgttatgctcatgcttctacaggtgggatcctcgagccgacagccagagccagagca

SEQ ID NO: 946 - DNA, 11176 bp, Zea mays
  Intron number 1 from transcript GRMZM2G517332_T01 (locus G RMZM2G517332) derived from phytozome v7.0 (chr-ID 8; pos 9 3923679 to 93934854 reverse strand)
tcaggggtgagtatcactgacaagttgtcatgaaattagcatttaaaggccaataataactagataggtacattaacaatgttatgaagtgcactatatttattgagggcactagacccgaatatataccaccgatacatgatagagaccatgtacaacaaggactgtacatatgataccaaatacgacaagaacacatacataggcatctaacaccctctcaaactcaaggtggattaaacaattgagtttggagagataaaacctatgttgagatctggtccacgctttcgtgaaatcaaccaattgaagctctaaaggccaacattttcaagacggacgacttgtcgttctggctgaccgacttgggcgattaatcgtgatagggcttctacaagctgtagttcacgttcgatggcttcaaggatcccctaaaccagctcaaccgttgtgagaagttattttagggccaatataatctagtgtcagatcgaatttggcttgcctcataccatctcgtcgctgctgcccaaatattatgtcctagagtaggatggaggcatgccgacctaggatcgtttcaaggacctttgtcatctatgcttcagcctggccatctgtgtcaatctacctgcggagtttgcttgacttccgttcctctccatagtctagtccatagagcgtttcaacgtgctcctatgccatgcatgcaacctgatacaagaacaaaagaccgagctgttcgtgggcaatggtgattgcgtcccctgcaaggtggatgcagtatgcgttgccatgaacatccgctgcaaggtcgtgcgattcctagtgtttgatgtcctcgtcatgatgctcatacacccgtgtgaggtgcgtagatgacatgaggcgcataaccgtctgaaaatcgtgtggctcctagagttcaatgtcgatgcggatgtgcttgatctttcgcgtcccctgcaaggtggctcctagaatttggtcgcctagctcgtccatgtcatctccgcatgacttcaccactatgatagtgacaaggtggatgctgtcaccacctagctggtgctttgctcaacctgaggccttcacaggttcctaggcctcgccgctactgtaggaagttcttcgcaacttcggcaccattgcagcacccatgatgtgcctcttgtgcaatgatacattcacttagaccgacgaagttgccatagcattctgggtgctggaacgttccatgacataactgattctctagatgaccttctatgacaagctctttgtcatcgacacgacgcctcaggtgttgggttcggcgtggtactgcaccaagatgtcaggctgattgccttctttaacaagccatttgctgcctgccacctcaaattggcggcctacaaacgtgagttgattgttcatgtgtaggtcgtccgccactagtggtcatacctttgggactgtcgcttcctcggttgcaccaatcactaccacctcaagttcctgttggaccagtgtgtgtcgatagtgttgtagaatcaatggattagcaagttatttagctttcacttcacggtggaataccccttcccctcacatcgataccaccgagttgcacgggaacatcgttcaacctccttgacgagattcgcgcgatgatgaccatggacgaaacacaactttctctagtaactctaggacgacaagctttgggagccctagcgcgagtccgaggcctccagcactgctcgtgcatcttcgcccaggcataataggacctgtgccatcaagtgctctccctggcccatgcaacggaccatgagggcatcttgaagaccttacaacggctacgaggcaatctcttcatccccggtgatcgcatcctagtacgcgaatttgtgtttgtgtacaacatgccaacgcaacaaggcggagactccacaactggttgtcctcctgcagcccctcgacatgttgtcacatgtgtgggacgacatttcactggactttatcaaggccttgccaaaggtctacgagaagttcgtcatcctcactatcgtcgtcgaccgcttctctaaggctatctctagtagctctcttatcccacctcctatctcacctcatatttcaaacttcactatgtaaacaatgctctctacagtgcaaaaaatgttttgcccagccatatgcacgatttgctggacacaacctaagtacgcacacttcatggtcctcggccacccttactccgccacatctgttgcccatgccttttttgagagggtcttttgcatgcatgggtttctctccaatctccatcatatgtctagcgtgatctcttcaagatgttgtatgtcactctatgcaccaacacaaccttccacctgcagtgcagacttccacttgtagatggatggccagtcagaggccatcaacatggttagtcgccatgtacctaggatgtgtcacttggaccggccttatgcttgggtcgactagctaccatcgatggagtactactacaacatgttccacaccgtcttgtgagccataccataccaggtggtctatgctagccgcctcgttgttgatgccatacacgacagacaccacacaacctgatacgtggacgccttgcttcgcgagcgtgatgacttcgtagaggaggtctgggagcgccttctccaagcgctactatgatgcctaccaccgcgatttggagttcacggtggatgactgggtgtggctgtgccttcattgcctaacacattcacttgagccccttggtggaggggaagcttagtcctcgttatgccggttcattccaaattctggagtgcattggccaggcttgctctagctaacagagagcactcacctccatgtcagctgctcatgccctaccgcggccaccctccaacatgtaccctccaacatctccaccacccatgtcacctacacatgatggccgtcttctgctggcccctgagtgcatcctgctcactcaactacgccaggatgtggcacatccttgtccagtggcgggggatgtccagcaacaatgccacttgggagcaacttgaggccttcaagaacctctaccccaatgttagctcgaggacgagttgcaggctggtagagatgttatgactagcatatagtatgagaggcgcaaacacatttttggctaggagggccctcgaccattaagggattgttggagcaaagacagagcgccccctcgatcactctcacttggcacactaacctattgtcgaagtgtcgggtacagggccacgaccgcagggaagaagcgaaggctaagcaatggaccccgaaggcgacggggtccaccccctttggcttaggcgacgaagacaaccagatggactcacctactggggggtggccttcgcacaacacgcaaagacttagcaagatcaagtcctcacaccatgtggtcgtaggcggcgacgttctgctgatccgagtccacttgtcggcgacctaggagggcacaaaacctgttgtaatagggaagtctgtacttatagtcctgtaattaccccgttgtacagtgcacgtcggaaatatagttggtagcgggggcataacagtatttaggtccaccaacccccggctacccctataaataccccggtcctgtagccgcacagacgacacttgacaatacatttgcgcttctagcctactgttttgtcgtgccacctgtctaccagttcctgagtgtctaggttacgattttccgtcccaacatttggcgcccaccgttcgtgttccgaacaccgagtcccacgatggctcccaagaaagtgaccaccagggctagctcctctctggacgaggcccccaaggcggccctcgctgacaaggcaaagcaaccctcgtagacaacaccttgcatgcggcagctgagaacagcggggccgaggcagtcagcaacaagcaccctcagcacgaagaccccccaccccatcctagaaggcaacatccacacgtgcggctccgaagacctcccctgcgatgacccgccacttggatttgcacccatggggccccacttagtccaataggacggagacaacttgtaagatggcgaagacttgggaattgggaatctcagcagaggaccaactgaagctgcgtagccttcgcatcaagactggccatctccagaggcagagggaggtcctcacaaccaaaagacagagaaccaacatgcaagtcagaatcaagcagctaatcatggaagaagagaaggcaagggcactagaagaggaaattgcataatgcagcacgaagacccccttcatcaacaaccagctggggcaacttataatcaaaacaatcaccgcttgcaaaggctagccccaatgcaagtcgctttccaagggctcaattaccttgacgagtgcatccccctctctcgcacaactccaggctacatgatggccactcaattacagagtagacacctaccccaagtacaacggtagttcagatcccactcagtacataatgagttatcaggtagccgtcgtatcatcggggggagatgattgcaccacggccaagtcattcatcatcgccctcaaaggccttgccctcacatggtactcaaggctgccattgccaccactgtcaattgattcctggaagaccctccgtggcaaattcctgctcaacttccagggttacaggtcttttaccgacgtattggccgagttgtctctctgcaggtaactggaaaaagagagcctacacgactattacaaaaaattccttttgctcaaatcgcagttgtcgtcggtcgacaaccaaattgcaatccattacgcgataagtggcctttgcgccggacaactatacatgcattgcaccagagatccaccatccactcttcaggaactataccaactcttcgagaagtacgcccagtccgaagagctccactacctaaaggtggaatggcagtgcaagccgaaagagccttcgcagaccagcaagccatggaccaggggtccgcagcaagaatatccccgccaagaaaggggtcaacaacaactgcaagttcacaatatagcaaaccaacatcaaccaggcgaagtcccccctcggcgttgtgattaccctccgcagcaaggctgcgttggcggagcagcgaggggcaggaaacgcgggagaggcccccgacaacaaaggaagctttactgcgtcttccaaggcgaagatgtaggtcaatcaaccagagaacgcctagtaaccaaagaggccaaagaccgcatgactggagcagtccctgcaaacaaccagcgagccatagctcacacctatcatcaacaatatcaccatcactacgaaaacaaacacctaccccacccccaataccagccaaactacaaccaaagaatcccccaacacccacaactccaatatcaagaaaggctaccactcccacgcccaccgctcccccaagcaaaccagcaaccccgtcaaccaccgcctccaccccaaaacaagaagacgactttgccaatccacccttcagaggggttatccacatgattaccggagggtccagttcagacttcaagaacaaacgtcataaaaaggaccattatcgaagggtcaaccacgttgctgtcacgagaccagtagtccagacgaagtggtcccatgtcccactcacctttgatgcaagagacgttgaccctcgctgcgcgccccatgcagacgcgctggtcataaactgcaacatggcaggccgggacctacacaaagtcctcgtcgacaacggcagtcaggttgacatcatattcctacatgccttcgatcgcataggcatcaaccacagcctactcctaccagccgacaacccattgtacggcttcggaggcaaaggaacgttctcgctgggcaagatagagctatctctctccatcgacacccctcccaatgagaggtctgaacaagtggtccgaacaagtggccccctttggtatgggccacctaactccaggaccagatgatactaattttgctgactggtggggaatagtgaccattcaggtgcacagaaacaagagaaagggagtcaacagtgccattattttgggagcatggtgcctttggttgcatagaaacagagttattttcgatggagattcaccaaccattggcaaggtgcatagaagattcatcgacgagctgtccttatgggtgctggctggtgccaaacacctcgaaagccttggtcttgctgccgctctaggcgcagcaggctcgacttaatttttccattggtcgtctttttgtatcttagtcctatggacagttttatttatgcttgttgctggccaccatagggtgggtttttgtactggtcctcttggaccttaatttcccttcttaatataaggatgcgcagctctcctgcgtttttcgaaaaaaaacaatgccataatgggaagagggtcaataaacaaactcaaggcaaccatccacgaactctatctatgcatgaaaatcctaggcccccaaggtgcaataaccatatacggggaccaacaaaccgcccacaacatagatagtgacttcgtcccagggaaacgcaatgtgcactgcctcaccagtgagggcgaaggccctagcaaccctcatataaaaaaagcagaaacaacaaaagctcaaatttagagcaacgaagaggccaagaaagtccctttggatgcctcaatgccaaaccaaacagtcttaatcagcgaagaccttaccaaagaagaggtgaccaagcaactatcctgtctcaatcgaataaggacgtctttgtatggtcagctttaaacctcattggcgtcagtcgtacaatctgttggaataagtctcgtggtctttagtactgcagttcttgactgctttaaggacagcgaaggacagcagcatctactgttgctgttggtctttactgcagtttttgactgctttaaggacagcaggttgggtagaggacaataatgctttgctgcagttctttagactagaagacaacgcatggtcttgtgaaggacagcatgctgcaggacagcagcatctcctttagtacctagaggacaacaagagcttttttgactgccctcctttagcatctagaggacagcagggacaacaacatttctaatactgcagagtagtgtgtagtgcagcccctagggctataaatatgtgtcccaacctttagatgggtatggtgttgtgtagtgtttgagaaaataaacagaaaattgcccaattcatagtgtcatcctctcgatgagagtaagagtcacgttgcttacacaatcatcgagcacggtctaagcattgacccctccatatggccaaaaaaccagaggctacgcaaaatatcagacgaaaagactgaagccgcaaaagttgaaatccacaggctgctcgaggctaagtttattgagccagttgactacgccacctggctcgccaatgtagtcatggtgaagaagaaaaacaacagatggagaatgtgcatagacttcaccagcctcagtaaggcctaccccaaggacaattttcccctcccaagaatcgacaaaatcgttgacttagcagcacggtgcgaagtcatgttgctgctagattgtttttcggggtatcaccaaatctatatgaaataggaggacaagcgacgacaagcttcatcactctcttcgaaatgtactgtttcacacgtatgcccgaaggcctaaaaaatgttggctcaactttctcaagattgacaaaaaccatactagacgaccagatggggtgcaacgtattcgcatatgtcgatgacatagtcgtcgcaagcaaaaacaaggaggatcacctcgccgacctcgcagaaacatttgcaaatatgcgtgaagccagacttcgccttaacccaggaaaatgcgtattcggagtctgcaagagcaagatactcagttaccttgtatcacacagaggaatagaagcaaacccaacaaaaataaagtcgatactaggcatgcaaccttcgtagtcggcaagagacgtgcaaaaactgacaggaaggctagcaacactgaacaaattcattttgcggccaatagagcgaagcatgccctttctttgaacattacggcggacaaaggacttcacctagggccctgagcaggcagcagccttcgagtcacaaataatatttgtcggagcttacaactctagtcagtctaggccccgcatccccactgacgttgtatgtcgcagcttcgcatggcgcgaccagcgcagtaggtgcaagaaaaaccctaggacagaaactgtaatgacaccctatatattttgttttcgaagtcctcaccaattcaaaatgcaacatgaccgagatggagaaggtagcttacgcagtcctcatggcgtcatgcaagctacgccattacttcgaggcacacaaaataagagtgcccacagatcgaagcctgagcgacttattcaacaattcggaagactccaccggaataggcaaatgtgcaacagaactcttcggctacaacatagtcttcgagtcgagaagtgcagtaaagttccaagccctcgctaacttcatagtagattggacagggtcttcatcctccaaccgcccaaatgcagaagtagtctggaccatttattgtgacggcgcttggtgccatgcggtggcctactctgcaacaataatcacaacaccgtctgaggcaaagtacaaatacgccgtctgccccagctttacccttgagacggacaggtgcaccaacaatatagcagaatatgaagccgtcatcttaggtcttcgcaagctcagagccctcgacgttaaaacttgcatagtgaaaactgactccaaaattgttgtcggccaaataaaaaaagactgcgcaactcgagaaccagtcctccttcaatatttatcagcagtgcgaagtctagaaaaaacagttcaaaggcttcacgctccagcatatatacaaaagtagaaatgaggaagccgacgcattgacgaaggccgccgtcaagggagatcccatgccctcagacgtattctttcagacagttggagccttggcggtaagggaccctgacggtcaaagaattataagcctcatcatgatcgaagactggagggcccccataactttgtacccgcaagggcactatcatcccatggactaggtcgaggccaaaagactaaaatatcgaagtagagtattcacaataatagaaggccagctatacaagaaaggcatcagtcgaccgttattcaaatgtatcacagaagtcgaaggcagggtgctccttctcgaggtccacaagggggtctgcggtgtcactcgggccatagggccctcgccgccaaggtcatgtgtcaaggcttctactggccagacattgtttgtacaatcaaccgtatggtgcgttcgtgcgaagcttgccagaagttttcaccacgaggcggaagcccttcataactaacaaagctaattgctcacacctggccactgctgcgatggggcctcgacatagtccacccacctcccacagtctagggcaatctcaagtacgcctttgtcgccgtggaatactcactaaatcgatagaggcacgagcggtctccataataacaacaaaactagcacaaaaattcttttggcaaaaaataatttgtcgttttggcgttccctccgtgttaatagtagacaacaggaaacaatttgacaatcaagacttcagagacttctgcgcctagtctttgcttccgtctatcacccacaatccaatgggatagtcgagcgggcaaacggcaaaatcttcaccactgttaaaaagaggcggctcgaagacaaaaaaggaaaagaggctgccagaaccgcccaccggtggtgacatcgcaacagggggcttggagttggctaacgatgatgaagaaggcagcgacacgcaccagcgacgacagcgcgacatgcagtttggttgatcctcgctagagtgcgcgtcaacgacgttaatcacgacgaccagcgagagcagcgtgagcgcgacaagagcagaggataccggagtagaagaaaacaacacgcggaaaaaagaacaacataacctgccccagccccatttatagcgaccgagcgacgccttgaaaactgtgaagctgcacaccatcaaaagacgcgcgtccacgcttgcgtcacaccgcaacgtcaacaatcaacagtcacaattcaaaaagagctggttcaacttgtgatcgagggcaacattcgtctgtctcctccagaagacttcgggatcgactcaacaaggtgaacctaacattcgtctgtctcctccagaagacttcgagatcgactcaacaaggtgaacccgtccctcgaggggctcatgttggagcgaagatagagcgccccctcgatcactctcacttggcacactaacctactgtctcacttggcacactaacctactgtgtaagtgtcgggtacagggccatgaccgcacggaagaagcaaaggctaagcaatggactccgaaggcgacggggtccgcgcccttcggctcaggcgacgaagacaaccagatggactcacctacgagggggtggcctttgctcagcatgcgaatacttagcaagatcaagtccacgcgccatctggtcataggcgacgacgttctgctgatccgggtccacctgtcggcgacctaggagggcacaaaacctggtgtaatagggaagtctgtacttacagtcctgtaattaccccgtacagtgcatgttgggaatatagttgttagccggggcataacggtatttaggtccaccaacccccggctacccctataaatatcccggtcctgtagacgcacagacgacgtttgacaatacatttgcgcttctagcctactgttttgtcgtgtcatttgtctcccagttcctgagtgtctgggttacggttttccgtcccaacagggacaatgtgcctaattatcctcttgattagtttaattggttctgatttctctctatagtctatttgtgacttgctgaaattacctaatgttctatctatttaagtttgctgaattctcttgaaaaatttgcaggcacgtc

SEQ ID NO: 947 - DNA, 1396 bp, Zea mays
  Intron number 2 from transcript GRMZM2G001668_T01 (locus G RMZM2G001668) derived from phytozome v7.0 (chr-ID 2; pos 1 69730911 to 169732306)
ggaacaggccaaagctcagagcaataagaccgactgtatgttgcttgctttcaatgcttgtctttgtttggtcttgtgaattctgttatgactgggccagttgaaggctacgtaggaaccaaccttttgttctctatttctctcttgacgtttcatgagaaaccgggaattaggaatattcagttgtattcagtctgaactctgaagaatagctggaagcagttttctggccattcacagaaagttttcataatctttaatatgaaattggattattgctgggttcaaacatacatataaggtagatcaagaatttcagatatgacttggtcgactagctagcaacttaatatataagtcaactatcatagtgtttctcatagcaaattaatgcagagaaaattcaatggtaccatcatagagtttcttagtataattttaggctgtagaatacaaggatacattttagtcaaacatgtagatagcagattcaaagagaccataatgttattttttatataaattgcttaggcataagccatcaggtgcaaagatctcgtaatagtgtttgtagtatcaaatatacacatctgcctatacagacaaaattgtgtcggaaccctatttctacttgttgcatttaggttgcacagcctcccccctgttctttttttgtcctaattcactgtgctggaaggtatagacaaagaagtcttcaaacatgtggcacccgatcttaaaaacaaaatcaggctcgccatatatgtgcctaggaagtctgcatatacactacgggaacgagattgttctcgcgtttccggaacggaacgaacgtttgaacgtggacaagttccacattcccggtttctaagagtcaaccaacaagcaaacatcacattactaaaatcccattaaattaatttagaatttttttgaaaaagcacaattttttataactaaacttgtgcaaacttaaactaatcttggaaagttttatacgaatatattattttgtttagtgtcttctattctcaacccaaaattgaaaattttagggtgcgacagaacaccatactactatgtcatatatgcttagtattgaccaatcttctctttttaagtgtcccaagtcacacaatgctcatactacatgtttttttgtatcttgtattttttccaaggtgttatttgtcttatcacatgtacaccacctttgttctctctgttcagtttccaagcttttctgctagaatctgttagaatgattaattttagacccatgtattaagtccttgtgtatcatcttttagttacatcatttataccttgagtcttcactgatttaatttttaccttttcagccaagcagaagtcttcaaagcctcctggtagtcaa

SEQ ID NO: 948 - DNA, 13049 bp, Zea mays
  Intron number 1 from transcript GRMZM2G479930_T01 (locus G RMZM2G479930) derived from phytozome v7.0 (chr-ID 8; pos 1 9570486 to 19583534 reverse strand)
gagtgtgagcctatgtaaagccctaaaatttgtataaggtaaaaaaataataaaaacaatcatcaaaataagtgctcatggaagtttagagttcaccctctctaaagtaaattattataataggataacattagctaaatcatattttaataaagattagacattttaaaaaaatgtttcctatcaaaccaaaggaaattgactttttggttatatctttttagattggttacacactcaaaataatattttatgtaatgaatgtggtgtgtgtatttcattacccaaataaaatgataataacaaataaagtaataaaataaatagattaatgtaatcagtgcctatcatactggattttttatgaatttaaaaagaaatgaaggcttgaaatttaaacttgagtatgatttgaaattggaatagaaaactgaaatgaaaaagaaaagaaaaataataaaaaaaagacagagacctcagctgggttggcttccctcgcttctggcccatctccacatctcatcccgcgcggcccactcaactccctttctttttctatatttcttgggtcgcttacgcgtggggcctgaaagggaattaggcttacacctagttcctaaataattttggtggttgaattgcccaacacaaatctttggattaactagtttgcccaagtgtatagattatacaggtgtacaaggttcacacagccaataaaaagaccaagttttggattcaataaaggagcaaaggggcaaccgaaggcacccctggtctggcgcaccggactgtccggtgtgccaccggacagtgaacagtacctgtccggtgcaccaggggactcagactcaaactcttcaccctcgggatttctcggaagccggcgcgctataattcaccggactgtccggtgtgcaccggacatgtccggtgctccaaggaagcgcggtctccggaactcgccagcctcgggttcgcgtggcagccgctccgctaaaattcaccggactgtccggtgtgcaccggactgtccggtgaaccagcggagcaacggctctttttggcgccaacggctccctgcggtgcatttaatgcgcgcgcagcgcgcgcagacgtcagacatgcccataccggtgcaccggacatcacacagtacatgtccggtgtgcaccggacatccaggagggcccacaagtcagaagctccaacggtcagaatccaacggcagtgatgacgtggcaggggcaccggactgtccggtgtgcaccggactgtccggtgcgccatcgagcaaacgcctccagccaacggtcaagtttggtggttggggctataaataccccaaccaccccaccattcattgtatccaagttttccacttctcaactactacaagagctctagcattcaattctagacacactaaagagatcaaatcctctccaattccacacaaagccctagtgactagtgagagtgatttgccgtgttcatttgagctcttgcgcttggattgcttcttttctttttcacttgttcttgagatcacaactccattgtaatcaaggcaagaggcaccaattgtgtggtggcccttgcggggaagttttgttcccggctttgatttgagaagagaagctcactcggtccgagggaccgtttgagagagggaagggttgaaagagacccggcctttgtggcctcctcaacggggagtaggtttgcaagaaccgaacctcggtaaaacaaatctccgtgtctcacttgcttattcgcttgggatttgttttgcgccctctcttgcggactcgtttatatttctaacgctaacccggcttgtagttgtgtttatatttgtaaatttcagtttcgccctattcaccccccctctaggcgactatcaattggtatcagagcccggtgcttcattagagcctaaccgctcgaagtgatgtcgggagatcacgccaagaaggagatggagaccggcgaaaagcccactacaagccacgggagcacttcgtcggaagagtcccgcaccaaaaggagggagaagaagaagagctcctccaacaaagggaaggagaagaaatcttcttctcaccacaaagagaagaaggaaaaatcttcttcccacaagccgcatcggaaaggcgacaagcacaagaggatgaggaaggtggtctactacgagaccgacacttcatcaacttctacctccgactccgatgcgccctccgtcacttctaagcgccaagagcgcaagaagtatagtaagatccccctacgctaccctcgcatttccaaacatacacctttactttccgtcccattaggcaaaccaccaacttttgatggtgaagattacgctaggtggagcgatttaatgcgatttcatctaacctcgctccacaaaagcatatgggatgttgttgagtttggtgcgcaggtaccatccataggggatgaggattatgatgaggatgaggtggcccaaatcgagcacttcaactctcaagctacaacaatactcctcgcctctctaagtagagaggagtataacaaagtacaagggttgaagagcgccaaggagatctgggatttactcaagaccgcgcatgaaggtgatgagctcaccaagatcaccaagcgggaaacgattgagggggagctcggtcggttccggcttcgcaaaggggaggagccacaacacatgtacaatcggctcaagaccttggtgaaccaagcgcgcaacctcgggagcgtaaagtgggatgaccacgaggtggttaaggttattctaagatcacttattttccttaaccctactcaagttcaattaatccgtggtaatcctagatataccaaaatgacccccgaggaagttatcgggaattttgtaagctttgaatgcatgatcgaaggctcaaggaagatcaacgagcttgatgatgccaccacatccgaagctcaacccgttgcattcaaagcaacggaggagaagaaggaggagtctacaccaagtcgacaaccaatcgacgcctccaagcttgacaatgaggagatggcgctcgtcatcaagagcttccgccaaatcctcaaacaaaggagggggaaagactacaagtcccgctccaagaaggtttgctacaaatgtggtaagcccggtcattttattgctaaatgtcctatatctagtgacagtgaccgaggcgacgacaagaaggggagaagaaaggagaagaagaggtactacaagaagaagggcggcgatgcccatgtttgtcgggaatgggattccgacgagagctcaagcgactcctccgacgacgaggacgccgccaacatcgccgtcactaagggactcctcttcccaaacgtcggccacaagtgcctcatggcaaaggacggcaaaaagaaggttaaatctaaatcctccactaaatatgaatcctctagtgatgacaatgctagtgatgaggaagataatttgcgttccctctttgccaaccttaacgtagctcaaaaggaaaaattgaatgaattggttagtgctattcatgaaaaggatgaccttttggattcccaagaggattgtctaattaaagaaaacaaaaaacatgttaaggttaagaaggcttatgctcttgaaattgagaaatgtgaaaaattatctagtgagctaagcacttgtcgtgagatgattgacaaccttagaaatgaaaatgctattttaagtgttaaggttgattctcatgtttgtaatgtttcaattcccaatcctagagataataatgatgatttgcttgctaggattgaagaattaaacatttctcttgctagccttagattagagaatgaaaatttgattgttaaggctaaagattttgatgtttgcaaaattacaattgccgatcttagagataagaatgatatacttcgtgctaagattgttgaacttaattcttgcaaaccatctacatctaccattgagcatgtcactatttgtactagatgtagaaatgttgatattgatgctattcatgatcatatggctttaattaaacaacaaaatgatcatatagcaaaactagatgctaaaattgccgagcataacttagaaaatgaaaaatttaaatttgctagaagtatgctctataatgggagacgccctggcgtcaaggatggcattggcttccaaaggggagacaatgtcaaacttaatgcccctccaaagaacttatctaactttgttaagggcaaggctcccatgcctcaggataacgagggttacattttgtaccctgccggctatcctgagagcaaaattagaaagattcattctaggaagtctcactctggccctaatcatgcttatatgtataagggtgagacatctagttctaggcaaccaacccatgctaagttgcctaagaagaaaattcctaatgcatcaaatgatcatgccatttcatttaaaacttttgatgcatcttatgtgcttactagcaaatccggcaaggtagttgccaaatttgttgggggcaaacacaagggttccaagacttgtgtttgggtacccaaagttcttgtttctaatgccaaaggacccaaaacagtttgggtacctaaagtcaagaactaaatttgttttgtaggtttatgcatccgggggctcaagttggatactcgacagcgggtgcacaaaccacatgaccggggagaaaaggatgttctcctcatatgagaaaaaccaagatccccaacgagctatcacattcagggatggaaatcaaggtttggtcaaaggattgggtaaaattgctatatctcctgaccattctatttccaatgtttttcttgtagattctttagattacaacttgctttctgtttcacaattatgtcaaatgggctacaactgtctttttactgatgtaggtgtcactgtctttagaagaagtgatgattcaatagcatttaagggtgtgttagagggtcagctatacttagtagattttgatagagctgagctcgacacatgcttaattgctaagactaacatgggttggctctggcaccgccgactagcccatgttgggatgaagaatcttcataagcttctaaagggagagcacattttaggattaacaaatgttcattttgagaaagacaggatttgtagcgcatgccaggcggggaagcaagttggagtccatcatccacacaagaacatcatgacgaccgacaggccgcttgagctactccacatggatctattcggcccgattgcttacataagcatcggcgggagtaagtattgtcttgtaatagtggatgattattctcgcttcacttgggtattctttttacaggaaaaatctcaaacccaagaaactttaaagggattcttgagatgggctcaaaatgagttcggcttaaggatcaagaaaataagaagcgacaatgggacgaagttcaagaactctcaaattgaaggctttcttgaggaagagggcatcaagcatgaattctcttctccctacacacctcaacaaaatggtgtagtggagaggaagaatcgaactctattggacatggcaagaaccatgcttgatgaatacaagacaccggaccggttttgggccgaagcggtcaacaccgcctgctacgccatcaaccggttatatcttcaccgaatcctcaagaagacatcatatgaactcctaaccggtaaaaagcccaacatttcatattttagagtttttggtagcaaatgctttattcttgttaaaagaggtagaaaatctaaatttgctcctaaaactgtagaaggctttttacttggttatgactcaaacacaagggcatatagggtctttaacaagtccactggactagttgaagtctcatgtgacgttgtgtttgatgaaactaacggctctcaagtagagcaagttgatcttgatgagataggtgaagaacaggctccatgcatagcgctaaggaacatgtccattggggatgtgtgtcctaaggaatctgaagagcctccacatgcacaagatcaaccatcttcctccatgcaagcatctccaccaactcaaaatgaggaagaggctcaagttgatgaagggcaaaatcaggaagatgagccacctcaagataatggcaataatcaagggggaaatgcaaatgatcaagaaaaggaagatgatgaagagcaaaggccgccacacccaagagtccaccaagcaatccaacgagatcaccccgtcgacaccatcctcggcgacattcataagggggtaaccactcgatctcgtgttgcacatttttgtgaacattactcttttgtttcctctattgagccacacagggtagaggaagcacttcaagattcggattgggtgatggcaatgcaagaggagctcaacaatttcacaaggaacgaggtatggcatttagttccacgtcctaaccaaaatgttgtaggaaccaaatgggtcttccgcaacaagcaagacgagcatggtgtggtgacaaggaacaaagctcgacttgtggccaaaggatactcccaagtcgaaggtttggatttcggtgaaacctatgcacccgtagctaggcttgagtcaattcgcatattattagcctatgctacttaccatggctttaagctctatcaaatggacgtgaaaagtgccttcctaaatggaccgatcaaggaagaggtctatgttgagcaacctcccggctttgaagacagtgagtaccctaaccatgtttataggctctctaaggcgctttatgggctcaagcaagccccaagagcatggtatgaatgcctaagagatttccttattactaatgacttcaaagtcggcaaggccgatcctacactctttactaaaactcttgaaaatgacttgtttgtatgccaaatttatgttgatgatattatatttgggtctactaacgagtctacatgtgaagagtttagtaggatcatgacacagaaattcgagatgtcgatgatgggggagttgaagtattttctaggattccaagtcaagcaactccaagagggcaccttcattagccaaacgaagtacactcaagacattctaaccaagtttggaatgaaggatgccaagcccatcaagactcccatgggaaccaatgggcatctcgacctcgacacgggaggtaagtccgtggatcaaaaggtataccggtcgatgattggttcattgctttatttatgtgcatctcgaccggacattatgctttccgtttgcatgtgtgcaagattccaatccgaccctaaggaatcacaccttacggccgtaaaacgaatcttgagatatttggcttatacacctaagtttgggctttggtaccctcggggatccacatttgatttgattggttattcggatgccgattgggcggggtgcaaaattaataggaagagcacatcggggacttgtcagttcttgggaagatccttggtgtcttgggcttcaaagaagcaaaattcggtcgctctttccaccgccgaagccgagtacattgccgcaggtcattgttgcgcgcaattgctttggatgaggcaaaccctgcgggactacggttacaaattaaccaaagtccctttgctatgtgataatgagagtgcaatcaaaatggccgacaatcccgtcgagcatagccgcactaagcacatagccattcggtatcattttcttagggatcaccaacaaaagggggatatcgagatttcttacattaatactaaagatcaattagccgatatctttaccaagccacttgatgaacaatcttttaccagacttaggcatgagctcaatattcttgattctagaaatttcttttgctagcttgcacacatagctcacttgaatacctttgatcatatctcttttatatgctatgactaatgtgttttcaagtctatttcaaaccaagtcataggtatattgaaagggaattggagtcttcggcgaagacaaaggcttccactccgtaactcatgcttcgccatcgctccaagaaaaggaccggacttcgtctttggtataatcttaactcatttacttatgaccaaaggggaagaaattactttgagggctctaatgattccgtttttggcgattcatgccaaaaagggggagaaatgagcccaaagcaaaaggaccgcaccaccaccaccaaattcaaaaacttagtgctttccaaaagtatttatcatttggtatcctattgtgttcaaaagggggagaaagtagtatttcaaagatggtatatcaaaaccctcttgaacactaagaggtggatctcttttagggggagttttattaagtcaaaagaagagcatttgaaacagggggagacaatttcaaatcttgaaaatgctttgcaaactcttattcatttacctttgactatttgcaaaagaactttgaaaaggatttacaaaagaatttgcaaaaacaaaactcgtggtgcaaacgtggtccaaaatgctaaataaagaaagaaacattccttgcatatcgtaagtagttatattggcttaattccaagcaacctttacacttacattatgcaaactagttcaattatgcacttctctatttgctttggtttgtgttggcatcaatcaccaaaaagggggagattgaaagggaattaggcttacacctagttcctaaataattttggtggttgaattgcccaacacaaatctttggactaactagtttgcccaagtgtatagattatacaggtgtacaaggttcacactcagccaataaaaagaccaagttttggattcaataaaggagcaaaggggcaaccgaaggcacccctggtctggcgcaccggactgtccggtgtgccaccggacagtgaacagtacctgtccggtgcaccaggggactcagactcaaactcttcaccctcgggatttctcggaagccggcgcgctataattcaccggactgtccggtgtgcaccggacatgtccggtgctccaaggaagcgcggtctccggaactcgccagcctcgggttcgcgtggcagccgctccgctaaaattcaccggactgtccggtgtgcaccggactgtccggtgaaccagcggagcaacggctcttttcggcgccaacggctccctgcggtgcatttaatgcgcgcgcagcgcgcgcagacgtcagacatgcccataccggtgcaccggacatcacacagtacatgtccggtgtgcaccggacatccaggagggcccacaagtcagaagctccaacggtcagaatccaacggcagtgatgacgtggcaggggcaccggactgtccggtgtgcaccggactgtccggtgcgccatcgagcagacgcctccagccaacggtcaagtttggtggttggggctataaataccccaaccaccccaccattcattgtatccaagttttccacttctcaactactacaagagctctagcattcaattctagacacactaaagagatcaaatcctctccaattccacacaaagccctagtgactagtgagagtgatttgccgtgttcatttgagctcttgcgcttggattgcttcttttctttttcacttgttcttgagatcacaactccattgtaatcaaggcaagaggcaccaattgtgtggtggcccttgcggggaagttttgttcccggctttgatttgagaagagaagctcactcggtcagacggaccgtttgagagagggaagggttgaaagagacccgacctttgtggcctcctcaacggggagtaggtttgcaagaaccgaacctcggtaaaacaaatctccgtgtctcacttgcttattcgcttgggatttgttttgcgccctctcttgcggactcgtttatatttctaacgctaacccggcttgtagttgtgtttatatttgtaaatttcagtttcgccctattcaccccccctctaggcgactatcagggcccactggtcgggatcacaccaggcgcgccggtggttggcttctgtgtcaccaccatgtggggcctgcatggcaggtccttcctctagctcggatttctttttccccaatcctaagcgctgggatccctccacaccgggccgacccgcggatctcgctgctcgcacccgctcggactccgggcgccgcctgggtataaaaccgaccccacagccccctgggacccaggccatagccgcatctcggattagctcgagcccacagattcacctgcgcccgaaatactgctaggagagagaagccgtggccgccttcgttaatccatgcgggcatcgacattgtggcggagtcgagtggacggctgggggtgcacttcttccacggctcgccagggtgcccatgttcacgctcgccaatcgccgccctggtgttcgtgcttatgctgtccgcacgcatgggatggcaatggggcagggtactccactgctcggataaaggtaaggagccgcataataccttcgtcgttctacccgctgtgtattgcatgggttggattaaagcatcggcactctaaactcgtggtctgggggtggtcagaaccatcgacgccgcctcggttctcagcgtgagagatgggagatagaaaggggggtcgccggagcatgttatgtcgatctgggtcctggtggggcgaaaatcgtaactggtggagcatggatttctcgccgcgacgtcaccacctccttcgatttactttgcgccatgggcagaaccatcctcgccccaaccagaggtacagatccgaccgtgaagttcattgccaacttctctccgtacagaaccgatgggattttgggttggggcgctatctcggccagcgccggcgagcgtgccgccatagaagggcctgtgcgccaccacgttgctggttggagaaggaagaagaacgccgtggtccgttggattgggatggacgactaagattagaagatgcggatacccccttcccgttttgagtcccaaccgttgacgcgagatcggacgggtccgtgttgatctcggtcaaataaaatccagaccgttgatgttgatcagaggggcgcggttgagatccggttcagggtctgatctcaaccgcgggtgtgtgatcggacagctgatcctcgccgataccccttcggccatgctaaatttctaaagagaccctgccttatttcgaaatcaacccgcaatcctttcttaggtgtagctgagtcttgtggatttttacaaatcaaaccccgatcttctctgtattagtgtgcccagtgcagagaattagaaaattcagtaaaagtaattagaaaatgatttttaacacaaaaacaatactagaaacttgtataattcatatataattcattttagctccaaattgagtcattctagttgcaataattttgtattaacattttctaacaactattaacactgtttagtcatgaaacttgaattaaaattgttcatttgaattaatctattctaggtggttaataacttcagaaattcataaatccttaaccgtaactccgaatttagtgattctcgttcccacgatcttgtagcgatgcgtagaatattattatatagtttgttcttatgtttggtgtgatgttaattttgcctataccatgcttgtttgtattgctacgactagcgcgaggttacgagctacctgaagatcgtcctggtacctggaatctcaagtcccaggcaagttgtgcccttgatcacttacttttcccagccatgttcttattaattttaatgatctgcataggttaattttgatgggaccctttatgttaccccagttttggttatctttataccttgttcacccctgaaatatttttgggtagtaattgctattgctttatgtggattgggtatggagatacactactcatgattattctgttattatctggttattattactgttcatgttaagatcattaaattaatgggaacatggagcgaccacccgggaaaacagtgctaccacaagggtttaatgggacgcccttggctgattaactaggaaagctagtggaggtcttccttacccgaaagaggcaagggcagtaggggagtggtcagtgtagggaggtccttgagttgattttgctgcgatggcggtcaggcaagaaccctgcactggagcttcctataaactgtagcgggatttctgaagctagtggaactttgtaaaggcctcgtagtgttaccctgcctcgcctcctcggtagaggtgtatgggattggccgtttcttggcagatgggtaacatgacttgtgggtaaagatgcgcaacctctgcatagtgtaaaactagtatactagccgtgctcacggtcatgagcagctcggacactcacatgattaaattatgaaactaaattcgatttgtcatatgcattgcatcacaggtgatgttgttacttttgttctactacttaattgggtttgatatttacttatacttagtaattgctaataaaattttgaccaactttaaaagcaatgctcagctctaaccatcctctttggtaagccttacacttcacgtgagctcccacctttggcgagttcatgcacattattcccacaacttgttgagcgatgaacgtatgtgagctcactcttgctgtctcacaccccccacaggtcaagaacaggtaccgcaggatgaggcgcatggaggatgctgtgatgagttcgtgagtggtctaggtcgtcgtctcccagtcaactttgggttgctggaccgttgtctccttataatgtaattattaattttgtaagaactcctgttatgtagtaaagatgtgacattcgatcctatgccattatgcatcatatgtgtgagacttggtcccagcacacctggtgtttatgttcgtgcctgggtcttggtgccccgaaacccgggtatgacagcctgtctcctaaggacctggtttccctagagaaggt

SEQ ID NO: 949 - DNA, 6530 bp, Zea mays
  Intron number 1 from transcript GRMZM2G134563_T01 (locus G RMZM2G134563) derived from phytozome v7.0 (chr-ID 4; pos 1 16126634 to 116133163)
tcacggttctactcctattcgtctgcttcaatccagctgcgtcatctaatttatggtttttccctacagtccattccctaatatccaatcccaactgcttgtatttgtagtatctattcaattggattgaaaattcaaacaagaatcacgaatctaaaattatagattgttcaaaatgaatgagaccaatactttggtatctcatttcccctgcgctgctgccacacaacacaactgaataaaatattacttttttatacaatttaatgttcttactttattttactcttaaacatgtaactcaagcatcatatcgttttgaaagtttccctagaagcttcattttacctctctatatgtacaacgtatatggctagtttttgccaatggtaagtggtcctaattctgaacaattcctgggttcactaaccgccgttgccatgcatgccattctgtgtagccagtcttccagtctagtcaatgacatacgtgaactacccaagcaaggatagggcattgttgcctcagaacatcaccagctcttccctagctggtgctgtcagcctgtcactgactaagcagaagggagatgcgtgctaccttgtgccgtaatggaggaccacaaccaatgcacagacacatagggcctgtcactagcaggccgtcatgttgattttgaacagttttaactaaagtgattctcatagaatcaggctgaaaagctaggcgttcggtagtctgcagcagcttctgctgaccagaagctgaaaaaagctaaaacaaacatggccataggcagctcttcagtggcagaccatgacttctgtgctaggcattaaaaaactgtgacacaaagagttcatgaaagtattgctaaattaacaatataaagtcaatatacaagttttttcatacaaaatactagttcttttcgcaaaaaaaaaggaaactactacaaatagcgatgaaaaaacattgaatatctagtacgattttagtctataatcttggttacatattttctaaaattctctacgttagacatttaaaaaaaccatttttcctgtgaaaaaataaaacaagagctatcattcattggcattaaccattcaccactaaatctaccatccaataatttgtttgaaataaaactagctacttcttgttcctttctgtgatgatcacatcctgcacagtctattatcttgcatggttgtgtggctgcagcttttgtccatggctcagacaaggctgagctgccttggctaccattggatggacgttgcatgttatttatgctacaaaagagaagaatatgggagaatagaagcatgttttgagatagtgtccaacatgctgtatactagtacatatgtctaacacatagattatatatttgtttttgtgccaaaagttttgggcgttcaactgaatgccttgaatctgtgtaggtccacccctggcagccctgcacagaccccatcacattggcaacgtctccggaagaccgaaacgaaccacacacatgcatgaagtgcctccatccctaataaatacctatgtggcactatctgggcatcttacctgtctcctttccttctagtagacacgcatgtgaatcatgattccaaacgtttatctctgactaacactaagtctaatgtagattatacatatgattttggtataataatattcatattacactttcatataatgtcaatttcatgctcatgccaaatctaatagatgaaatattcatggtttcaaaggcaaggcgtcgcctaggcgtccaggcggccaaagaagtctaggcgtccccgtcgcctagccaagagtcagcaagagaggcaagaggggaggggaagaagcctagcagagactttggggagcgggatcggcggcgcagagcttgggggagtgccgagctcgggggagcagcagtgctgagactcgggggagcgctgagcttgggggagcaggagcagcgatgttgtgacaggagtggcaatggtgagatgggggcaaccctaaccatcagggaggatatatgggctgcctggtgggctgggccatctcttctaccccttccttctcttttttttttctttttctttttcttcctcatctatgctgctgttctgccgtttctttaattggtaaggcgccacattgctcgccttagtaagcgcctaggcgtccaggcggtgacccaacgccttgtctcgccttaccgctttaagaactatggaaatattaacggtcgaaatgtgaatacgagcttttgtttgtaaagaagctgccaatagcatcaattagctcttcatcccttggtggtcatacctgaactgaaaggaggcgggacttgcttctttgagcgaaagcatccgaccatccattgattaatctgaaaaacctttagaggtagtaatcatgcccctgctctgcaactccaatccttagttcttggcgcagaaaaccttttgcaacttcaattgtggtcatctttcgccacagaggttttatagcctttttcttgctcgaatgtgccaattgactcacaaccagatggggaattttatcgaatggaacatggttcaggtctctgctctctaattaggaccttttttgcttggcaagaacaaagacagacattctgtcttgttttctattgcctgaagaacaaagacagacactctgataccagcaagtacttgaggctgtagtgatcagtcttgacttcgaaacggcggccccaaaggtagggcctccaatggcggattgcctggactaggctgatcagctcccgctcataggcggctagggcgcggtgacgaggcgccacgggccgactgaagaaggccacggggtggctgtcctggaccagcaccgccccgaagccatgggacgaagcgtcgcattcgacgacgaacgtcttggagaagtccggcatggcgagtaccggggccgacgtgaccgcctccttcagagcggcgaaggcagccgccgtctcgtccgaccacaggaatccgtccttcttgagcagggcggtcagcggcgcgacgattgtgccatagttgtgcacgaatttccggtagtacccgacaagaccgaggaaaccgcgaaccgcgcgggccgaccgcggctgctgccagtctcgcaccgcctgcaccttggcggggtccatggcgactccagccgccgagacgacatgtcccaggtacgcgacagaggaggccgtgaaagcgcacttagagcgcttgacgaagagctggtgctgctgaagcgtgccgaagacagcacgcaggtgacgaaggtggtctgcccatgtgcggctgtaaatcaaaatgtcgtcaaaaaataccagcacgaagcggcggaggaaggggcgcaggacatcgttcatcatggcctggaacgtggcgggagcgttgcacagcccgaacgccatgaccaggaactcgtagaggccgtcatgtgtgcggaacgccgtcttgtgcacgtcagtcggccgcatgcggacctggtggtacccagagcgcaagtcgagcttggtgaagaagcatgccccgtggagctcgtccagcagctcgtcgacgactgggatagggaacgcgtccttgatcgtgagcacgttaagcgcccggtagtcgacgcagaaacgccacgatccgtccggcttcttgacgaggaggaccggggacgagaacgcggagtcgctgcgacgcacgatgccttgtgcgatcattgctgcacattgtcgctccaactcatctttgtgggccgccgggtaacggtacggccggaccgctaccggcagtgtgcccgacttgagtacgatgctgtggtcacgcgcccgcggcggtggcagtcccgagggctcggcgaagaggccatcgaacgtggtcagcagctcctccagcaaggcttcgggcgccgtgatgctgtcgaggcgcggtgtgcgccgggcggccacgtcctcccagcagacggggcggccatggcgtgtgaaggccacggtgcgtgtggtgaagtcccacaccatcttgcctagcgtgaccatccactgggtgccgaggacgacgtcgtagccggccagtggcatcacatagaggtcgacgcaaaagtcctcgtcagcgatggtgatcggggcctgacggaaaacactcgggcaggcgatgcgctcgccattcgccacggtggccgtgaggcgtgggctggtctggacaacaagccccgtgcgtgacgctgcggcctcggcgatgaagttatgcgtggagccagtgtccagaagggcggtcagcgtcatggcgcccacttgcacgcgcacctgcatggagtcacaaatgggcataccagccacagcgcgaagggagaacaatggtgcggaggtgtcgacggcgtcagcctcctgggcagcgtcctccagctcgaagccgtcaatgtagaagacgcggcgacacacccgattgtgcccgcgggagtacggctcattacagttgtaacacaagccaagacgacgatgttccgcctgctcctccgtcgtaaggcgcttggcagccccagccgcgccgcgtggaggaggcgctgggagggccagctgctgtgctgggggaaccggtacgggaagcaccggaggcgcaccggccgctggtagcgctggccgcgtaggtagagcgggcagggccgcgcgcggggccgcccgaccgagtagggggctgagccggtctagctccaccagttccagcatcctggccaggctcatggttgcggccagggactccggcgcgtgaacgcggacctgatggctcggcggcagcagcccccctgtgtacagctgtacgcgctggctttcctgcagccggccagcacgcgaaagaagagcctggaagcggttggaatattcttccaccgatcccgtgcgtcgacactccgtcagctcgaacagcggcgccgatctcagcgctggtccgaaccgaaggttgaggagttccttgaagcgaccccagggcggcgtgccctcatcctcctggagttggaggaaccacagctgggccacgtcgtccatgttgtaagatgccatccataccttttcctccggcatggtgcgttgatgtcgaaagtacgactcacacttgttgatgaagatcagcgggtcggacttgccgtcatagcgcgggaactccatcctctggaacttcggcgggtgatccgtgcggggctgcccatcttggtggccgccgtagtcggtcgcggaggcgaccttctcctgcatgataaccatgtcggactgcatcttggacatgttggtggacagggtctggagcatctgcatgacgtcggccatggagggttgagcaccgtcacccatggtgatgaacctggacgtagcggtggacggggaggtgggggctggtggtggtggtgcggctgcagtgactgaagggttgggggtggtggttggggatcgccgacttcctgataccaggttgtcaagggcgtcgggcccgagggtaggaggaccgcggcttcgaaggtcgtagccgccgtccgtgttgccgaccgggttatgcccccaggaacggcggtcttcgtcaacgggttatgccccctgttgccgattagagagaggtaggagactgagataaaactttcttgtcctcttcattggtgcttacagggggtatataaggccataggccagggctactaaaggaagccactaatcactcttattcccttctaaatgtagcccggattattaaaggaaagccatcaatcactaatcactcttattcccttctaaatctagcccggactaataaaggaaagccatcaatcactaatcactcctattccttctgaatctagcccggactaataggaaggccatcaatcacttttattctttccagatctagccactaggcctggctgcctgctggatcaggcgtcctgcgcgctcagccgcgcgtgccctgtgacgccgtgtgtacgtatttctgtacatcacaagctcacacatctgcatatcccacattaactgcagttcagatcagggatactgaaattagtgattaaggtatatactccatccaatgtaggtcattttacgattctagctggtcaagcttctttaacttgacccatcattgcatgaaaagttacatagattggcaacatgtgcttgattttattagattcatcatggaaaatacttccagtacatataactttcattatttcaaataatatttttttacaaaagatgcaagtcaaagtatcaaattggagtcgatgttgctatcctaaatgacttacctttgggatcagagggggtgatctatacagttatcttcattatgtgtgtctgtgtgtgtcttgacaacatacaaactcagctttgtccctcctctgaaacatttgggatcagagggggtaatgtatacagttatcttcattatgtgtgtctgtgtgtggtttgacaacatacaaactcagctttgtctctcctctgaaacagctccacc

SEQ ID NO: 950 - DNA, 1729 bp, Zea mays
  Intron number 1 from transcript GRMZM2G023037_T02 (locus G RMZM2G023037) derived from phytozome v7.0 (chr-ID 2; pos 6 017985 to 6019713 reverse strand)
atctcctcgacaagtttgagaccaactgccacgtggtaaggcctcctcctgctgatcccttttcgcacacctcctcttcccatttgtctgttagtggggagtgaattcatgagttacatttggtgatgatggtctctatgtggtgccgtgattgtgagctagaacaagttttttctatcatgtttaattgttaaaatgcctccgttgagacgccaagactcagcaccgttgtggtgtcgtcacatccatctctagcctcccgagtcaccagcgctgcccaagttagctgagctccgtctgttctgctttcgcgccgcacaacaccattgagctcctccccgacgccacgtcccgaggtctgccgagcggccggctctgccacgctgagatgtgccctgtcccctgcctaggtcgagcgcccaagccctgccacgttccgcccctaccgagtaccgaaacagatgaggcaatggctaactcgtatggtgaattggaggttatggctctgtgtccgacggaggagagagagataggggatgcggcttcacatcgcattaagggatgtggtgcttactgctgagtcatacccgagagagatgagcgtgagtgctgcttctgtaatatacaaaagccaagcaaaaaattgtctgagacacacacatacacagagatagagagggggagggaaaagctgaataaaaatctaattgatgcgtgtgtgtctggattttgagcaagtctttatttcactagactcttttttatttcacttgtttaacaaactttttactttattttgtgattattaactcattttctctttcttagattttattcgctattatgaataagattttttttaatttccttcacttgttttgtagctatgtttagactgtgttgtaaatttttttcattgttgcgttatcaacagctaaattttggcctgtcctccgccactgctcctgtctcctcctaggatcccactcgtcccaaaaacctagccgccgcctccatccccgtcccagaaccccgaaaatgggcatgtgttgaacctggccatccagcaacaaaaaagtgaccctcttctcgagaccgttgaaggcattgatcatacaattatacttatgcatgtgagaacgatgattatgatgtcttggatgaatcattgtgttctggattttttttggttttgtattttgttactgactgcttcagctgcctcctatgattctcaatttgcataactaattgaggagcatcaggtctttaaaagaatgtaagacaagaattcaaaggcctattttcggtgttgatttcaaatcaaaccattagtttttaccatagtaccataattgcctttaggttgattcctaatagattggggattgtttactatagattgattcctaaaccctaaaccataagcttcagctgcctcctatgattatcatagattgggaaaccataagcttgtgtttggaactaatagattgattccttgcattgttcaatattcttctggctgttcattagtagttggggattgtttactatatattatgtgttcttcaaggaagattatagtgctaagaatgtgcaggagttcatatgtactgaaacataagctcataaagatttattcattttatgtggtgatattatttttttgaagttgtttaaactatctccaggtttctttaggggtattcactgaaggcgacagctg

SEQ ID NO: 951 - DNA, 556 bp, Zea mays
  Intron number 2 from transcript GRMZM2G041842_T01 (locus G RMZM2G041842) derived from phytozome v7.0 (chr-ID 4; pos 1 37590271 to 137590826 reverse strand)
cagagccttcattgagattgccagtacgtttgcctcctaagacctgttatagtgctactatctccttttcataatgtggggcatgtattaacccaggatggtctccaaggctacactttgaccgttaatatctcttatgttatattgttaatgactatgagatcgatatcatatgaaagcactttcaaataaaatccacttatactgaatttgtatgttaaaatctacaaaattataattcttttcaaagattaagaagtttgcatcttggcttgtgtgctgcccttaaaaaaagaaaaaggagtatggttttggctaatttaattttttggacacttcagtaattttgttgtgtgaaagcatatagtttccgctatttttggaatgaatagctgatgtatctgcatttgtactgtatgtattgtgggtttgtggcttatatgattgtattagtggatatctatttgtgcttgattagaaactaatacctgatacgattcttttaaatttaattatggtaggtttttggtgctctttctgagttagaacttgaaag

SEQ ID NO: 952 - DNA, 5627 bp, Zea mays
  Intron number 5 from transcript GRMZM2G432050_T02 (locus G RMZM2G432050) derived from phytozome v7.0 (chr-ID 10; pos 12636762 to 12642388)
gtataaccaaagaaaaagaggtaagtgtagctaaatgttattttgtttcctttttctttttgagatggacctaaaatgctatgtgatgaaataaaggtctaaaataattgaaatgtattgtttggggtctgttgcttaggttagagttctaactaatttgtagaagtaaatatgctagtaacaataattgttatcaatgcaaacaaaacaagatatattggttggggatggaaagagtagattgtagtggaaggaggtcaaagggtgagggacgagtgctcgtaggtgacacatggtgcccgtgcggtgggatgttgggcagtagcgatgatgcaccaccatggctaagaggtggttttgtccacaatgaggtggaggaactagagtagcaatctaagtagaagtgttcttgtggatccactggcattactgaggcgttgatgatagtttatgggataccaacttcaagtagtagcatatatgtagtaggtggaggtcaattgaagttatgtatctacgatcctcatagagaaggatgtagtatggtatcccgcggcatacaagggtggtgcttgcaagtggagttgtagtgaggtcaaacaacttgttgaagacgatgttgaatttggatctaggtcgaccggctatcgtcttgctgggttgcttggcgggcaggttggtcggtagcctcgcctcgctgtgttgcttggtgggcaggatgatgatagtttatgagataccaacttcaagtagtagcatctatgtagtaggtggaggtcaattgaagttctgtatctacgatcctcgtagagaaggatgaagtatggtatcccacgacatataagggtggtgcttgcaagtggagctgtagtgaggtcaaacaacctgttgaagacgatgttgaatttggatctaggtcgaccggttgttgtcttgttgagttgcttggtgggtaggtaggtcagcagccttgcctcgctgggttgcttggcgggcaggttggtcggcggcctcgcctcgctgggttgttcggcgggtagcctcgcctcgcctcgctgggttgtttggtcggcaaccccaagaatgaggccctttttttggactaaacattcggttgattcgatccacattcgttgtcaaacaatgtttcaaatcagatgtaagaataggcactattatttggtttttctaagtacaagagaagcttgaatgccgaaaggggtaaaaagaattaacatgcataaaaagaaatcgatggatgagaactgattcttccttcgcaacacgtattacccaagaccgtgttcataagtgcagttctgaccaggctgggccttggatggcgctggaaactaggttttacgggggccgaccttatcgtactgggatttggacaaatgtaacctcgttatgcgggaagagttcattctcatgctacctttcggacgtaaggtttggggtcgacctaaaccgcccgagctctgccgcgcatctgacttcgaggggtgagcagtgcctggttgaggctgttggctgctaccctgaacaccatgagcttgtggccgacggcttgggtctggggaacactggcatggagagcttccatgggccctcctcaccgcggctggctacctcatgcatgatgaggttgtcgaaggcgcaactcattaatggcttgcttgctggtctccacccgcacgtcgagggatttgggactcaatcccctcaagtttgtgcggtggaatgccgtggccgccacatacgctgggggaccaggatgcagaccagcatagtggactgcgctagccttgctcctggcccatgggaccccaccaatggtttctagggaggtcatgttggcaaatgcataaccttcgtcattatgtcttcccgaaacccattggcgggtagaagtcacccccccgcgagtgggggaggtgactctacctactatggagcatagtggctgatagccggcgactgccttgctcacgtttggctgctggatggtaatggccaccttgaataccaccgtgctctgccagggatcgccgcctgcgatctcgggcatgacagagcctgggtgagagcctacggtcgtaacctcaagcaaagtgctcgagactcccatcgccttcttcctagtggcgtcggcttggctgttgtggcgccgcttgagatcgacgacgagcatcttgagatgttgcttttcagccttttgccatacgccggcgaatcctcctcgattgagcttgttgggaaactgtcgtggtttttggaactgtgggacaataaggtttgtgtttggcagggggtgttagcgtggactcacttcgaatggtgagctacgaggggcttgagggtggatttgaggcgagttggttatattggttcaggtcggagccctagtctagtgcaatactgattgtagtattgcttagagcgtgaggagtttggtctccagcttctgggcctcgcagcacctgttgtctcgtctgttgggtcatgcttctaggccttgttgcccctatggagtcgtatgtcgaggcgtgcgtcgttgtacctctcgcatggcgtcgcgtcttgtccgccttcctgtagctacttcgatttagacgtagcggtgcttggtgggctttgttgagtcagctcaaggagtggtttagggatgtcttcagtacaacttcatcttccatcatcccctagcgtcatctttcatcatgcgcagacgcatatttggtacgtcgtattgtcgtgtcccctccaatgtatgggtcactgtagagaccctaatgctgaggtttctatggtcggggtcgtccggtcccactggtcagcagggttatgtattcgtcgtcatgtttgacagagacccctcggtatcgcttccaccgtccggacatggctcggtatgtcccatcgtgctgatgtggcttgatagtactaggtcagttagctgtcgtcttgctgggttgctcgacgggcaggttggtcggcagcctcatctcgctgggttgctcggcgggcaggttggttggtaacctcacctcgttgggttgctcagcgggcaggttgctctgctgccttaccacgctaggttgtttggtgggcaggttgctcggtagcctcgcctcgctgggttgctcagcgaatatttgtttggtgggtaggttgctcggcagcctcgcctccctgggttgctcgatagacatttgttcagtgggctgatcggcttggtgggctgtccccgggtggccttttgggccttcccatcgaactgctttgtaggcgaactgttttttggaggtctgccttctttgggtaccctgttttgtctcttaactaaggctgatgaagatgtggtgaatgtcgaagaattggcattctgcatcattgaagagagactactcatgcaccatgtttttagggcactcctaggccatcaaggatgcttgttagcaagtgtgtggaagttaatcactaggagacgaagttgttagcaaggagggactctatgaggttcgatagtatcacatatgaagttgagggttaggcatgtcaatcaaagtagatgatgttgccatccatggatcatccttaggtggttatacttttgtatggagtaagtgatgaaatgtagctctaacacctcttgcaccacttgtctgtcaatatgagtggtgaggtgtagttgatgttgaaggcattgagtcatcaccatactgatgagctttgttgcgtttagagttgttatagtgttggtgcacctgtcacacacatgaaaactggttcgaaggcataggaaaaaaagacatggatggttgaagcatgtcacgtccctatgtgcacacatgtcagcagggatttgaagtttagcttcaagtaagagagtggatgagggaacgaggaaaggtaagtatgggtagttctaaataggaaagagcatatagaaagggggagaaagagtgactaagggttacctatctatgggggatgactacataactatgactacataactcttggaggggtgagatccacctatagtacttaccacctaggccaatagtggggcagcatgtggtgtctactacaagtgatatgaggaaaggacaaggtggatgatagaagggaagatttgtaccatctacatttgtccaaccatgaggcaccatgtgggcatggtgtggctcgcttggcgatgacgtggaggaatccaaatgaaggggcaatttgggttgtggcgttgggttggaaggatgatagaagggagagtatgccagggccaaaaatggattgtagtgatttttcctcttctctcacttgtatatatatatttggataaactattcctaggttgtaaacgacccatgaaaaggaactcactgcaggtccctagggtgtggtctcataattaagttagatatggctttaacctatgtagcttatatttttttctaaaaagttgtgatttagggttcttttatggattgttgttacaaccatggtatggggaaacaatgtcgcaccatagtcatcgttagattcaatgacattagcatgaccgcatgttagcaccatccaatgacatctccatgtccttattagctcaacatatatcttttggggttccattagttcttttgtgtagatgctcacttgctaaaagctcatcaagaggtcccatctaagtcacatgtgagaaagcgcttggggtagacatccacattgcatatcttgtattgccttgtcatgtgcaaggtatatacattattacgctcctgatgataaatgaaaagatgcgtaccacaccttttcattattgggatccaatgtccttggatattatgggtgatgatgtcaaccttaagggccacaactagtgccttgatcttggtgacagctatgggaggttgtcactattgttggccattgatgagtgtagattgattaagcaatcatagatttattggaaggaggttagagggtgacacaagagaggctaacaacctaagaaatagcaacataagagaggctaacaacctaagaaatagcagtgacacaagagaggatggcatgcaacacatggatagataggaagaaaagcatcatagagggatacaaggctaggagatctaaggccttcacttctttgtttcaatagtacaagatatctatttatttatattccctatgacttgactcctgttcaatcttgaggtaaggtacttgtagatttgaactctcctttttttgaacaatctctatttcctaaattgattatcccttttatatttctaattgaagttgaattaactactacttagggtaggaccgattggctagggggacccatccactcttggcatgcttccttcacaagcacctggctaggtcttagcttggctactctgaacccaccaccttgggtaccaattgaactcataacataataattatactctttgtataagtgtattagcattgtagataattatcctatataacaagctttttactagcaaattgctctcaaacaatctcacaaagcagagcaaaatagtgaaaaaattatggtgcatcacataatatctatagagcttgtatcatgcagagaaagatcaaca

SEQ ID NO: 953 - DNA, 5302 bp, Zea mays
  Intron number 1 from transcript GRMZM2G006252_T02 (locus G RMZM2G006252) derived from phytozome v7.0 (chr-ID 4; pos 1 87984818 to 187990119)
tcggccagtaacacgcattctctctccctgcccaggttaacacttctctctacccatgttcttttttcgtttagggcaaaatggtaggttctctgcctgccttgtgatttaagaaagaatataaggaaggggtttatgaagaggggaggttccatttttccaattggaaacaaaaactgtaaaaaacagagaatcaaatcgacagaccaacctcgcctactactctccctgcacatatgctcgatgcaactttttcagttgttgtggctgttggctgtggatgcaagaaaataactagaaatagctgcaactgcagccaaataagctgcactgatgcagcgacagtcaccgtaccatgtttaattttaatacaggaccttgttttttctcatctcctttttcctgcgtgcatcagcagttcagtgtatgcagcccctgattacagcaatttatcagaggttggctgggacacgcggcaggactcgccctgtcgttcgtacgtttataccatctaaatcttgccctagcaaatgctgttcgttctaagcatttcattccgagattttctcgcagatttctggcgccgtactgagcattattatgttctgctttgatttttttttattgtggtgttcggcttagtctgtagttattgcttgcagggtcataaacagggaatggtccaatgctgaattcatgatggtagcatgtatctccttttttccttcttcttgtagtgctaattaacatagatatgagataagataggcgcatgcgcatgcggcatgccttcagtttatctatgttttctcacatgttgcttgtattgcgcattacggtatgacctttagtgatcacccttatgcgtcagacctcagctacacatggttcagtttctgattttgcttcagctccaagagacccctaaccttgaactcttcatctgtatatatgtctgataagagttgctagaaaaatctgtcctctagccaaggcaggaaaaaaaactttgctcagtatttccaatggccaataagaaatttcaatctaatcttagtcagctgtcctgaatcatcaataaaaagctgcatcatggtcctcaggccacatataattgccatatcaatatggtgtcagtgttaatgtaggggatcttgctccattgaagccactctgtaagtacacgtagcgtgtgaatgcatttgagtcgtttagacaaatgttgttagcattttgactattgcgtgtagttctggagaaaagtgggcaagacctttggtttgtcatgcaaatgtttgaaaacaaatcagaaaactgtacgtaccacagttttatatttatgcccaatatgacattgttatgatgcaaatcaattccctttctatttttctaaactacgacactattaaagaaaatatgcatcttcgtctcatgtctataagcatcaataatatttgtctgttaacaacatggtgcatccttttatataatcatgacagtgtagttgaatgccgacaagacatggaactcaatagtgtaatacttgagatattgccattgtttcgcctactctaatagattgtcctgctgcttgtccagtctgctagatcgcatacattagctccagtgtacaatttcttggcaacgtgcaaggctggtcgtatcacaaggtgttttgccagtcaaataagtgtgaacatataaatctgttacttcatactaaagtgagctccatatgcaatagaatatgtagtatcccaactttccctaccatggaggggagatgaaagagaataagtggtgaatactgtttatttatttcttgataccggatgcaaaaataaacaacatgtattaaaaatgttttaacctgacaattactctccgttccaaactataagttgttctaactttcatagagtcaaagcatcttaggtttcatcaaaattatagagagagttctaaagacttatagcatcaaatggttatattatgaaaatacaattaatagagaatccaataatattatttgttaccataaatgctattattttattatataaatctggtcaaatttgaggcactttgattctctaaaaaagttaaaataatctataatttagaatgaatggaatatatatttttctccttctctctcattcttcagtcttgacctccttagagctgtcctcagtcctcgaaagggtgccttgaagcccatgtgcatgggtagattaggtggcatgtatattatttggcagtctaagaatagaaaaggtcctctaggcctgagagtcctctgctggttttactttaattataatctggcagctttaaatcttggctcctgttttgcttttacctgtttatcatattgaaagttgtgacacaggaaagggcgcgtgagctgctttcccttttctcccatttgttttattcttacaaggagcctgcaaaaacgtttgatgcaagaatgccccatttgttttggcctgatcacatggcaccactatgatgactctttaatcaaagcctcatcgataatcaactctgttatactaagccttgggaggcgagtttttggttccttgtgggtgcttttgaagcaagtacagctattcattaacccgcccaaacttattatctgacaataaggtatatatacacacacatatagaatttcgtattttccttcgtgactacaaagtacaagaaatggattcttgaatccatttttttttttgtaaaagaatgttttttagtgatccttcagcatttgaactcagcaagggtgctccgagccaccaaatgtttgaagtaaaagaaggcgaggaactgaacggtctcgggaactattttctttgactcaaaagaaaagagaaactactttcaaataatgatgactatcaatatgatcatgctaatggttagtaaagtactatgacatatggttagtaaacttctgatgcccatgttacctatgcagctctttgctttccggccagacttacggcgtgccaaacttgttcatctgttccttcagttcatgttcatgccgtttcttgccaaaagtctagcgttgaaaaaaagcgccgcactctggaaacgaagccaacaggctccaactggacaagatccggtctttctaacacctcttgtgctactaaagacatcccactctctcaccttggtaataaagtgacacctttaatttggcaaaacatttttcgtaatgggtatatgatcaatttgtggggtatttgttttttttcgttttgggtgttctagtttactcagaacccatgatcacatatcttaaggtggcggtaattaacctatttgtaagacgtcatggcgtcatatatgctgctttcctgctctaagttttttttttgctgccttgattttgctgtcaactttgttttacctctccggcgatttaaagtgtagttttcgtagtatttagcaatcaggcactccaacagtgccctaatctgtgtaacaaataatatttagcacttcaaatctctcagtgctagttgtctttcttgctgtcttgttgtttactgaactaataaggacaggaataagctgtcaggttatattaaaactcaatcatgctgtatttaatttctaaacttcccttaacacttatagtgtatattcttatctattttcatttttttgaaaaaaagtattttctcttcatagtttatacactgtagtttcattatttcatactacactctgctgtttttcaagggcccacacttttgtctggatcttccttttatggttcgagagacttggagtcatattgttagcagtagcattacttttgttttctgactgatgacacccatattaaaatccatcgcataaaactattgccttgtctattcatgcacccattgttttatgacaacgagggtttcaagctttcacagttccagcagacaccattaatttgactgtcttttttatttgccttttgaatttactctccagctactgatttcccaaaaggcccaagcttcgttcttatcccctcagtcagctggacagctgtgtgcatggcaggctgtagtagtgtccaagcaaaacaggcacaggttcaggttctgcaaatttgggtacgcgtgcttgttattttttttctgcactggtatccccccatctcctagagcttttcttgagaaattaaagagggaaggagtaacaagaatctggctttttacgtgagtttgaaggttcaaaaaagaagatgaacattgggaaagctgcataaaaagataggaaatgaaacgctttattaggtcctctaatgggtattactaacaatactaattgtataattgtcacatatcaaaaatgaaacaaatcaagcaagcaaatgctacttttatatctcaattaattaccatttagaatatatgctaccttttaacttgtataatatcagttgttaagaaaatcaattattgctttaaaacgaatagttacatttttcatcatttcacatgtaccttattgcaaaaaatgagataaccggaagtgtgcagtgtggacatagtgatttcaattgcaagctgcatggtacaaaccccaatgtgattccttttctctcaccagctggatcatccgttaaatatatcaacatgcaataaaggagaaaagcacagagtattcattcaaatctgagttatcaacttaccatgttggtgattccttaagaaaaaaaaattattcccattttacttgtactggacactcaatttagaactgctgttctttaaagcgtattttcatagtatatcctatataaatttctcgggaaaaaaatgtttgtcccattcgctgctttactgttcaataaaaaagtgaagttatgttgggctgcagtgcaggacacttttgcagtccaaccaatcagatggttggtcaaaggagagagctagagagggagagagagagagaggcgggatcgcagagcagcagaaagcccgccattctcgtgctaaaaatctctcatttatttttatttatctctgccatttgcccgtattcaaaatccaatccctgatgacttgggtataatactggcacgacccagctgctgcttgctggtgcctggtagtaaccggacacagacccaaactagaataggtgtctgttcttgtctgcggttctctgttcgagtccaaggctccaagcaagcaaagaaccgaaccaccgggagcaagaaattttcccagagtaagcaagtcccaggactcaaccaagaagagccctttgcatgcag

SEQ ID NO: 954 - DNA, 16817 bp, Zea mays
  Intron number 3 from transcript GRMZM5G829516_T01 (locus G RMZM5G829516) derived from phytozome v7.0 (chr-ID 5; pos 3 4166261 to 34183077)
ttaggttcagaattgtttttaacagagataatctggtaaacatggggccacaagaatctttggggtttactttgtgaaagtcgcctagagggggggggggtgaataggcaaatctgaaatttacaaactttaagcacaactacatgccggggttagcgttagaaataaagtcgagtccgaaagagagggcgaaaacaaatcacaagcaaatgaaagcgaatgacacggtgatttgttttaccgaggttcggttcttgcaaacctactccccgttgaggtcgtcacaaagaccgggtctctttcaaccctttccctctctcaaacggtcacctagaccaagtgagcttttctcctcaatcaattgggtcacttagaccccacaaggaccaccacaatttggtgtctcttgttttgattacaaaggtgttgagaacaagaaatggggaagaagaaaagcgatccaagcgacaagaactcaaatgaacacaaatgtctctctctcacaagccactaagtctttggaatgagtttgggacttggagaggatttgatcttttgttttgtgtcttggagtgaagtctagagctcttgtattgaatgtgatggctgaaaacttggatgtcttgaagtgtggtggttggggggtatttatagccccaaccaccaaagtggcctttgggaggggtgaaagttccctttgacccgggaacaggatctggatgtcgcctagagggggggtgaataggcgaataaaacttattactttaaaacttaaaatcttactctactcgaagacttagtacgcagtggagtgagaagactcttcgagtaggttgcagcagaatagaatatcctatctcaaaatgtcctgcacttcaaataaagcttataccacagataagtattgaagtgcagatataaagacgagtaagacagagagtcaggatacaatacagaatagagcacacagacgcagggatttatcccgaggttcggccaagcctgaaatgcttgcctagtcctcgttggagttagccacacctgggcttggagtctatttcaactccttcctccgtttgctcagatctgtcagtatgacagatagagcctttcactattgagatgggttacaacaacaccgtggctgcttacagacttctcggcagcacctcggtagagtaacgatacgctcaagaccttgctctagctcttagcagctcttctccactctctaaaggcttatagctgtgccttctacacaaactatagagttacacacaagagggagagcgagaattgattcgagtgaagtctatacttgttggctgcacttctatcttgctggaggcgcctaggggtcccttttataggcacaaggggcctaggagccgttggaatcccatttggaaggcaatactttctttctgtcgggtggcgcaccggacagtccggtgcaccaccggacactgtccggtgccgatctccttccataagtggcgcagtcgaccgttgctgtcttggagccgttggcgcaccggacactgtccggtgcacaccggacagtccggtgcccccatatgaccgttggctcggccacgtgtcccgcgcagatcgcgtggccgaccgttggtccggccgaccgttggctcaccggacagtccggtgaacaccggacagtccggtgaattttagccgtacatcgccgacgaattcccgagagcggccttttcaccagagtcagcctggcgcaccggacactgtccggtgcgccaccggacactgtccggtgcgccaccggacagtccggtgtgccagactgagctgagtctcggctgtacacagccaagtatttgcatctcttttcttttcttcttttctctgtttctaacacttagacaaatatgttagtacacaaaaaccaatgtactaagtctagaaacataccttctcttaattgttacatctacaacatttcacatgcttgagctttgatgttggactcataaatcatcaagttggcttgacttgatctagattgacatttcttagctccaacatcctgcaaaggtcacatggaacatctccaaacataggaacatcccaaactgaagatcaagatgaacttagctcttttgggctgcttccagttctggttttgacacttgttctccttctagtgaccttgatctccttcttagagcttgatcttgagccttatgacttacaccacgtaactagagctgttacctcattggttgtaagtcacgtccttatatagtgatccttgatgtgccgtagctgttctcaactcgatcacccttgactttgcaagctttcttcttcacccttggctttgggttcctcagtctccttgaccttctcccgtgcacttggtacctcgaagctcttcttgcctccgtccttggcttgatcagttgtttccgagctacgcatccgagtatcacttttgcaatgtccatcttacttgtgatgcccattatatatcatcatctagtccttgggccatcacacttgttcacttgtgttgaaccctatcagctttacactgagcacctgttcaacactcaacacacttgttagtcctttaattgagttgtcatccaaacaccaaaactcacaagagagctttcaatctccccctttttggtgattgatggcaacacaattaaagcttacataagaataagatttgaagcacaaattttgaattctaagtttatagaattgctccccctaaatatgtgcttacttcagattcataattttggccttatatgccaatttgcacatacttaggcaattcgaagcatttctacaccttagcactttttggaatgcattgtgtcaagaatcaaaccatgatgctataacacacaaatgcacataatcagagttaaacatcattcaaattagtgaatatatcacaggaatatcaaactaccactattcaccattaagataccaatttaaactaagataccaatttaaagcaatcttaaagcacctttagtcttaaagcaccattaaccatatgactatctattatactatagaatccaaataattcatcgcagcggaaacactagtccatatgatgcaacacatataatactgcaggaagcatatgaataacacactagcaaagctcaaactgacacatcaccccttaggataagctttcctctcaggttgagataagctttaatgcacaaattctccccctttgacatcaaccaccaaaaccatattcatgcaagaacataggatgatgtcaagggacagcagggtgttaaggaggagagacacattatcaacactcccccttacttattgagcatatgcactaccaacatttaatgaaaaaagattactacttccttttgtacctttaccatgttgtagtgtacttcccatcttgaaagtatttaatctcttgagagcttctccacacttgtgccagattctttatcctaaccttttcttgttgctaagacaccaaacttagaacaagttatagttttgggcacaagaagaaacttctattctaatgattatcacaagatgtcaattaaagcaaactaccatggctaccaattgaaagataccaattgcaagatcatttattatcgtagctccatgatattaaagaataagcatctagtatcaccaaattttatagagcatgagcaatctagaaatatgcaattactcgcgtcttaagataccaattacttgacttacggaggtacccaagtcctgattgctccatttcttgctcatcttctcttttccaccttgagactatacaagatcactcaagaaacaattagtctaaaaatacaagttatgtgtgctccccctaaacttgtgcatcaagtattagatgacttgcactttgcacattctagctttctcagaactagaggggattacaacatatcttggtcaaggcatactctcaatttcatcacaaagaaataccaattgagtaccaaatgaaagattgacttaatatagcaatgcatgctaatcattgtaccacatacatgacaatcattgtaccacctgtaccaattgaagaacacaatcatgcatataaagcgtaatgtctaagcatgccataattaagaaggtttcttagatgcaccaaaagaaacaacattttaaaggcataaatcatctaaaccaagatactaccgattgaaagacaagaacatagctatgatcacaattaatggaacttcaagatattcaataaaattgcacagttccattttccatacctttgcctttatgagagcacttgttatcaccaattcagggctccttacgcatctcatagctcaaaagggcacgacatggatttgaaattcacacaataccaaaccagggtaatcatgtgaacatggactaaacaaaatgtcatatttgcacatagcatgacttacacacagttacatgtttatccatatacaccaagagggttaatcgctgtggatataacaaatgaaagagctacccatgaatgattcaaaagatatatcctttagtgcactagtcatgattaaacaaacatcattatgattcatttagcacaggcaatcataaagcatcactactccaaagacaggtagcacaacaagctaacttaagagcaacactaaattgcagttatgtacttaaaatacacgggtaccgtcctttggagagcacgttgtagattctcatcaaagtcctttacttgattcaccaataatggttcaggacctatacaccttatttcacttgagatgaacatgggattagtgttttacaataattcaaccttgggtcaataaacaccaaaacaattgacagcttaagcatttttagataaccgtcttaagctctcccatggtctccagtccatctcaaggcacctgcatggtctagttagcacagtttggtacccacctcgggatgggtccataacgatcaactaaaagtgcctttggcacccaaatagtctttgtgctagttctaggtgagctcgttgtagatctagcacaagtatatgatttgggtttcctaagcaaatgagattgagacaactttacttgtttaggagccttacctttattacataccttggatagatgaccctgctcgtcacacttgtagcagaagcgtcgctcaacttgacatgacacttgttgtttgttattttccttagtgggggtcatcttggagagtgcacgtgcttggttcatcaatagcggacaagaagtgatcatgtggtccttattgttgcatccaaaacaactccttgtcccttcatccttgtctttgtatggacaagacgcgataaggtggcctagcttcttgcacttgaaacacctcctttttcctcttctctttttgctctttgatgacatagagaaaaggtcagtgcaaacaacatgattaagtaaatctttacctttttccaagctcatgttgatttcttcatctttaggaacaatctttttatgaagctcaacacttgctgcagtttttcctttctcaagcttcttcaccacgcgcccgtggatatcttgagagagttgagcaatgcgtcttctccttagttgtcttttcttcttgttcccacacaatttcttttgtgaccctgcatcttgatgcttattcaaacattggctttcttttgaacaacaggggttagcacatggtgatatacaattcaaatgcgcacacgtgcgagaatgaggttcacatgaatttaagttcgtaattataacctcatgagcaacattaagcatgatatgatcatcaattattttattatgagaatatgacaacacatcgtactcttcacctagagcaagcttttctaaatttagaatttctacttctctctcaagcatggcattttccattttaagttgagcaacacaagatatagcatcatcattactattttgctcaattaaaattgaatcataccattggaccaagacatcatgagagcactttagctcctcatgttctttggtcatcttctccaggctgttgtttgttttgatgagagtctcctctagcctgagaagcatctcgctttgttccttgttccttctcaacagcttaatcaagagcgctttgtcttctttgttgagatgggtgtagaaacggcgaatctcctcttcttccacattatcggtctcattttccctgtcattaatgtcagtggaagcaatataggaaaatgtaccttgtggtgatgaggattcatcctcgctatcatcctcattttcctcctcatcctgacttttgtctccatcgtcattgttagcaataagacacttattattagtggaaaacaaacctgtcgacgaggtggattcatcgtttggtgcccatcgttcttgttcttctcccttgtacaagttagtatcactagcaacagagggagcagtggaagtgcatatggacttaaaaaatttcaacttaagtttagtccatagatcatgagcatcaaaaattaagtcactatcactactcaagatggcaaaataggcacctctagatagagaatcaactaagatgttgcaagcatggtgatttagagttagacatcttagttcttcattagaaggatttttactaacattagaaggaaaaatacttctactaaagacctgtctcatttcaggatcaacactcatgaaagcattataaatagagacagaccaagacttgtaattagaaccatcgcctaaaagaagttctacagttacctcttgtgacgacattgtcatctccggacggctaagcccacactggagaggcctagctccgataccaattgaaagttccctttgacccgggaacaggatctggatgtcgcctagaggggggggggtgaataggcgaataaaacttattactttaaaacttaaaatcttactctactcgaagacttagtacgcagtggagtgagaagactcttcgagtaggttgcagcagaatagaatatcctgtctcaaaatgtcctgcacttcaaataaagcttataccacagataagtattgaagtgcagatataaagacgagtaagacagagagtcaggatacaatacagaatagagcacacagacgcagggatttatcccgaggttcggccaagcctgaaatgcttgcctagtcctcgttggagttagccacacctgggcttggagtctatttcaactccttcctccgtttgctcagatctgtcagtatgacagatagagcctttcactattgagatgggttacaacaacaccgtggctgcttacagacttctcggcagcacctcggtagagtaacgatacgctcaagaccttgctctagctcttagcagctcttctccactctctaaaggcttatagctgtgccttctacacaaactatagagttacacacaagagggagagcgagaattgattcgagtgaagtctatacttgttggctgcacttctatcttgctggaggcgcctaggggtcccttttataggcacaaggggcctaggagccgttggaatcccatttggaaggcaatactttctttctgtcgggtggcgcaccggacagtccggtgcaccaccggacactgtccggtgccgatctccttccataagtggcgcagtcgaccgttgctgtcttggagccgttggcgcaccgaacactgtccggtgcacaccggacagtccggtgcccccatatgaccgttggctcggccacgtgtcccgcgcagatcgcgcggccgaccgttggtccggccgaccgttggctcaccggacagtccggtgaacaccggacagtccggtgaattttagccgtacatcgccgacgaattcccgagagcggccttttcgccagagtcagcctggcgagtctcggctgtacacagccaagtatttgcatctcttttcttttcttcttttctctgtttctaacacttagacaaatatgttagtacacaaaaaccaatgtactaagtctagaaacataccttctcttaattgttacatctacaacatttcacatgcttgagctttgatgttggactcataaatcatcaagttggcttgacttgatctagattgacatttcttagctccaacatcctgcaaaggtcacatagaacatctccaaacataggaacatcccaaactgaagatcaagatgaacttagctcttttgggctgcttccagttctggttttgacacttgttctccttctagtgaccttgatctccttcttagagcttgatcttgagccttatgacttacaccacgtaactagagctgttacctcattggttgtaagtcacgtccttatatagtgatccttgatgtgccgtagctgttctcaactcgatcacccttgactttgcaagctttcttcttcacccttggctttgggttcctcagtctccttgaccttctcccgtgcacttggtacctcgaagctcttcttgcctccgtccttggcttgatcagttgtttccgagctacgcatccgagtatcacttttgcaatgtccatcttacttgtgatgcccattatatatcatcatctagtccttgggccatcacacttgttcacttgtgttgaaccctatcagctttacactgagcacctgttcaacactcaacacacttgttagtcctttaattgagttgtcatccaaacaccaaaactcacaagagagctttcaaggggctgctgtcgatgggcgcaccggacagtccggtgcgccaccagacactgtccggtgcgccagccacgtcacccaaccgttagggttcgaccgttggagctctgacaggtggggttaccggacagtccggtggtgcaccagacaggtactgttcactgtccggtgcgccttctggcgcctgctctgactctgcgcgaactgtccgcacactgtagctgtgtcagccgaccgttgaactcgaccgttgcgctagcgaccgttgctccgcttggcacaccggacagtccggtgctacaccgaacagttcgatgaattatagcggagtggctttccaaaaacccgaagctgagcagtttagagttgatctccctggtgcaccggacactgtctggtggcacaccggacagtccggtgcaccagactagggcagccttcggttggatttgctcctttctttttgaaccctatcttggactttttattggtttgtgttgaacctttggcacctatagaacttataatctagagcaaactagttagtccaattatttgtgttgggcaattcaaccaccaaaatcatttaggaaaaggtttgaccctatttccctttcaatctccccctttttggtgattgatgccaacacaaaccaaagcaaatatataagtgcagaattgaactagtttgtataaggtaagtgcaaaggttgcttggaattaaaccaatttacattttcataagatatgcatggattgctttctttcttttagcattttggaccacgcttgcaccacttgttttgttttttgcaaatctttttggaaattctttttcaaagtctttttgcaaatagtcaaaggtatatagataagatttcgagaagcattttcaagatttgaaattttctccccctgtttcaaatgcttttcctttgactaaacaaaactcccccttaatgaaattctcctcttagtgttcaagagggttttaacaattgaaagaatgtcaaatattttagatcccaataaaaaacccctccttaaaatataccaattgagatagaatttcttagaggaatactaatttgaaaaataccaattgaaaacaactttccgaaaaaattgaaattggcgtggtggtgcggtccttttgctttgggctaatactctctccccctttggcattaatcacaaaaaacggagtcttgtagagaccttttactttctccccaatggtatgagtgaagattataccaaagtggagagcgatgcggagtgacggcgaagggtatataatactgatagagtggagtggaagccttgttttcgccgaagactccatttccctttcaatcttttgatctacggatttacctcccatgtcgaggtcgagatgccaattagttcccaggggtgtcttgatgggcttggcatccttcatcccaaacttggtgagtatgtcttgaatgtacttcgtttggctgatgaaagtgccctcttggagttgcttgacttgaaatcctagaaaacacttcaactcccccatcatagatatctcgaatttttgaatcataatcctactaaactattcacaagtagatttgttagtagacccaaatatgatatcatcaacataaatttggcatacaaacaaatcatttgcaatagttttagttaagagagtaggattggctttgccgactttgaagccattagtgataaggaaatctcttaggcattcataccatgctcttggggcttgcttgagcccataaagcgccttagagagtttgtatacgtgattagggtactcactatcttcaaagccgggaggttgctcaacatagacttcttccttgattggtccattgaggaaggcacttttcacgtccatttgatgaagcttgaagccatggtaagtagcataggcaagtaatatacgaattgactcaagcctagctatgggtgcataggtttcatcgaaatccaaaccttcgacttgtgaatatcctttggctacaagtcgggctttgttccttgtcaccacaccatgctcatcttgcttgttgcggaaaacccacttggttcctacaatattttgattaggacgtggaacaagatgccatacttcattccttgtgaagttgttgagttcctcttgcattgccaacacccaatccgaatcccttaatgcgtcttccaccctgtatggctcaatagaagacacaaaagaataatgctcacaaaaatgagtgacacgagatcgagtggttacccccttatgaatatcgccgaggatagagttcacagggtgatctcattgtatcgcttggtggactcttgggtgtggtggtcttggaccctcatcatcttccttgtcttgatcattggcatctcccccttgatcattgtcctcctcttgagggggctcttcttgatcttcattttcatcatcttgagcttgatcctcatcttgagttggtggagatgcttgatttgaagatgatggttgatcttgtggttgtgtgggatctttggattccttaggacacacatccccaatggacatgttccttagtgcgacgcacggagcctcttcatcatctagctcatcaagatcaacttgctctacttgagagccgttagtctcatcaaacacaatgtcacaagagacttcaactagtccagtggacttgttaaagactctatatggccttgtgtttgagtcataaccaagtaaaaagccttctacatccttaggagcaaatttagattttctacctcttttaacaagaataaagcatttgctaccaaatactctaaaatatgaaatattgggctttttaccggttaggagttcatatgatgtctccttgaggattcggtgaaggtagagacggttgatggcgtagcaaacggtgttgattgcttccgcccaaaaccggtccgaagtcttgtactcatcaagcatggtccttgccatgtcaagtagagttctattcttcctctccaccacaccattttgttgtggtgtgtagggagaagaggactcatgcttgatgccctcttcctcaaggaagccttcaatttgagagttcttgaactccgttccattgtcgcttctaatctttttgatccttaagccgaactcattttgaacccttctcaagaatccctttaaggtctcttgggtttgagatttatcctgaaaaaagaacacccaagtgaagcgagaatagtcatccacaattacaagacaatacttactcccgccgatgcttatgtaagcgatcgggccgaatagatccatgtggagtagctcaagcggcctatctgtcgtcatgatgttcttgtgtggatgatgaacaccaacttgctttcctgcttggcatgcgctacaaaccctgtctttctcaaaatgaacatttgttagtcctaaaatgtgttctccctttagaagcttgtgaagattcttcatcccaacatgggctagtcggcgatgcgagagccaacccatattagtcttagcaattaagcaagtgtcaagttcagctctattgaaatcaactaagtatagctgaccctctaacactcccttaaatgctattgaatcataacttcttctaaagacagtaacacctacgtcagtaaatagacagttgtagcccatattgcataattgagaaacaaaaagcaaattgtaatctaaagaatctacaagaaaaacattggaaatagagtggtcaggtgatatagcaattttaccaagtcctttgaccaaaccttgatttccatccccgaatgtgatagctctttggggatcatcgtttttctcgtaggaggagaacattattttctcccctgtcatgtggtttgtgcacccgctatcaatgatccaacttgagcccccggatgcataaacctacaaaacaagtttaggccttgttcttaggtacccaaacggtcttgggtcctttgacattagaaacaagcaccttgggtacccaaacacaagtctttgaacccttgtgtttgcccccaacatatttggcaactactttgcctgatttgttagtgagcacataagaagcatcaaaagtcttaaatgaaacactagactcatttgatgcaataggagttttctttttaggcaatttaacatgagtggattgcctagaactagatgcctcactcttatacataaaagcatgatgagagccagagtgagacttcctagaatgaatcctcctaatcttgtgctcgggataaccagcaggatataaaatgtaaccctcgttatcctaagccattggagccttacccttaacaaaattagacaatcttttaggcgcattaagcttaacattgtctccctgttggaagccaatgccatccttaatgccaggacgtctcctactatagagcatacttctagcaaatttaaaattttcattttctaagtcatgctcattaattttagcactaagttgagctatgtgatcattttgttgttcaattaaagctaggtgatcatggatagcatcaacattaatgtcactacatctagttcaaatggaaacatggctaacaatagatgtagagggtttgcaagcatttaattcatcaatcttagcatgtaatatagcattttcatttctaagattggaaacaatatcattgcaaacatttaaattcttagccttagtaattaatttatcattctcaatcttaaggctagaaatagtttcattcaatttgtcaatcttagcaattaagctagcattatcgtttttaagattaacaattgaatcatcacaaacatttatcttctcaaccttagcagttaatttaacattctcatttctaaggttggagatagtgtcatggcaaatgctaagctcattagtcaatttttcacatttttctatctcctgagcataagcatttttaactttagcatgcttcttgttttctttaataaggaagtcctcttggctatccaagagttcatccttctcatgaatagcactaatcaattcattcaatttctccttttgttgcatgttaaggttggcaaaaagtgtaagcaaatcatcctcatcatcactagagctagcctcatcactagatgttgcatatttagtggaagctctagattttaccttcttctttttgccgtcttttgccatgaggcacttgtggccgacgttggggaagaggaggcctttggtgacagcgatgttggcaacgtcctcgtcggaggaggagtcggtagagctctcatcggagtcccattcccgacacacatgggcatcgccgcccttcttcttgtagtacttcttcttttccttccttctccccttcttgtcgtcgcccctgtcactatcacttgataatggacatttagcaataaagtgaccgggcttaccacacttgtagcaaaccttcttggaacggggtttgtagtctctccccttcctttgtttgaggatttggcgaaagcttttgatgattagcgccatctcctcattgtcgagcttggaggcgtcgatggggagcctacttgatatagactcttctttcttctcctttgtcgctttgaatgcgacgggttgcacctcgggtgtggaggtggcgcctcgctcgatgatttgtttggagcctttgatcatcaactcaaagctcacaaactttcctataacttcctcgggatacattagcttatatctaggatcaccatgaattaattgtacttgtgtaagattaagaaaaacaagtgatcttagaataaccttgaccatttcatggtcatcccattttgtgctcccgaggttgcgcacttggttgaccaagatcttgagccggttgtacatagcttgtggatcctctccttggttgagcatgaactgaccgagctccccctcgatcgtttccctcttggtgatcttggtcacctcgtctccttcgtgcgctgtttttagtacgtcccaaatctctttggcactcttcaacccttgcaccttattatactcctctcgacttagagaggtgaggagtatagtagttgcttgggaattcaagtgccgaatttgggcgacttcgtctgcatcataatcttcatcccctacggatggtacctgtgctccaaattcaacaatgtcccatatgcttgtgtggagtgaggttaggtgatacctcatcatatcactccacctactataatcttcaccataaaaaactggtggtttgcctaatggaacggaaagtaaaggagtatgcttagaaatgcgagggtagcgtagggggatcttactaaacttcttgcgctcatggcacttaaaagtgacggacgacgtgtcggagtcggatgtagaaggtgatgaagaatcggtctcgtagtagaccaccttcttcattttctttttcttctcgtcgctctgatgcgacttgttgtgtgaaggggatcccttcatcttgttgccggactctctcgatggagccttcccgtggcttgtggcaggcttctcaccggtcaccatctccttcttggcgtgatctcccgacatcacttcgagcggttaggctctaatgaagtaccgggctttgataccaattgaaagtcgcctagagggggtgaatatgcaagtctgaaatttacaaactttaagcacaactacaagccggggttagcgttagaaataaagtcgagtccgaaagagagggcgaaaacaaatcacaagcaaatgaaagtggatgacacggtgatttgttttactgaggttcgattcttgcaaacctactccccattgaggtggtcacgaagaccgggtctctttcaaccctttccctctctcaaacggtcacctagatcgagtgagcttttctcctcaatcaattgggtcacttagaccccacaaggaccaccacaacttggtgtctcttgttttgattacaaaggtgttgaaaacaagaaatggagaagaagaaaagcaatccaagtgacaagaactcaaatgaacacaaatgtctctctctcacaagccactaagtctttggaatgagtttgggacttggagaggatttgatcttttgttttgtgtcttggagtgaagtctagagctcttgtattgaatgtgatggctgaaaacttggatgctttgaagtgtggtggttgggtggtatttatagccccaaccaccaaagtggccgttgggaggggctactatcgatgggcgcaccggacagtccggtgcgccagcccacgtcacccaaccattagggttcgatcgttggagctctgacaggtggggtccccggacagtccggtggtgcaccggacaggtactattcactgtctggtgcgccttctggcgcctgctctgactctgcgcgaactgtccgtgcactgtagctgtgtcagtcgaccgttgctccgcttggcacaccggacagtccgatgctacaccggacagtccggtgaattatagcggagtggctttccaaaaacccgaagctgagcagttcagagttgatctcactggtgcaccggacactgtccggtggcacaccggacagtccggtgcgccagaccaaggcaacctttggttggatttgctcctttctttttgaaccctatcttggactttttattggtttgtgttgaacctttgacacctgtagaacttataatctagagcaaactagttggtccaattatttgtgttgggcaattcaaccaccaaaatcatttaggaaaaggtttgaccctatttccctttcactttctcgcttattcggcacaacgaagcctggaattgtagggccctcaatttcaatagagacggttggcttatgttattggggtttccctttgattattggacgcaagaacatattcagaatgccattggatcctttggaagagttataatgtgggatgctgacagagcgaacctcacaaggcttctagtgagagctcgtgtcacttccctagaagaaatccctcaatttattgttttcggtgttgcagaagactttcaaggtgtttcttggacagttca

SEQ ID NO: 955 - DNA, 4834 bp, Zea mays
  Intron number 2 from transcript GRMZM2G113470_T01 (locus G RMZM2G113470) derived from phytozome v7.0 (chr-ID 4; pos 9 889849 to 9894682 reverse strand)
aacccagctaatgtcagtatcttgcctttcctttgcttttgatctatctgtgtttgtttgtgttatattggctaaattataggaaggttggttgaaagcgtagcaggtgcacacgagtcttaggtgcatatgttgcatatattaaatcgcgatgatccatatcagattctgcaacacagcatgcacacccttctctgttcaggaaaaaagaggtactagagggcgttagatctgagattgatgacgacgattcaatatgtgcatcatatgcatctgaaatgctcccgggttggttaccttcatgtttggtttccttgtggtttcgttctttgcgccggatgagcatacctatacattgtatgatcatggtttgtaccaatcaagacactcaaattctccatgctttcagtttgcttcaaagtccacgggtagtttctagacaccatctacttcttactactaatttcattaccaatcaactgtttttcatgtgtgatattgcaccatggaccccctacagcttcagaagtaccattcctaaaatttatatccaataactataatgggcttgggagtcaggaataaaagatcatacatactgatggggatgtcatggccaaatctcagtgtcaggttgcaaagtttccatgtactatagcacttaccagagaagtctttgttaagaaaacataccgccaaaaatattggtatgaacttggcagttcgcagcatgtttttattttttaccactacccatcagttgtagttatattttaactggagaaatacttctcttatgtttgtgatgcaaaagttgcttattccttattttttgctttgatttgtccatctacatttgagcagccaaagagtacttctacaaaacagttttgagtctttcctttttctttttccaaaaaccatcatcttgttatatacaagtacaacgcaagatgcttagacacaagtggttaatgagagagaatcttgtcatatcactaagaatcgtatagaagatagttcctacaatgcaaacatgcttagataggctcaacaaccttgttagcattaagcactggtgataacttaagcatcttatccaccttctaggcatagaaaggttttagctaagcacctccattttacatgcttttaccaagttggtgacaacgaaaataaattcttgttgacttgttatgcttctcttttttttatacgcttccaacaggggggggggggttaattcccacctgatttatttctttgatgtatataaggttttttgccttggagtcctacatgagctgtcaagctagaatagcttccattgctgagatggttacatagatacaagatggagcttgtctaaatatgagagggatattatacttttacaggaaaggttaatgtagactgcattttagtgtaagtttggcacttcatatatggacatgacttgattttctttttgtagaataggatctagctagagatgttgcttcaacatctaaatgatttcagaccaatcagcctcgtccacagttttgccaaacctgtgaccaaggtgatgactaatcgtttggcccctctcctccccaaattggtctctgcaaaccaaccagcttttgtgaagaagagaaatatatgacaactttatgcttgtgcaacaaatggctaaaaagttgaaacagtagcaagacgcctcacatcctcctcaaattggacatatcgaaagcctttgactcagtatcttggttctttcttctggaggttgaggttctcattcatattggcttcggacaaggttggcgccacttgctgtgcctcctgcagtagtcctgctctcatcttcatccactagaatactgctgaatggagaaccaagagacaatattattcatcgccgggggctgcgacaaggagacccgctgtcccccatgctctttgttctagttatggatgtcctaaactccttggttggcgggcagctcatgagggccatttccacccgttcgcgattcaacaaccccaacatcgcattttctctgtgctgatgatgcagtcctcttcctaaggcctttcgattctgatctttccctggtcaaggagctcttggaggcctttgggcacacttccaggcttgtgacgaacttgtctaagagctcagtccatccaattcaatgtggagatagagaaaaaattttgatttccaatgttctgaactgtgccataaataatttcccttgtacctacttgggcctaccattgggtctcaagaagcttccaagttggttgataaggtggctaactgtattccaaattggaaaggagccctcatcatgaacagggccggccagttggtcacagtcaaggtggttctctctcctttacctatctactccatgatagccctggacctacctaagtgcgtcatcgaagcaattgatcagcggcgcagagggttcctatgggtttgcagagaaaatgctaagggtgggaattgcttggtgtcctgggaccttgtgcagcgaccacttcatttcggtggactgggcgtgctgaacctgggggtcctaagctgggccctccgcctgcgttggccgtggtcagaaaaaacagaccctagccggccttggagggggctgtcagtccaagtacccaacaatgcatgggccttattcaacatggcggtggagacaggtgtcgtcaatggacagaacaccctgttttggaaagatagatggataaacgctaagaccatctctgaattggctcccaacctgatcaggacagtctctaagagaacattcaattgtcgtacggtggcttaggccctgttgaacagaggatgggtctctgatatcaaaggtgctcccactgtccaagttctgagggagtagctcttgctgtggggtctgttggataataggcagctgatagaaggtgaagctgatcggcacatgtgggaactctcaaaatctgggatttattcgagtaaatcagcctacatggccttctttaagggagcattccgctttgcgccttggaaaagaatatgtaaatcatgggctccacctcgctgcaaattctttgtatggctggtggttaagaggcgctgccggacagaggatcggctggcaaagtggaggctgcctcacccagctgcatgttctttatttaatcaagaaactgaaaccatcaaccacttgttggtctcctgtgtttttgctcggcaggtgggtttctagtccttcaaggctttggtttgagtcacttgacaccagcgcaatctgatggaagcttctctccatggtggcccaaatccctcaagctggttccaaaggagttcaagaaggggatgaactctctcatcattctggtgtcttgggaactttggaaacaccgtaaaagatgtgtctttgatgggatgaggccagatttggtggtggctctacaggacattgccagcgagggagtgctttggtgttcggctggggacaaggggctccagcagctgtttgtaagggtctcgaacagaggctagtgctagagttgttgcgttgtcacctgttctcaggacagctggtcggttcgtcacattgttagtttgtcttggtgtttagggattccttttcctgtgtatttttttcctttcataatgaaatgatacataactcccttgcgtgttcaagaaaaaaacccacgatctagaaactcaatgagacagctctcaccactgcatcagacctaacaagatgaagactactaatttgtttaaaaaaactttcagagttttactgttaaattggtattatttactatgcaaagttatatcacatcatcactaagaccatgaatggatctacacataattttcattctctgaagctgaatatttttagaagttattgatagactatttaattttgtttctaaatctaaaccaaaatgtatttttgctggaagagctattactttgaaactggagaatgtaccccacccaacaaatgtttttttactgacaataagccaatcactatttctatgagtagttgtattttggccgttgtatcttactttctttgggcatatagggttggccaagtctattcaattctcactcttttttggtagtttggttgatgggccaaccagtcaggctaaagctcaacaactcaagcctccaagctgtgaactaaattgactcaagtataaaatactcaagaaagcagctgcagcagtataatttgagggttttaggcttttagctctagtagtactcatccattcataattctggtttatatatgttcaatattccacatgtttatgagaggacaactaaacgtattttgttgaaatggagtcatcggtcaacaacataggtacatgttctttctatcagatggcattatgaaagcatatttcatagttgtaagaatgtgaagtccctgttgtattgcataggatggttacatatatatagactcggaaccctaaccctaataggtcggcaggccaacagtggtgccagtctaactacatatataagaacacacacacacactccaacaatagttgcgtccatggtaagcagtttcatgtttttatcatggttcaggatgcttcacatagtggttctaaatcctgaatgtgttattaactgatttttagttacttctccttttgagcagctctgaggcatcctagtttgtatccgttttcagttaaccgctttgtacgaaaacaagcattaatcctatcttgatttcctttttaacttgtaatttatgttttttggtcaattgtcatgaataggcatttggctgggcat

SEQ ID NO: 956 - DNA, 11713 bp, Zea mays
  Intron number 1 from transcript GRMZM2G578396_T01 (locus G RMZM2G578396) derived from phytozome v7.0 (chr-ID 3; pos 5 6593232 to 56604944 reverse strand)
aaggagagaagggaggaggtcgtggtctccttgaggtatttacatagatggattacttctttccccatgatttttttgtggtttatcattcctgtttaaccctaatcctgtcaagatcagaatgatcagtttgtagaagtagcagatcgggtcgttttttaagtttttttgaggccgattcagaggaacttgttatagtgaaagttttagataatttcacattctttccaacgagtatttactcgcagaattctattccgtatttcaagagttttgaatctctaaatattgttgttggtctgttctgtccgttagtcttctgcagtagcagatcaggatgtttttgaaggtccttgtatccgactcaaggaaactcataatagtataagttttagagtactttattagctttccatcaagtacttattggcatttttctgatgagaattctaagagctatgaggtatgaagctagccattgtgatctatcaggttacaattgcagttacaagttttaatattgggtggcattttagaatatcttatatatcgaatttgttctgatcgctatggaaccattggaaataaagtttatgacctttccatagtgtggttatttgaatgttttcctgcaatatgctgagagttatgggagtgaagtgagacattcgactcagctgattctggttcagttaagagtttcagatttgtgatgcattgtcagtttgcatagaggccgatttaatactgacatctatagaatgttttgaagtatactagttactatttgtgtggaatgcttgagcactgaatttggcttggtatttctgaagttacagaattttaaagctagcatgtttgttgttttgaatagaactttgatagttacattctcgggagcttttgaactagtaaatatcagaatttgagtatgctctgaataccaaaggtgtagctcagccactaaaaattcttgtagcgtatttttgatgcaaatgtatttatgatttcaaagatatagaaaaaagtaagcagaattgctgctgttcagatgagtttctatgtgttttcatgggttatcggtttgaactgtagaagagctatgtttgttgcttgtaaatattatgtgaattgtttgtactgagttgaatgcttttcagcaggttgcagtgctctgtatcagacttaattcattgtcgccttattggtaaaggcatggaaatgtagcggtggtttgctacagttttgacttgttatttttttatcacctacactttaataatctgaagattaccattaaatactaataattggaatggtttaaattatcttttgaattttaatgaagtattattgtaatcctatatcaatctatgttgtcattgttctcacatgttttatgtggttcgtatcacgttttgaatgaattaaagtaatatcgaagtatataatgataattgtagcatatcatatgcatatcataatgcattttcattgaagttatgtcgttacctatggtccaaccgtactagtacaacatcttcggatgtagctccataccttgttgggtaagcaggcagaaggaagtatgcattgcattcatatgcactcattgaatattaatccatgaaaattatattatgaaagtgaagtgatatgtgaaagtcacctagagggggggtgaatagggtgaatctgaaatttataaacttaagcacaactacaagccgggttagcgttagaaatgtaaacgagtccgagagagagggcgcaaaacaaatcgtgagcaaataaagagcgagacacgatgatttgttttaccgaggttcggttcttgcaaacctacttcccgttgaggtggtcacaaagaccgggtctctttcaaccctttccctctctcaaacggtcacttagaccgagtgagctttctccttaatcaaacaggtcacttagaccccacaaggaccactacaaacttagtgtctcttgctttgattacaagtgccttgagaataagaatgggaaggaagaaagcacgattgcaaaagccaagcgacaagagcgacaaataacacacggatcactctctctctcaagtcactaatcactaatgatcacttgtctcaattgtggaacttggagagattggaggcttgattgtgtcttggaatggattgctagctcttgtattgaatgttgaaggttggaatgcttggatgaagtgaatggaggtggttggggttgtatttatagccaccaaccacttcctagccgttgctccattctgccaaccgcggacggtccgcccgcctggaccggacggtccgcccctgcagatcaacggctgaaaacgcaacggtcagcagcaacggctatatcaatggctatattgcatttaatgcgatgtcagatgtcagataaagccagtcgcgaacggtccggtcgtgcaccctggatggtccgcgaggacgctataattcatttggccgaacccgtcaccttcgggtttttcggttcctcacctaccggacggtccgcgcctgagcccggacggtccgcgcgtggtctcggacgatgcttgctcttccatcggacggtccgcagtagagacatgtgtttttgcattggttctgttcgagggtcatttagtgtcgcggacggtccaccgcaaaggcccggacggtccgcgcttggcctgactttccaaaaagcttctcctgtccagaataatctacggtattccggacagtcgatttaatatagttgtagttgaacctttggcacctgtagaacatataatctagagcaaactagttagtccaattatttgtgttgggcaattcaaccaccaaaatcaattaggaaaaggtgtaagcctatttccctttcaatctccccctttttggtgattgatgccaacacaaaccaaagcaaatatagaagtgcacaattaaactagtttgcataatgtaagtgcaaaggttaccaagaattgaaccaataaattatcctaagatatgcatggaatgtttcttttattttcaacattttggaccacgcttgcaccacatgttttgtttttgcaaattcttttgtaaattcttttcaaagtccttttgcaaatagtcaaaggtaaatgaataagattttgagaagcatttttaagatttgaaattttctacccctgtttcaaatgcttttcttttgactaaacaaaactccccctcaataaaattctcctcttagtgttcaagagggttttaagatacatttttgaaaaacactactttctttcccttttgaacataataagataccaattttaaaaactccctttttcaaataaggtggtggtgcggtccttttgctttgggctaatactttctccccctttggcatgaatcaccaaaaacggatactttgagtgaaatataagccctttcaactactttctcctcctttggcaaacaatatatgagtgaagattataccaaagttggagagttgctcggagcgacggcgaaagatgagttatggagtggagtggaagcctttatcttcgccgaagactccaattccctttcaatacacctatgactgggttttgacattcacttgaaagcacattagtcatagtatataaaagagatatgatcaaaggtacattcataagctatgtgtgcaaaatatcaaaagaaatttctagaatcaagaatatttagctcatgcctaagtttgttaaaagtttgttcatctagtggcttggtaaagatatcgactaattgttctttagtgttaatatatgcaatctcgatatctcccttttgttggtgatcccttaagaaatgataccgaatggctatgtgtttagtgcggctatgctcaacaggattatccgccatgcggattgcactctcattatcacatagaagaggaactttggttaatttgtaaccatagtccctaagggtttgcctcatccaaagtagttgcgcgcaacaatggcctgcggcaatatactcggcttcggcggtagaaagagctacagaattttgcttctttgaagcccaagacaccaaggatcttcccaagaactggcaagtccctgatgtgctctttctattaatcttacaccccgcccaatcggcattcgaataaccaattaaatcaaatgtggatcctcgagggtaccaaagcccaaacttaggagtataaaccaaatatctcaagattcgttttacggccgtaaggtgagcttccttagggtcggcttggaatcttgcacacatgcatacggaaagcattatatccggtcgagatgtacataaatagagtaaagaacctatcatcgaccgatataccttttgatcgacggatttacttcccgtgtcgaggtcgagatgcccattggttcccatgggtgtcttgatgggtttggcgtccttcatcctaaacttgtttagaatgtcttgaatatacttcgtttggctaatgtaggtgcctcttggagttgttttacttgaaatcccaagaagtatttcaactcccccatcatagacatctcgaatttctgtgtcatgatcctactaaattccccacatgtagattcgttagtagacccaaatatgatatcatcaacataaatttggcatacaaacaaatcattgtcaagagttttagtgaataaagtaggatcgacctttccgactttgaagccattagtgataaggaaatctcttaggcattcataccatgctcttggggcttgcttgagcccataaagcgccttagagagtttgtaaacatgattagggtactcactatcttcaaagccgggaggttgctcaacgtagacctcctccttgattggtccattgaggaaggcacttttcacgtccatttgataaagcttaaagccatggtaagtagcataggcaagtaatatacgaattgactcaagcctagctacgggtgcataggtttcaccgaaatccaaaccttcgacttgtgaatatcccttggccacaagtcggcagaggctatagagaaacttttattttttcctttgtctcgaacttcgtgaagaactccattctatctctccaacaaaaaagtggagctgcgccccagttgttcactcccttcgttcggagaacccttgttgattctgaacttcgttcgcaaagtaagcatccttttaacgggccagccctttttaatgtgccgcttgacccagttttgaaaatgagctttgctcttctgggcgttgggcgctcccgtggttcgcgagaaggaaaaaggactaatcttttgttacatctggcacgagatgaaaaagagagagctccgtctatcgatccacccatgagccaatcaaagcgagaaacgagggaaaacacctttcctctgctcattcgaaattggattctcgatttatctgccactcctttcgcccggatgtggcgggagtttgaaattgaccaatttagatctcctttttctctgtactttacaatgatttgtgtaacaagtcgctgaatccgctctttaatactaggttatcaccgacctcaccactgggtgtgcaatagatttattggagtggaatcaataggaagacaaggctttcaaatatggaagaagtgggctgggcggtagaacaccatctgaactaattggcataccttgcttctgaagagctaaccaagctttgttccttgtcaccacaccatgctcgtcttgcttgttgcggaacacccacttggttcctacaacattttgattagggcgtggaactaaatgtcatacctcattcctagtgaagttgttgagctcctcttgcatcgccaccacccaatccgaatcttgaagtgcttcctctaccctgtgtggctcaatagaggaaacaaaagagtaatgctcacaaaaaatgtgcaacacgagatctagtggttacccccttatggatgtcgctgaggatggtgtcgacggggtgatctcgttggattgcttggtggactcttgggtgtggcggtcttggaacttgttcatcttcctcatcttgatcatgggcatcttccccttgatcattgctctcctcttgaggtggctcaactcgttgatcttctccttcatcattttgagcctcatcctcatcttgagttggtggagatgcttgcattgaggaagatggttgatcttgtgtttgtgaaggctcttcggattctttaggacacacatcccctatggacatgttccttagcgcgacgcacagagcctcttcatcacctatctcatcaagatcaacttgctctacttgagagccgttagtctcatcaaacacaatgtcacaagaaacttcaacttgtccagaggacttgttaaagactttgtatgcccttgtgtttgaatcatatcctagtaaaaagccttctacagccttaggagcaaatttagattttctacctcttttaacaagaataaagcatttgctaccaaagactctaaaatatgaaacattgggctttttaccggttaggagttcatacgatgtcttcttgaggattcggtgtagatacaaccggttgatggcgtagcaagcggtgttgaccgcctcggcccaaaaccgatccgaagtcttgtactcatcaagcatggttcttgccatgtccaatagagttcgattcttcctctccactacaccattttgttgtacgtgtagggagaagagaactcatgcttgatgccctcctcctcaaggaagccttcgatttatgagttcttgaactccgtcccattgtcgcttctaattttcttgatccttaagccgaactcattttgagcccgtctcaagaatccctttaaggtttcttgggtatgagatttttcctgcaaaaagaacacccaagtgaagcgagaataatcatccacaataactagacagtacttactcccgacgatgcttatgtaagctatcgggccgaataggtccatgtgtaggagctcgagtggcctgtcagtagtcatgatgttcttgtgtggatgatgaacaccaacttgcttccctgcctgacatgcgctacaaatcctgtctttctcaaaatgaacatttgttagtcccaaaatgtgttctccctttagaagtttgtgaagattcttcattccaacatgtgctagtcggcgatgccagagccagcccatgttagtcttagcaattaagcaagtgtcgatttcagctctatcaaaatctactaagtatagctgaccctctaacactcccttaaatgctattgaatcatcactccttctaaagacagtaacacctacatctgtgaaaagatagttgtagcccattttgcataattgagatacggaaagcaaattgtaatctaaagaatctacaagaaaaacattggaaatagaatggtcaggagatatagcaattttacccaatcctttgaccaaaccttgatttccatccccgaatgtgatagctcgttggggatcttggtttttctcgtaggaggagaacatcttcttctcccctgtcatgtggtttgtgcatccgctatctatgatccaacttgagcccccggatgcataaacctacaaaacaaatttagttcttgattttaggtacccaaatggtttttggtcctttgacattagacacaagaactttgggtacccaaacacaagtctttgaccccttgtgcttgcccccaacatacttggcaactatcttgccggatttgttagttaaaacataataagcatcaaaggtcttaaatgaaatgttagaatcatttgatgccttaggagttttctttttaggcaattttgcatggattgattgcctagaactagatgtctcacccttatacataaaagcatgattagggccagagtgagacttcctagaatgaattctcctaattttgctcttgggataaccggcagggtacaaaatgtaaccctcgttatcctgaggcatgggagccttgcccttaacaaaattagacaatcttttaggagtggcattaagtttgacattgtccctcttttggaagccaatgctatccttgatgccagggcgtctcccactatagagcatgcttcgagcaaatttaaatttttcattttctaagtcatgctcggcaattttagcatctagttttgctatatgatcattttgttgtttaattaaagccatatgatcatgaatagcatcaatgttaatatctctacatctagtacaaatagtaacatgctcagcggtagatgtagagggtttgcaagattttaattcaacaaccttaacatgtaatatgtcatttcacttctaaggttagaaatggaagcattgcaaacatctaattctttagccttagtaattagtttttcattttcaatcctaaggctagcaagagagatattcaattcttcaatcttagcaagcaaatcaacattatcatttctaagattgggaattgaaacatcacaaacatttgaatcaaccttagcaattaaattagcattctgatttctaaggttggtaataacatcatggcaagtgcttagctcactagatagtttttcacatttttctacttctagagaataagcattcttaaccttaacatgcttcttgttttctttaattaggaagtcctcttgagagtccaagagatcatccttctcatgaatagcactaattaattcatttagtttttccttttgttgcatgtttaggttggcaaaaagggtgcgtaagttatcctcctcatcactacaattatcctcatcactagaggtttcatatttagtggaggattttgattttaccttcttccttttgccgtcctttgccatgagacatttgtggccgacgttggggaagaggatccctttggtgacggcgatgttggcggcgtcctcgtcggatgaggagtcggaggggctctcgtcggagtcccactcgcggcacacatgggcattgccgcccttcttcttgtaataccttctcttttctctcctcttgcccttcttgtcgtcgcccctgtcactatcactagatagaggacatttagcaatgaaatgaccggggcttaccacatttgtagcacaccttcttggaacggggcttgtaatcttttcccctttcctttgtttgaggatttggcggaagctccttgatgatgagcgccattttcctcgttgtcgagcttaaaggcgtcgttggttgtctacttgatgtagactcctccttcctctcctccgtcgccttgaatgcgaccggttgtgcttcgggcgtggaggggccatctagctcgatgattttctttgagcctttgatcatcaattcaaagctcacaaaattccctataacttcctcgggagtcattagtgtatatctaggattaccacgaattaattgaacttgagtagggttaaggaaaacaagtgatctaagaataaccttaaccattttgtggtcatcccattttttgctctcgaggttgcgcacttggttcaccaaggttttgagccggttgtacatgtcttgtggttcctccccttggcgaagccggaagtgactgagctccccctcgatcgcctcccgcttggtgatcttggtcacctcgtctccttcgtgtgcggtctttagcacgtcccaaatctcctttgcgctcttcaacccgtgcaccttattatactcctctcgacttagagaggcgaggagtatagttgtggcttgggagttgaagtgttggatttgctcgacctcctccgagtcgtaatccttgtctcccttctttggtacctgtactccatactcaacaatatcccatatacttttgtggagtgaggttaggtgatgcctcattttatcactccacattgaataatcttcaccttcaaacataggtggtttgcctaatggaacggagagtaatggagtgcgtctagaaatgcgaggatagcgaaggggcatcttactatacttcttgcgctcatggcgctttgaagtggtggaggccgattccgagccggaggtggagggtgacgaagagtcggtcttgtagtagaccacctttctcatcttcttcttcttgtcacccatccgatgggacttgatggaggaagaggattcctccttgtgcttgtgggcggactcccttgagtgtgttcttcccgagcttgtggacttgtcgccgatcccaagatccctcttggcggttgttcccgacatcacttcgagcggttaggctctaatgaagcaccgggctttgatactaattgaaagacgcctagtggggggtgaatagggcaaatatgaaatttataaacttaagcacaactacaagccgagttagcgttagaaatgtaaacgagtccgagagagagagggcgcaaaacaaattgtgagcaaataaagaacgagacacgatgatttgttttaccgaggttcgtttctagcaaacctactccccgttgaggtggtcacaaagaccgggtctctttcaaccctttccctctctcaaacggtcacttagaccgagtgagctttctccttaatcaaacgggtcacttagaccccacaaggaccactacaaacttagtgcctcttgctttgattacaagtgccttgagaataagaatgggaaggaagaaagcacgattgcaaaagccaagcgacaagagcgacaaataacacacggatcactctctctcgcaagtcactaatcactaatgatcacttgtctcaattgtggaacttggagagattggaggcttgattgtgtcttggaatggattgctagctcttgtattgaatgttgaaggttggaatgcttggatgaagtgaatggaggtggttggggttgtatttatagccaccaaccacttcctagccgttgctccattctgccaaacgcggacggtccgcccgcctagaccggacggtccgcccctgcagatcaacggctgaaaacgcaacggtcagcagtaacggctatatcaacggctatattgcatttaatgtgatgtcagatgtcaaataaagccagtcgcggacggtccggtcgtgcaccccggacggtccgcgaggacgctataattcatttggctaaacccgtcaccttcgggtttttcggttcctcacctaccggacggtccgcgcctgagcccggacggtccgcgcgtggtctcggacggtgcttgctcttccatcggacggtccgcagtagagacatgtgtttttgcattggttctgtccgagggtcatttaggtgtcgcggacggtccgcgcttggcctgactttccaaaaagcttctcctgtccggaataatctacggtattccggacagtcgatttagtatagttgtagttgaacctttggcacctgtagaacatataatctagagcaaactagttagtccaattatttgtgttgggcaattcaaccagcaaaatcaattaggaaaaggtgtaagcctatttccctttcaatatgcaaggggaatattatattgatttgatcagaatgtgaagtactatcttgcagatttatattgaagtatccctcttatcaattatatatttttaagttgttgattaatttaacttgtgatttaaataacttgtcgaaacaatttacttgctgagatttattctcacccctcacagtcttttcaggtgtgctaattggat

SEQ ID NO: 957 - DNA, 5524 bp, Zea mays
  Intron number 2 from transcript GRMZM2G174619_T03 (locus G RMZM2G174619) derived from phytozome v7.0 (chr-ID 6; pos 1 12811224 to 112816747 reverse strand)
ggaagttccctgcacaggtaattctgctcttccacttcatagatttgtttgcacagaatgtagtaatctggaatgtattttgttttgatcggttgtatgagggatgtgctaggatagggttcacatgtggtttcagtgtgataaagaatagtggagatgagtatatatgttctgctggggcaatggcatgcatggattataggtattggtgaacttgtaaagcattagaaatagcagtagtgagaggtgtttacccttgttagaaaattcagtgtttttaaatgtcgtagatgggtgtcactctttattaaaatagtatggtgctatacactcatgtccatataattgagaaaatttgttgtgtgcctggtatatgtagttataagggttaattgtgattctacctggtcattatcaaataacacttcactcttccaatcatcgaaatatatgtttgtagaaaaatgcctccctttcaaatttagtgtcccttgtacataacacgagcttgtcatgtttttgaaacgagaatggagcaaggcctaccaactggtgaatttccatattgctcttagtttctagagatagagatattttgggctatttttttcttcaatcgataaaggttgtggattttctctctcaagcttttctcattttgtcatttattgtaccaaaaatagaaggctatcatactttgggaaaatcttttcaacttttttggacaatcgaacccaatatgcgctagcccaccttcattcttcttttgggtcattttgacttcttatcaatggtaacttcatcgtgaattaatgtattttaactgtttgtagatacaaacattgttttcaagtcggacaacttgctagtcgttctggctgatcgatttgggcgattaatcacgattagtcggacgacttaggtgattaatcgcgattggtccaaatagagttggatgactaatcgtgattaatcggatgacttgaaaacggttgatacgaatgcttttagcattgatgtctcccattttaataaacattttagtaactttccatttagtaacatcattgtcttatgctgatagacacgaacctgttgattctttttggagtttacatattatcctagtctagtatgatgcatatgccctcacgagcaactcacaattacaagtttataggtacttggtgtaaactcatttttgggtgcttggggggggtgttatgggtatttggtgtcaactcatttttgattgacatgctaatgatggagtcatttttggtaaggcagctagttccttataacaaggcctcagaaattagctaccgttcaaacatgattccaacgttcatcccaaattagcatctttagcgacatcgaccactagttatgttagcggacattggaatgtagatggtggtgaacacaacattgttaggatcaagatcctaggtaggctctattgtatgatgatagtggtagtggtaggatcaacccaaaaaaactatcatcctaacaacctggaatctgactataggtacctaaatagggatgaaaccgggatgggtaccagatacggatatgaaaacaggacggattttcggttacggatacaagtattttttgttgtcgggacggatacgggtactactcggataatgaacacctgatacgggtaggatacagaatcattgatacccgataagtacccgtatatatcaggtcggatacgggtacccgacggtcgggtactcggtggctacatgacagcgtactctaccgtcagtcttggcgtcttgcgcatgcggcctgctagcccaagcgccctggcccattacgcacaacagctacagctagcaagcatacccatgctaattatgtttgtggacttgttaatttatttcctagcagctagcaagcatcatctggtagctagcaagaacacttgaacatgataattaattttatctatctactatctgttactccctccgtttctttttagttgtcgctggatagttcaattttgcactatccagcgacaactaaaacgaaacagagggagtatatatttgtggacttgtgaattatgcctaaaagaggtgatatgctaccattttttttaaattgtgctggttctataatgaccttatgattattaactttaaactacatgatgtcaatttttttgttttacttttctatatttgagctatcatgtacatgattatgtatctcttactccctccgttccaaaatattatttgttttagatcttcacttttgtgtccatattcaaatggatgacaatgaatctagacacatatataaaatacatacgtcaaatattgtatgaattcactaacactctaaaacgaatactattttgtgatggagtattttatttgttcgttcgacggttgggcaattaatattatcgggacaaactacccgacaaatatccgatatctattcgagtaatatccgttatctgtttcctactctcccgaattattacctggtcttgtcatgtatccatcccgaattttaactatccgtctatccgtatccggtcccgtaaccgagagaaatacattagggtgtaggatatgggatgaactagtatttgactgtatccgccctgttttcatccctatacctaaatatgaattgaattttgaacaatcattaataattgaatatgttgggatatgatagttaaaaaaacttggccggtaggggaaagaccgccgccacgatattaaattaagaagaagatcaatcggagccccgaccgagaaaggccaccaaagatagtccacgaaagatagtccctcgtgcaacatgaaggttcgccccctataggccagatctttactcgtgctttgagccctcccagcccctacacgaggattcccccccccccccccccccgcccccataggtcagtccatctcgtgtgcacatgaccaggggaaccattgagtgattgagatatggtagttgagttggtatgttatatagttgaatgcaaggaattcatctttaatgctaactggttttttggtaatttggcccttattaattttcaaaattgcatggatatgaaatgctcaattttctgcttggttgcctttcactagatttattttcattcagatcttgaattccgttttttggtcatgtccacacagtgatcactctactcaattcaaattggaactctatttttagtttgagaaccattatgcagtacttagtttttttacacaataatgcttacaccaatttttttgcactcctaatacttagttttttttcacaacaatgcttacaccaacttttttttgcatttctaatttgatgattgaaaggttatgagtaagattgtaaagcagactaactattttttcaagttttattggggaaattactgaactgtcttaagactatatccaaaagcttacccatcctcatacctatattcaaactccactctgcgaacagtgcagtctacagtgcaaaacagtgcatatggttaaactttgggtaatctactgcagtcccgcctaagtctttatggtctaacacctgcagtaccccattccatattttctcattttcgctgaccgagaaacagtactaccgtctggctttcaccattacttgggtcatccgacgtattattgggatgtgtaagaggtgtgaacatgagcggggaatagcagaggtgttatgatcctagatatgggggtaaccctgccaggctaaattgacttgagggagactagactattggtgaggggtaacactgccagactaaatcggcttggatggagactagactattggggaacttggattagttcctctacattgcttgattcaaatttaatactgtcccattctatccttacatagatgaggccattaagaatctaatctttatgattaaggaacaacctgatataatctaatctctccctgatctttatccctggtatgagaggtagatgggctggctctcgggccatccataacacttctgtcccctttctgagcagcttgttctcaagctgcaggagaccctccttaggggaatcacttgacttaacagttaacacaaaaataaaccatttttacatcttggcttaatttcgttattagtgacaaattgcaaaataaaggcatactcattataattggtgcatctccaattgtgggtggcccacatccataagcacaaacagtggtggacccagcccaataatggaaagtaaggggcaaatcaccagccatcaccatcaccagatcgaaatgcccaaataaaaaataacaaaatgcacacccatctgtctaactccctcaacaccagccataaccaaattcagttgcccaaataataatatcaccacagttcactccataggccaaattggcaaatcattgcgcatggcagaccggcagaggcagagcatgttctacagggcctggcttcgtgtgcagcctagctgccagcctgctgaggtgctgcctgccacacgtggggtgctgtggcaccagccaggagtaggagcgcggaggccgggagggttagagtgtggaaggcaggactccgagtctgggagggggagccactaccacacacggggcatcctgtctttgggtttggagattggcgagtgacaagcggtgtgaatgcctaataccctccctcggatgtcccacacgagagctctaggacatcccaattcacctgaggaggttatgtcgagcagtcggcctgctgcagctcccgtcttcttcctcggacagttgcactcggacgcttgacaacctcactctggtctccgagggctggggcagtgctctgagcacaaagacaaaggataaagggaagcttccttggctcacaaccttgtatgctatatagaagatgagtgaatttttgctgaggctgcagtgaactcagagacacttgttggctagcttgtcttggcaagttaaaggagacgaaggttgggtatgtagatgccactgtgtttaatcattgagtactatgagggatttgaaaatgcgtagaacttgcaattgctagacgggtaaggaatgaattgatatgtaggtgagttttgaaagtacacctaacttgcaagctgggttttcaatccctgggtatgtattggtatttagttgacttcattaacctggacctataaaccttttgacacagaattggattctaggctgtggtgtctctatttttccccctttctagagctttcatgatcaagagtggtgtttctcagttcaatcccagcttctgcttccccacaaaattgcagatagtcttagttcttggcagtacttgccttttttcatatggagaagctaaaacagaaaatgttctaaacaggcctcagaaagaccattctgttgaatatgcatcatcattctggtattaaaactatgttatatgtgtaatgcaggttaagtttaagattgataaagattgccgtcctct

SEQ ID NO: 958 - DNA, 10814 bp, Zea mays
  Intron number 6 from transcript GRMZM2G445766_T01 (locus G RMZM2G445766) derived from phytozome v7.0 (chr-ID 6; pos 1 43512835 to 143523648 reverse strand)
cttaaggtacaaggctctaaattagttttgtagtcatgtgcatgttaagcttgtcatgtcaatggaagatgttggaatgcgaaccttaaccctaaacagggctaggagtggtattaatagactgagtaaatgggccaggcccaatacaatgagggtgatatggtaattacaggggaacccccaaaccctagacgggtagtctaacacccccccgcagtcacaactctatcccgtacagatgttgagactggatcgaaagtctacgaatacactcgacggtaggcccttggtgaagatgtcagcgaactgcagcgtggtggggacgctgagaacccgaacgtcaccggcagcgacacgctcgcggacgaagtgcaggtcgatctcgacgtgtttcgtgcgctgatgctgcacggggttggtggagaggtagaccgcactgacgttgtcgcagtagacgagagtggcgcgctgaaggggactgtggagctcgtggaggagctggcgcagccaggaggcctctgccacaccgttggccacggcacggtactcggcctcagcgctggagcgagagacgacgggctgcctcttggcggcccaagagacgaggttggcgcccaggaacacggcgtagccggaggtggaccggcgcgtgtcgggacagccagcccagtcagcgttggtgtagaccacgagctccgacgtcggggatgggcggagtaggaggccgtagtcgagggagccacagaggtagcgcagaatccgcttgagcgcagtgagatggggctcccgcggagtgtgcatatgcaggcgcacctgctggacggcgtaagcgatgtcgggcctggagaacgtgaggtactggagcgcgccggtgaggctccggtatgacgtcgtgtcggcgaccggaggcccatcgtcctcagagagcttcgcctgagtgtcgacaggcgtggagcagggcttgcagtcagacatgccagcccgctccaggatgtcgatggcgtactggcgctggtggaggaagagaccctggggccgacgttcggcggtgatgccgaggaagtggtgtaggggccccaggtccttcatcgcgaactcccgctgaagggcgacgatcgtgcggtgtagaaggtcggcggtggaagccgtgagcacaatgtcgtccacgtagagcaggaggtagacggtgtcatcactgcgccggtagatgaacagggacgtgtccgacttggcctcgacgaagccgatggaggtcaggtaggaggcgaagcgactgtaccaagcccgtggcgcctgcttgaggccgtacagggaccgattcagccggcaaaccagatccggacggtcagcgtcgacgaagccggtgggctggctgcagtagacagtctccgtcagagtgccatggaggaaggcattcttgacatcgagctgatggatcgcccagtcgcgggagagggcgagggagaggacggcgcgaacagtggcgaacttgacgacagggctgaaggtctcgtcgtagtccactccggggcgctgggtgaagccccgaaggacccaacgggccttgtagcggtcgagggagccgtccgaggtcagcttgtggcgaaacagccacttgccggtgaccacgttggtgcctggtggacgcggcaccaggtcccaggtgtggttggccaagagggccgcgtactcctcctccatagcacgacgccaatgtgggtcggcgagggcagtgcgaacggaggagggcaccggggaagcgtcgggtggagtgctagacgtagcagctgccaggatcagccagtcgacggggcggagaacgcccgcagcacgccgagtcaccatcgggtggacgtgcccggggtcgcggtggatggcgaccgggtggtaaacggacggctcggagcgaaccaccggaacgtcgagagcggctggtggggccggctcgcggcggtgatagacgacggcggggtcggcgaaccgggccgcgctcgtcgacgggcccgagtcggggggcgccgaggtagtggcgtggccgcggcgatggtagacgagtgcggggttggtgaagcgagccggggtcgacggggccgcgcgtggcgcaggcggggtcgacggggccgcgcgtggcgcaggcgggatcgacggggccgcgcgtggcgcagccggggtcgacggggccgcgcgtggcgcaggcggggtcgacggggccacacgtggcgcgtaagaggtcgtagtggccgcacgaggagcaggtaacggcgcaagacggggaaccggaggtgggggaggaatcggatcagactcgaggagggagtcaagatcggtgggtggggtggagccagcaaggggaaacacatcttcgtcgaagatgacatgacgagagatgatgatgcggtgggaggtgaggtccagacaccggtaccccttgtggtcaggagagtagccaaggaatagacagcgggtggagcgaggagaaagcttatgtggagcggtagcggaagtgttagggtagcaggcacagccgaacacgcgaaggtggtcataggaaggggctgtgccgtaaagggcgaagtgaggggtagggtggcgcaccgccttcgagggaagacagttgaggaggtgggtggcagtgtgcagggcctctgcccagtagcgggcagggagagacgcctggaagaggaggcagcggagcatattggtggtggtgcggatcatgcgttcggctcggccgttctgtgcagaggtgtaggggcacgagagacgcaactggacgccatgagtgaggaagaaagagcgagaggcgttgttatcgaactcgcgaccattgtcacactgcagagcacggaccgggcgacgaaactgagtggatacccaggtgaagaagtgtgtgagggtggtgaaagtgtctgacttcaaccgaagcgggaaggtccagagaaaatgggaaaaatcatccaaaatcaccaaatagtatttataaccagaaagactgagtacatgggaggtccaaagatcacagtgaaccaggtcaaaagcctgctcagcccgagaagaagaagtagtaaatgggagacgagtatgtcggcctaactgacaagcatgacagagaccctcaaaatgtcccctactacatgaaggatctagactactggtaatcttggtcatggcgtcgggtccagggtggccgagacgacgatgccatgtggtggaggaggtggtggagaccaggacaggagttggagacacgccgacggtggagggctggagcgtgtagagcggccccgagctgtcacagcgagcgagaagggtcctggtggccagatccttcacagaaaaaccagaggggtcaaactcaatggaacaggagttgtcagtggtgaatcgacgaacagaaagaagattgtgagtgatgtggggagctacgagaacatcgttgaggtaaaacggcccagagagaaccgaggcacctactgaggtgactggcagagtggaaccgtttccaacgacgctcgaggatgggtgagaagggagggtgggatgagagcgagagagcgtgcctgtcgtgggagtggtgtggtacgaggcaccggagtcgatcacccagtcggaggggggtggggtcatcgccatggtgctgaaggcagcagcgagggaggcgttgtcccaaccaccagccggcggggaccaaggcgtcgaggtgtgggtccccgggggcaggagcgcgggcggagcctggggcacgacgggcacaccgtagggaggcgtcgggggcatgccgtagtgaggtgcagtcaggagggccggcgccgaggggcgggaggcactcggtgcctggcccggccacatggcgatggtcccggtccaggggttgtagaaggacggccacgcgtggccgccaccccggccggagggaccaccacgagaggatccaccacccccacggccgcccttgcgggagcgacgacctccgtcggtcgtggaagtcggacgaggggccgtcgggacggcgggtggagggcgggtaggagccccggtcgacgggtggcctggccccccgaagacggctgaccgctggtaggagcgctgtagagagccgaggcaggagtgggcgcctcattcgccatggtgagctcctcgaggagaagctcgttccgcacggcgtggaaggtggggaagggcacgctcctcttgatgagagccttcaggtggccgtagcgggggctgaggccacgcaggaggttcagcaccagggtgcgatcggcaacaggctcgccgagatcgcggagagagtcagccaggcccttcatctggcggcagtattctcccacggagaggtccccctgagagaacaggtggaactgggcgtcgaggtggagcgcccgcgcatcccgattcccgaggaactggtcctcgagggcgagccacgcctggcgcgcagtgtccgcctggtcgcggatgatgtcctggagctcaacggtgatggtgccgtggagccacaagaggacaacgctgtccaggaggcaccaggagcgaggcggcggagcgtcgtggtcgacgaggacgtgatcgtcgaggacgaacctccgcagcgtgaggagaacctgtcctcgccaacgggggtagtggggagacgccggatccaacaccacggacacgagggcccggatgttgtgcagacctgcggcctgagcgtggagagcagcgatgaggtcagtgtcgaggtcggaggcgagggggtcctctgggggttccgcaggagctgtcggcgggcgcccgaggaggcgctgcgtggtggccatctgggtggtcagagcggcgcccagggcacgctctctctccagggcgagggaggcgacgcgctcacgcgaagccgtcactgcggcctggatcgtagcgagggtgtcgacgagcggaaagtcggcggcggggagtgcggagggtgcgacgatggggctccaggtgggtgaagcgagagcgggaaaccccggcggggagccacggcgcaggggcagcgggggagcggcgtggagtggcccgaggccggcgatgtagggggcccctccatgggcgagctcgctgctgatcgcagcaggggtggtggggccggtggtgacggtggcggtgtcgtccatggcgacgacggcgggcagcggcaccggcgtggggagggctggcgcggcgagctgcaggcgcggagccggtgcagtagggcgcggtcggggtggggcgcagccctgctggccgccagagggcgtcgaattgccggagacggggctctggcggcgggtgctcggctgctcggcacggacgtcggggcggcgcacgcagcagggcgcggacgtcggggcggcgctcgcagcagggcgcgggcgcggacgtcggggcggcgcacgtagcagggcgcggacgggcgcggctgctcggcgcggaacgggcgcgttgccaagcacggcgcggacgggtgcggaccctgcgccgctgcacggcggcgttcctggcggcggccacgcaggagcagcgggaagtaggggcgggcggcgcgccggggaggtagagagaggagccggcgactgggggccggcggcggctgctgcaggggagagggagaggagccggcggctggggccggcggctgcaggggagagggagcccccggcggctgtaggacaggaaaccctaaacctaggctgatgataccatgttggaatgcgaaccttaaccctaaacagggctaggagtggtattaatagactgagtaaatgggccaggcccaatacaatgagggtgatatggtaattacaggggaacaccccaaaccctagacgggtagtctaacagaagatgctatttttttgagtacatggtcgtggtttaaatttatttgttctctgtatatgtgatttggatgtgtaccatcactggtgcatcttattcactattttgtaagtggccctcaaatgaattgcattagaaccatagtaaccatttgtagtttaggaaaaattgttggagaggacgactgatacagtagattttttttgaatgacactacagtagagaacattaatttgtactgtatggtttagttagtcttttgctctttacttttccaaactgttataggattttttctcgaacgtgcaggagagcggcgcatcattatattaaggagaaaaaaggggatccaacatagactgatacaaaagaaaaaaggcctcatggtggccaaaaaagaaaatacaagaaagggtccatatgaaaaactaaactacaacaaccatgcaaagactggggagctgattacaaccctagtagaggggctgataggacagtaatactcctagcccctaccatctcccagagctccggttctccccccgcccttttgatgaccgttgccacacaaggagagattttatcaaagacatattggttcctctggttccaaatgctccaggctcccaatatgaccaggttatttaaacctagtcttatcgctccttctaccgaaccattgatcctactacaacactccatgaagttccaatcctcaatctgtgttagattagaaaccctaaactagggttgggtgaatattaataatagtggtacgtgggcctagacccaatacagggacaatcacacacaatacatctaacaccccaccgtcgaaactctagtaacgacagatgttgacattggactgaaactcctcaaacactgatgtagggaggcccttggtgaagatgccaacaaactgagaagtagtcgggacatgaagaacgcacacatccccaatggtgacacactcgcggacgaagtggaggtcgagctcgacatgcttcgtgcgctagtgctggacgggctggtggagaggtacatggcattgacgttgtcacattatacaagtgtgctcctcgtcagcggattgtagccacgccgcctcggcgatgtcgttcgccactcgcggccattgttgtattggagtgcctttatggtgacgacgaactgtgtactcacaaaggcaatgaaactagttagtgtgtcgaaggtgacagatttaaggtgtaggggaagcatccacaaataatgtacaaaatcatcaaatataacaagatagtatttgaaatctgaaacaataacgactgggaagtccacaatcacagtgtacaagttcaaagggactagacacacaagatgatgatgactgaaatggaagacgagtgtgacgcccaagctgacaagcatgacacagaatactaggttctttattgctgaaaggaatggcatggacgacttttgacatgacatcatgccctagatgaccagacgacggtgccagagcgaagaggtggaattaacgctgagtgcatgagcactgggaagctgtagggggtatagcggcccgaagatattgcaccttagaatctcctgtcgggacgttagatccttcatagagcaaccagaagggtcaaattcaatgacacaattgttgtcaatagtgaaccgacgaacataaataagattcttaataagtctaggtgagattagaaagtaattaaggcatagagaatttgtgagggaagtgttccctgctgcagtaacaggaagtaaggagccatcaccaacaataatggaagaaggaacgagatatcacgaagtagctgaatgagtaagtgaatgaggatcagaggtcatatgagaggtagcacctgagtcgaagtaccaattggtatactgaggctgctggagagtcatggtgctgaacgtcgaggcgagcaactgttgatcctaggaagtaggaaatccaggtggcggattgggcggcggagtgtagaagcctggtggtgcagaagcaccaagtgagggtaggggcgccccctgaagattaccatcttagtaggctacaaggagggggaccctgtggctgctggtgttgggcggcaacgcctgttgctgctgtgccagaagcgcctgcttgtgatgtggcgcaggtggacaaggcctttggtacgatgagccagggattgtagtacgtgggccatggactatcggagattcccgcagcaggcttggagccaccacatttgcgctcatccctgttgccgctcttgtcgccttcaccgcggcctccacgtccgcccttgttggatgaggaggaagctccatggccatcgcctttgccgcctccggagccggtgccccctgaggagtgctgggtagggccgccgaagcgagcgggagtgtcggtgacgagagtcgtcggaggagcagctcccatggtgagctcctcgagggcaagttcatcgcaggcctcgaggaaggtggggaaatgatgtccgtgccggagatgacgaccgactggggcgaagcgctcgttgagtccatgaatctggttgaggacgaatgagcgataggagacaggttcgcccaagtcaggaaggtcatcggccatcgtcttgaggcgcttgcagacgacatagaggtcgccttggacgatgatgcggagtttggcgtcgaggataagagcgtgggcctctcgattcccgaggaattggctcttgatggcgagccaggtgtcacgaacagtgatgtcgtagtctctgcggtcttggaggtcgtcagagagagtgccgtagagccaggagcggacgacgcaatccatccatgttcagtcgagtgagtccggtgcagggaggtcgcggaggatgtggtcttcagggagtacttgccgagggtaagcagatacttttcgcgccagcgagtgaaagtaccggcgtcgagttcgaggacggtgggaacgaggctgcagatgttttgcacgacgatgacttgagcgtggaggatgagcaccgcggcggcctcctggaagagcatggccgtgtggacggagggccgatcttcgagggatgcctcgttgtggaagtcgccatggtcgctagggggaactaggtcggcggcgacgcgctcccgggctgcgcgctcgagtgctgcccagacacggtcaacggtggtgtcctgctccctggcggtagcggcggcgacctcagcttccgcctgctcagcccgtgccaaggcagcgaggcgagctgcttgcagggcagcgacgtcctcctcgaagactagagcatggagcccaccatagatgaggacggggtagggccgcgcttgagctgtgcgccggaagatggcggtgcctgggtggctgcacgccggagcagcgaagatgggggaagacggcggcaccgagggtagcacgcacgccggagagagggccgcgtcgggggcagcacgccgaagagaggaggtggcgcctaaggcagcacgccggagtcggccaggaaggatgcctcgactgctgataccatgtacaaacttatgaggaggctagaactgcattgattcattgcataacagggtagagaggttacacatatatagacagggatcacagggtttatagaaacatccaatcacagtgattgatccttgcctaatcaactcatataccctacctattctggggaaggtaatcatttatctagccctgattctagcttaccaaaattgactaacacattgtatatcccgcacccaagctttgtttttgaaggcctccaatactgcacatttcttagccctccttgtactaactaaggcatgtggtcgaggagcaaggtccaaattctctgctcatgaagccatcggtcagtctagaaaagagtagttgccccatcaccaacatccgattgcactgctactgcaaagaaatcatgaaccttctctgagacttgaatttgtaaagaggaacagggtctattaggttctgtttttgctagccaaagccacctcattcataagccccaacattactcctcaaggctagaaatgcctagccctccaagctcaagggggcgacaaacttcccacgctaccaagcaatgcccgccttttacttctctgcgacctttccataagaatgcccgacgtatcttatcactctctttgattgcccaggaaggctgtgagacagtggactaggggaattggcgaatgattattgagagcaaggctcgagtacatataggcaaggatgcccactggaataggaaacagtccaatcagggagatccttgcctaatacaatcaactaaccatatagggaggaggcgcagaaggcaacaagcctgtgctgccatctactaccaaacagggaggaggcgcacaaggcaacaagcctgtgctgccatccactacccaaacccaagggacctaccaaacataggaagatccatgcctaatatagctcatgctaacaaaggcaaatcaatagccatagctaagtaaattaacatgcttgtcaacacaaattgcacttgtattcttctagctcttgtcattaaatccaccttccaatccgggagttgatctgcagccctgtctatactaaggctgaacatgttcttttgttaacttctttaaagatagggacagtcctagatagcgacatgggaaatcagagacttggcaaggcaacaagttttgaatgatagcctcaactgttacaggatcagttgcatgtttgttgcaaagtatgtgtttgtgtgtttcatactgctttcacaataacatttccagttccttctcagctctcagtgttcccttctgagtcttgatctttcttacaatttttcttcatgtttgtgactcttataagtattttcatattttcgctggagaactacaatctatacatttattatacgtaaaagttatgttttcctcaggttgaacaaagaaggaaagaggct

SEQ ID NO: 959 - DNA, 4892 bp, Zea mays
  Intron number 7 from transcript GRMZM2G041574_T01 (locus G RMZM2G041574) derived from phytozome v7.0 (chr-ID 2; pos 5 8938676 to 58943567)
agggatacctattcgttgggcaatgtactaatttcaatctttttatgataccaatgcttatataaatacatatgtcttactcattgtttccaaaaatatcagatgaggataccgatgaggatatagaggtcgatggtagtcaagatgaatcgactgccactgatgttcctgacccgtacaacaaggtgtacaacaacattcctaaagaaacacatatgctcaagactgttctcaattgcggttattgccccgcgaagaagtttgagtatgagacacctgtttattgttgtcgtggtgggaaggttgacctagccccactggatacccctcccccaactcaagaggttgagggatagtgcaaactctgatgctaggcactttagtgataacattaggttttttaatggcccatttctatttcacttccctataatgttgcctcgatagtatgacaactaatgtaagggattctggtatatacacgttccgagcacagggcatgatgtaccacaatatcaagtcattaggtagggagggtggggctgagcataaacaccttgagctttacttttatgatgatgatcccactctcgagcatcggtaccgtaagtgtagcgaagagcatcaacagaaagacaaagaggttatttgacagatagtcgacatactacgtggaaacccgtactccgagcaccttaggaccatgggccacgttgagaaccttgatgactatcgtatcacgttgaacctagaccagacgttgaaccagaagacatataacacaccactcacttcggaggtggccgctgtctggatcgaagggagcgaagggcgaggccagttcagcaagagtgttatgctccatgggaaggacagttcaagccactgcatccgctcataccatggatgctacgatgcactatcatatccattgttcttccctagaggcgaacttggctggcacgcaaatatcccaaaggttggagtatccatggacgaagtggatgcataccgtgcgacacatagggcaagtaatgcaaatgatgaagatgcgggttagttgtttgtttataatttgaaatatttgcgcattattaactatcttttcatcatcactcactttataatccttgcgtatgcagaatctcctagccatttatgtgtgtttgtacgtgactactactgctacaaattccagattcgccccagggtattcaatcctatacttcatggaaagcgaatttttcagcagttcgcggttgacacgtccataaagattgagaactctcgtttagattacatacgcaagaatcaggatcggttaagggcagacctgtaccagggcttggtggatagcatgctagatggagatattagagaagagaaggttggcaagcgaactgtgctgtcgacgtcgtttattggcggtcctcgtgacatgagacgtcggtatatggatgctatggctctggtgcggaagtttggtaaaccagacatatttcttaccatgacatgtaaccctaactgggatgagataaggagggagcttcttcctgggcagacaccacaagatcgtccagatcttgtagtgcgtgtctttcatgcgaagctacaagagttaaagcatcggctaactaaataggatattcttggtaaggttcgagcctatgtctatgtcgtggagtttcagaagcggggtttgctgcatgcccattttctactcataatgcagagaaagtacaagctcacatgtcctgagcagtacgaccttttgatctcagccgagatcccaagcaacaagtaccctgaactacgaaagatggttatcaagcatatgatgcatggcccgtgtgggtcgctaaaccctaactgcccatgcactaagggtcgtaaatcgtgcaagaatcattaccctcggcctttcagtgacacaaccttgcaaggtaaggattcgtacccaatttacagacgtcgtgacgataaccgtaaagaaaaggtccgagggtgcgaactggacaatagatgggttgtcccttataacccatacctccttcgtctattcaactgtcacatcaatgtcaaggcatgtgggagcatcaaggctgttaaatacttgttcaagtacatatataaagcccatgatcgtgcgtgtattgttatgagagatgcgagcaaggcagccgatgatgttgatgagatcaaacagtatagagatgcaaggtgggtgactcctccataagccttgtggaggatatacggctttgagcttagtcagatatctccacctgttatgcagcttcaacttcatcttccaaacatgcacatggtggcatttcacgagcggtaaatggtcgagcgagtcatcaatcgtccaggtgttgataggtcgatgctcacagcatattttgaggcgaacaggctacacgaggaggctcgtggcatcctatatcgtgacttccctgagtggtacacttggcagagtggtaagggcaaagtatggcaacggaggaaacgagatacaggtggacaagtcggtaggatagtctctgctcatccggctgagggggagcgctactgtcttcgtgttctcctaaaccacgtgactggcgccgcctcctatgtggatctaaggacagttgatggtgtcaccctaccgacttttcgtgaggcagcagagagaaggggactacttgagtcggacaacacactagatgagtgtctcactaaacgtgcttttttccagatgccatcggcgctgcgacgactttttgccacaatactggtgtactgtgagccaagcgatgtggttgtactctggcagaaacataaagattctatgtccgaggactatcaacacaggagtcagaacaaaactcatgttgagcagatggtattgattgacattaggaacatgctgcagtcaatgggaaaggacataaagacattccctctgactcctatcatcgacacgtatgacgatgctattggtactgctagggaggtttatgaggaggaaagtatccaaccgacagtggaagatgtggctcttaaagactctcttaacgaggaacagagggccgcctatgataagattatgtctgccgttgacaccgatcagggcggattattctttgtggatggacctggtggcaccgggaagacttatctatacagagtgctgctcgcgacgctacgcaaccagggcaagattgcagtggcaacagctacatctggcgttgcggcttccataatgcctcgaggaagaaccgcccattcacgcttcaagataccactcactattgacgatggcgctgtatgtagcttcacgaagcagagtggaacggcagagttgctacggaaagcatctctcattatctgggacgaggcttctatgactaagagacaagccgtggaggcactggacaatagcatgcgcgatataatgggtcgccccgcactgccatttggtggtaaaaccattgtcttcggtggagatttcagacaggtcttgcctgttgttcgtaaagggtcaagggctcaagtggtcgcgtcttcgctacgaatgtcttacctatggaagtccatgtcccacttaaagcttgttatcaacatgagaacaaaaaacgacccttggtttgccgagtttttgctgcgctgaccacctggaactgaggaaacaaatactgatggcgacattcgtcttcctgatgatgtgtgtgtgccttactgtgggagtgacaacgatcttgacaacctaataaactttgttttcccaaatctcaacgaaaatatgtctgattccacctacatcacttcaagggcgatactgtcaacacggaacgactgggttgatatgataaatgttaagatgattgatcggtttcaaggggagcatatggtgtaccatagtttcgatagcgccatggatgatccccacaactactacccacccgagtacctaaacacattgacgcctaatgggctaccacctcatgttttgaagctcaagattggatgtcctgttatattgctccggaatatagaccctgcaaatggactttgcaatggcaccaggctggtcgttcgtggcttccaaagaaatagcattgacgcagagattgtattgggtcaacacgttggaaaacggattttcctaccgcgtataccgctgtgtccctccgatgaagagatgttccctttccagttcaaaagaaagcagtttcctgtatgacttagctttgcaatgacggttaacaaagcacagggtcagactattcccaatgttggtgtatacttgcctgaaccagtgttctctcatggtcaactatatgttgctctatctagagcgacagcccgatcgaacataaagattcttgtcatcccagctgtcgatgggaggaaaaagtcaaggaagggtgtaaagaaaacccccaccgtagattgtgggacatataccaagaacatcgtctacaaagaggtcctaacaaattagacccatggtaagagttgcatgttcagctaacaaactaataggatgatgtttgtcttctattttattggtctggtgtattatcaagtcatgtttgcatgctacaattgtttttattagagccgcacatgtttgtgtattattagagtatgcatactatcttaaagtattgttgagttttggatcatttgtgaaattagcaatattaaattttatgcatctaacaatttgttatgaatgtaggtttttgtcccacgagaatggaatctctatttgtaggattgtctcataacaagccaaaaaatcggtggcaaccacaatagttcgagaaggtattataattttcttatttctttatggatcaatttgtattttttgtaataactaattttagttttatctc

SEQ ID NO: 960 - DNA, 1646 bp, Zea mays
  Intron number 3 from transcript GRMZM2G127154_T01 (locus G RMZM2G127154) derived from phytozome v7.0 (chr-ID 6; pos 9 7913310 to 97914955)
gcccaattcctccaaagctgcttcgacggcagaaggtgagagctaatgactttgtttctatgtgtttcacttgtggataggactaggtgacgaattgatatggttgatgtactgtgactgttgaagtttgtggattggaccttagctgacacctggtttttgagtatgcttgtctctgggtttcaccttttcgatgatgcagcgtaggtcataaggcgtatatttgcattggaaccctacatgaagactactgcctattggttcatgaatctggtcttgtcaaatcaaatttaatatggagagaataatcaaaagcaagttattggatagacttcttagttgatatttatttgccttacaaaagttggtgtgcaactgaaaaataggctcaacaagtttcattttaaaatggaagaacaaaagtactttaggaatgtaattaccataaccggagctctcttcgaacatggtagtcttcatgtgattgagtgaactctatgatatgttggcttgatttccatggaatgttgtcagcttatcctacatatagtcttgtccttgagtggaatagttgaaagtttcgagtttcccaaacttatggtcatcatattaatacagcagcagcttggaatttttggtagattaggtttgttgttcttttttacagattgttatggcactaaataggctcgcctttcctgacctccaatgttttgctttaagctgcagctgctggtttaccagccaatgcatgtatttggttatccggtttatttaagaaatttgtttctgcattttcccaaggaatagtttgtgctaccaaggaagatgctttttaaaatatggctttagtatttattttttttggttgcaacttttttttgtaactactatagccaaatcaattcttgcgaataagactaaattctttgattttaaaaatgtccattgagaaaaagagactattgtttcttaacttggcacgtctgagacatggatcgagctgccacagatccttgggaatgatctttctaatgaggtaatgggatcgtgcaggtgctctgatcaggagggccgaaatgtatcagcaatacatgaagcgcattccggttcctgcttaccgtgattctgtaatcccattcacatcgtggctgggactcgccggatcgctgaagcagctgtatgagcaacccttgcattacctcaccaatgtcctcttaaaaaagtgggaccagcaaaggattgggagcgatgatgagcaccggcgtctggacgctatcatccaccctgccagagctgagaccctggtttgggccactgaagaggtccataggctgaccacctctggccagcacttggctagcctctgggcctcagatcccatgtatcatgctcacgtagatcccgtgtttgcttccgtaaagctggagtagccaccgttatgaattggggggttttggtgtttccatggtgtaagcctgcacattttgatttgctaaaacagcaagtaccaatctagtgacgcgaactccagtccagatgacgcttgttctgagtatgatatcttgtcgttacggttcattttaacattaatcttagctctgtgaacagcagccaggtcaaagaagaagaagaaaaccggtgtg

SEQ ID NO: 961 - DNA, 1466 bp, Zea mays
  Intron number 12 from transcript GRMZM2G030877_T02 (locus GRMZM2G030877) derived from phytozome v7.0 (chr-ID 4; pos 188489279 to 188490744 reverse strand)
gccttaagttccctctgggcttctagacctcgagagtaagcaccgtgcagttcctatgtcatcccctatctttagtcgatttatttaataaagaagtgtccaatctctagttgttgaaggtagtattcactaatgaataatgattggacaaaatcaagtgcatattaaatattaatacaagagtgacccagggttccatgctaaactaataccaagatgtgccctactaaatcagcagggaatggacaaccttccgatcagcaatcaaaactcaaaagtcagcaaccaaccatgacaaaaaataaagtccatattcccttaaaaagggggggacatgccatgacataagaaacaaggaataaagattgatttctgatactttctctagatgcctgtccaaccaactgaattctacaaaactcaaattagatgaatggctatagcagatacttccaatatgcttctctcaacaacaacaacaacaataaagcattttagtccaaacaagttaggatagactaaagttaaaaacccagtaagtcaaggttcgggcatatatggatagctgtttttcatgcactcatatttaaggctaaatctctggatatatttcatccttccaagtctttttttactgactcttcctatgccaacttcgatcttcctctccggtcttccactcttctcattgctatctcgccttaggatcctactatgcaccggcgtctctggaagtctacgttggatatgtccaaaccatctcaactgatgttgaacaaacctatcacgtatatcatcattccggactcgatcctttcttgtatagccataaatccaacgcaacatacgtatttttgcaacacttatctactgaacatgtcgtattttgtgggccaacattctgcatcatacaacatagcaggtctaatcgttgtcctataaaactgtcttttagcttttgtggtaccctcttgtcatatagaacgctagatgcttgacgtcacttcatccattttgctttgagtatatggctaacatcttcattaatatccccgtctctctgtatcattgaccctaaatacctaaagatgtcattcctaggcactacttaaccttccaaactaatatctgcttcctcatgtggtgtcgaaatcaatctgactagagtgttggtcactactgcagatcacgcgtaagactaaatcaaccatgacaagcttgacataatcttgtctccttgcctcctcacatccaccacaccgttcttgagattcttctcaatcaaaacttgtactccatttctgtttgtagctttccctgtgtaccaaagtttgaagtcgggattttccacctccttcgccgatcctacattccaactacttaaacagatactagttgtctcaatatgcttccctgatctatttaatattgtggtgcttctatttctggcaggatactggtgaccg

SEQ ID NO: 962 - DNA, 2654 bp, Zea mays
  Intron number 8 from transcript GRMZM2G115304_T01 (locus G RMZM2G115304) derived from phytozome v7.0 (chr-ID 7; pos 1 29348042 to 129350695)
ttaccagacccatttctcagacggctgattctcaggtaccttgtacatatatatttgccacattcaaagctatatgaacatctggcatttagctgtaacatcaatttagcaatgtaacttggaaagggtgtattggcttcattttcttaaataatagttggagaaaaatattgttacattgcatgcatttcatttggctatggacaaatgtatagtttaacccccaatccatctcatttctaccatttatgggtctcaggactagaaaaaaataagaaaaaagcaaaaagaaatgggcataaacatgttaaaaatcactgtcaactggtatgtagtatttccagcaacttgcgccagttttttagcgctataatattacttcttttatatatttgcctctaaaaagtatgtcttccagaacattgagagtagctaccaagcaagtaataaggtccattagatgcttgatgctgacatgttcagggttgtgtaggaattagtaaccattactatgcatgttggaggaaagggtgttataaatctgtctttcctagttcatcaacaactttacgactgtttttttaagttctaattaaacttgtgctaccagcaaattgtttatgttctggggaagtatgatgccaaaaaaaaagaagcaatacaacaacaacaaacacttttccctagcaagttaaggtaggctagagttgaaacctaatagaagctataaatcaaggttaaggcaggtggatagatgttttttattcacccctattcaaggctaaatttttgggtatattccatctttttaaatatctttttgccgcctattctcatgttaactttggccttcccctgcttctcttgttactatcgcatcttaggattttactacacgttggtttttcaggaggtctttgttagacatgtccaaactatctcaatgggtattgaacaagctttccacaattgttgctacccctagcctattacatatatcatcattccggactcaattgtatggtcataaatccaacgcaatatacacatttttacaacatctttttgtaggtcaacattctgcatcatacaacatagcagatctaatcgccgtcctataaaacgtgtcttttagcttctatggtactcttttgtaacatagaacgccagatgtttgacgccacttcttgatcccgctttgattctatggctaacatcttcgtcgatgtcccgatctctctgtaacattagtactaagtaccagaagatatccttcctgagcactaattgactaccaaactaatatctagtagtgctgaaatcacatatcatttatttggttttagttctactgagtctacaactctagagtatcctcccacaacttcaatttcatatgtactcgtgtcttgctttcctcaactagcaatgcctcatccgtaaaaagcatacaacaagggatatccccttatatgtcctttgtgaccctatccatcacgaaggcaaaaggataggggcttaaagctaatccttgatatagtcctattctaatcggcaagtgtgcctattacttgtttgaacactcgtcataacattattgtaatgtccttaataagtccaacataccttgatgtatgtttgttcaaagcccactatataacattctttggtattttatcataagtcttctttaaatcaacgaaaaccaaaagtcaatgaaaaccatgtgtaggtccttatgcttcctatactacctagcacttgccttattaacaaagaaagaagcaatacaaatcttatttgatttgttcttggttgttttgttttttatggctagtttgggaactcatatcccctccgagattggaagggattgagggagaaattagtttatttctctcccaatcccctccaatccctaagggcttgttcggttctaccccaatccatatggattgagggggattgaggaggttttaatccctagtaagttaaaatcccctccaatccatatcaatcccctccaatccatatggattgaaaataaccctccaatccctaagggcatgttcggttacaccaatccagagggggattgaaggggtttaaatccccttctagtcatttttgaataggaggggatttaatccccttcaatccccttctggattggtgtaaccgaacaagcccagggggtttgagttaggtctagtttgggaacctcattttttccagggatttctattttccaagagaaattagttcatttttccttaggaaaattgagttcccaaactagcccttagtttggcaaccccattttcccaaatgattttcattttcctaagggaaaaatgaactaatttcctatgagaaaatgaaaatcccttagaaaaatggcgatggcaaactagcccttacatgtattcctccccttcgttacggacagggtgcctttggataaaatatgattgaacatatgacattctctgccttcacgtcttgaaaatctgttgatacaattgtttgagtatttacttctatattgtctgcagtgtggaccatttggagttatgcctgattattctccgcgtttgctgattatttttccaattgcaggtttattttctgccgggcagtgcttttctatttcc

SEQ ID NO: 963 - DNA, 2121 bp, Zea mays
  Intron number 11 from transcript GRMZM2G075320_T01 (locus GRMZM2G075320) derived from phytozome v7.0 (chr-ID 3; pos 28823433 to 28825553 reverse strand)
acaggtgctgatttatctttgttatacatgtcattgtgcattaagaatcaatagttgtgggcatatgaacttgaatgagaacaatcttccaccaatgctattagtaaagggataagggcttgaagagctaccactaatattcactgtcatgttgttggccagtgtttaccttacgtgagtactgcaatagtattggtcctaaacttatacttggttggaagaaaataaaaacaaacccatttgctaaactgcttttgtgtatttgattagtcaatgttatatctgttatccatttttttattttttttaaactgcacgcggagcatagtaaattgtgctccctcaaggggttgacagatttcttggagcttgggttttgtagctatgttgaaagcatctagctgagttatcttgtcaatagtttggaccaaatataaacattttaaagcattttaattgtgtgcaagcaacagatccaaactggatcttggagttgaagctgagcaaacccccttactgttaagaaatagtccatgttacatgccatattttccaagcctacgttgcttttatttcatgcattgcatgcttttgttgctggaccgttttgtataagggtatatgtcgatgtgctacatctttccttttttttcggttacctttgttttgacagaatatcgttacttgtgtgctttaagtgcaggttgtaaaccattaaacacaatacagaatcagtgctagcggaaatctgtgtttcttggtccagttgattctcagaatgatattggttgcttgtgatcaaagtggaaatcagtttctcctgcacttatgtataaattgagcagttagggtggagaacaagtcaactgcacttcttttgagattttttttgaaattgacaatcttattaatcacgatgccctaaattgtttgagacccaacttcaaaccgagcttaatgagccgagccgaagttgaaagtcattcaaaatcagtttatttttattttaaaagaaaaaatgagttcaattggagcattttttaaatgagctactgaggcggctcaatgagtttttttgttcagcccttctaaaaaactcagccggggagggaatgatcgccctcccggtataatgcctggggtcgacactcgaggatgcatacaacccaccgatggctaagaagagaccgaaacattggccccgatcgagaaaatctctgaaccttggcccccattactaacgggccggtgtcaaccgtctactctgcaacggcccaatcggaggggtggtgcacgcacaggacatcgtaacccgagagcggatgaggcgcagcgaggggattttttttaaccaagccagaaaattcgcccttgaggggaatcgaaccctgggtcttggaaggctacttggaagccttaaccgctaggctagaggtcctttcacgtccagccctactagcagttgtattactgatgtttatgtcttaatgacacactcttgtaagcttgaatagattaagaacagaatcaatgttaacaaatctaaaggttctgcatgtgttacgtgtgcacatattgccttattacctataattatgccatctaaccagcaaagactcaaaatcgggttactaaatttgccggtccaggctgtggtactactataaatagctggtcactaaaaattttcccgtgctaaacagtatcgtttgtttttgttcatgaccgatcaatatttttgttctttataacctatacgtgtgatgcttacgttcagtggcggaggacgaacaaaaaattagatatggcagaataatttgaagctaacaaattgggaaagcaaaacacaaaatcaaaagcttagagtagaaaaaaaaagaaaataaaatgacaaggcaatgccgtacctatggtttgaactcaagatctaatacttcaaacacaatgtcactaccactgagttacgaatgcatgtatgcctataagaaaataatgccatacctataaaaatatttttgccaagttatggtgggcgccataataggtcctctgcccatgcttacgttgatttaatacatgctggttggaacttatttttaaaatttcaggtttgagttggat

SEQ ID NO: 964 - DNA, 4667 bp, Zea mays
  Intron number 1 from transcript GRMZM2G074138_T02 (locus G RMZM2G074138) derived from phytozome v7.0 (chr-ID 1; pos 7 6610579 to 76615245 reverse strand)
ttcaccaagctcgtgctcctctccgcgtccccaaggtaactttatccaattcgttcgttcaatttagtcccccccgcttgcttccttgctcgctcgctcgctcgtgctaaattcccctttgttttttcttacctgtattgttatgcttcctgctctgctcacaatccatactatcacgatcgggaacaggggaacgaatccactgtggcagctcctgatttccctgttgttgtgctttaattttggtgagttgagctatattacgctctctagactctaggaactaaggtaccagcacggccccccctagccccgtccccatgacggcaacttttcggtttcggggaattagagccctgtgaaggacgtggaacagaaatcctgtactgtatatggctgtcaacatgtatggctcgtggtccactctgtgtctgcgactagagtaggacctcctagagtagcgtgtgggcatcttttctggaaggatccactcttatcgatactcgaaaacttttgatagctgtgactgtgctctgtcacttatcatcgcactatttagaacatgaggaacgcatattggattaatctttccaaatcaggtggtgcggcatgggccgccctgatggtgatacatttgtggatgatggtgatcaatcatctacaagtactcagagctgttaacatgatctgtaatttaaatgtggttgcagatttgagtgttctactgttggatctgaaattcaacagttgtgttgagaaggaaatagggctgtcataataactaaggataaggtgcagtagacaatatatgcaaggttacttttttctctagcatacgattggtcttgtcactaaaatttacagaactgaaatcctagtcctagttgtagatcgatcattttaaacaagtgggcaattggtagttaccataattcagtcagggccatcccggactccgggtattttgggtggcctgcccaaaacgcagcaaaaagtattaagtaatagtatgtatacatgtacatataatataatggcgaataaatattgtatcggttacataatcttcatttagaaagcattattcttctagtgttcttcaaaataaaatctctaatgatattttcgtattcaattttcccaaccattttagtgttgtttggtattacaaacaatgcattaatttttttgtatcattatataactattggaactagggttacagaggtagtacaagtggtgaccctagcgcttgggcgccatcgtcctagggttagggctgcttcttggggaaagcatggtactgttcatcgcaggtgaatagtaggcgaagggggaaagcacgagcaagatacttgtctgcttgattcattcattaaccgaaggagtatattatatggctgagatagcagcctctaacaaactattcaactctatccaagactaacaaaccaatgcttatccaaccaaacaaactaaccaactctatccaagactaacaaaccaattgttatccaaacaaactaactaattctaactagggctgctgggctcccgaactactgctcctagacgccatttctagccacttgtatcgcgatggcgatgctgatatgggatgccggtcataacagctctcctggcctccaaaaacaacttgtcctcgagctggacaacgagataagacgccttgaattgctccaaaggttcccatgtagcttcttctggtgacagtcctgcctagtgaatgactccatgccatatgccgcggcggagcttggtgcacaacacctgctggggaactggaagtagtcgtccttgttccagtatcggtaagggaaggggtccctccggaggtgcaccatgaaatggcttgaggagactaacatgaaacacgtcgtgtagacgggcgccctcgggcaggtgtaggcgatatgccacagtcccaacacgctagtggcggacctagaaaatttggagagcctggacgtttgcattgtgagtcaggccttggccattgttgcctacaccaaactgtgtttcacctttagaatatgtatatctttccacaacatatggcagcggagcccgagcagccgccagggctagccgggcggtgagtccgccactgcaacacgctccaacacctagcacggtctagcatactgggtacccagcttgacgttggggcgatgtaccaaggacgcggcctggatgtggagaaggtgcaaccagacctagtcgctcaccgcaaactccctgtcgcaatggtggtcatcatactggtgttgggtgtacgtttgagcctagagaagccggtcatggccgttttccaaaaagaggtcccgctcacgaaggaggtcatcaaccgtccgcgtgcgcgccgtgcctgcagtgaagggcacaatggttcgcgaccatacaccacctggaactaggggtggtaatgggctctagattttacactataaaaattaaggatcgaatcggattaggatcggatgctatttctatttatttttaaactagaattaattaaggccctaacttattgtgaagaaacatttggatcgtgacccattatcacccttacctacaacggtgtggtgcgcaatgccatatggaacaccgtgttgtagcagtatttagcccacgacagtcagtcaaccctgttgaagtgtataagtggattgactatcttctcccctcaccttaagcttttgattgaactagttagtgtgtccactataacatggtatcaaagctagagagcttttgagttgaactgcttagtgcgtccactctaacatggtatcaaagtagatgtctcgagttcgactcctagcagaggctttatttatgccttcacccatttatttctacgtttgctcatttctctctggctgcacgtgagtgggtgttgaagtgtataagtagattgactaacttctcccctcagtttaagcttttgtgttggactggttagtgcgtccactctaacgaatccaagtccgcggtgaaacatgtggaaatataactgcaacaaaaggaagtgttgttgataatcatttgtgatacatttagttatgcttcaggtatagtgcttcaaaaacacatatatagttaaaacacagatagtttatatgtcaaggcagaaaactggcccttcctaagttcttatggaaatcaacgcaaaattagattatgaaatgggaacttctgcgttcttgaaataaagtgttagttgagtaatcaattttgtctgtatgtttgcaaaattttgtttcatgtatagcactgccacagcaatgatcagcttacaaattgtcacgttctctcaatccattcatgttagcattttctttgcatagaaacaaaataggaaatcatatggattggatttgtgatttaagttcgacttatactaacttgcaagcaagaaaaacgcaagagtgcacacttcttgatacattgatgtttgaagttcattttattgtgtaacgcaataactgaatccttttagaatgctctctgtctcatgtctcgttttcctgaaaaactactaacatttatttcctttcatttaatttctctcaattagaaattatgcgctttttggaggagacaataacaacttcagatgtgtggaagccaatgaacttgtgctcttagcaaactcttaggaattatttctaactgatccctgaatgggagttcaagttccagattttacatggatacaacagatataaccttcgtaataattttcgtggccttttattttgattagtaatccacagtttccacattttacttgagtgaaatactgaagttctcaagttggaaacccttttgcctggcttgaatccctgatacatatatagtttccaacagtttagttctcaagtacacaaatgtgcaagcatagtgtctaaactgcaattctattgagaaacaacatgatttacttgtgtagtaatttgcaaatgccacaagggtcatttttctgaagttattctgagctgattgtcttgcaacaaaattcagatcatagtgaagcattggcatttgatctataaattaacatcatattgcactagggtagcccctccttatatgattacatgccagtgttctttgcaataaagttaggtttcagaggcattaaatcacaattttgtctcaagtcacagcttcatttgaaccttccttagatatggtaaaacctagatgtgaatttcacttctgctactcgataagtttcttttttatatgatgcatcatttcttatgaaaagatgctagtgtcgtgaccatcatctgaactctgcaattcatcttccactgcaaatggaactgaagaccatgtttgtcatctagtggtagtgaacagcatctgaatatctgaaatatcctcttttttttttgtcccaggactttgttctcgaattggtcgcgctctttggatctctattctgttctatcttttctggatttgttcacatattaactgtatcttctatatttctctctcgaaagttttagggggggggggtgtggttcctcattagacttgtatgaagtttttacattattctcctttgccagttagcatcttgtatttaccctcaccaattcagctctgtctttgaccaaataggtacctca

SEQ ID NO: 965 - DNA, 13702 bp, Zea mays
  Intron number 1 from transcript GRMZM2G702811_T01 (locus G RMZM2G702811) derived from phytozome v7.0 (chr-ID 4; pos 2 19086423 to 219100124 reverse strand)
gccaccaacttgtgacgttgcacaagtaggaggtgatgatgatgtgaccaatttttgcttgacaagacgagagccaccaacttcaccttttattgattcttgtgtcgacacaacagagttagctgaggattattcaagcttcccctgcgccctaccctctgctgttaactttagtgacattgattcttttcttgatggtattattttataaatacatcaatacttcatcatcatcatcatcatcatcatcatcatcgtcatatttattattattagtattattattattagtactaactgtaggaaacgggtgacgcctaagaggggggggtgaattaggacttctaagctctttttatgtcttcatttgaggtgttgcatcctcagtgtcttagtccaatcctcttcgcatcctgtgaactataaacataaacactagcaaacacattagttcacaggttgtgttaatcatcaaacaccaaaactcatttagccaaatggcccggggtccatttttccttacaatctccccctttttggtgattgatgacaacacaaccaaagcaagcaaatataacaaacatttgaatgaaaatatgcaatctacttgctaggatgcatgttttatccccacttagtgatattatggacttaagcctcccctaactccataattcacttacttcctattttaggaccaaacaaccaaaaccacttgaaataccatttgtagatataaaattttaagtttgtggtgtttgctgtttgatatagttttcattgctttggtccctaaacttctccccctttggcatcaaccaccgaaaaggaagacattaaaagcatgtagggagtaaataaaagcttgtcctcaaaagattactccccctaaatgagtattctcctttagaaagagttttctccccctttagagatgaagaaaagctccccctgatagagatcttaggaaaaagcatgtgaaaattagaggtacaagacatgatttgaaaagactaacttcccttatgcataggtaacagaatatgagttaaccacttatgcatttttagaaacatggaagtatatgatatgaaatatagtctaatcaaatattggagaagacatgtaaatgatactagatgtagtctcaaaagataccgattgaaattcaatggcgagcttgagagacttgagagttcttggagatttgcagtggaagattgttgtctttctccggggacctcattttccttacaatgagactatcacatgaaatagacttgaaaaggtgttagtctcaaagtattagattatagagtaacctccccctgaagatgtgcatacaagttttgaatacttgttggagacatgcactttgatttgatatcaagaggggcaaattatctataatccgaactttggcacatataagttaaatgatacaacttgtagaaatcaaaattttcaattgatgcatcatttactatggagtgatatagaagctatgtgtcgtgcttaaataaatattttaagccatgtaggtttgcttaagtgtatgaatttaaaacaagcaatcctaccatatgattcacctagtatgcataatttaaaacaaatgtaaataacaaatgtaatactaggcaagaaaggtaaactagatacaaggtaaatagatacgcatatctaaaaacaagagatacaataaatctagttaccttagtcatgggtgggaaatttgggtccaaaattttcactaacccacttggcaataaacttgatccaatatgatgtatcccatgatatacatcccaactttgccaagtctccaaatttcctgcagaccttcggtccactcacttcccttttgggatccaaaccttcttggtgcttttcatggttgaaattatttcctttggcacccagatgcgtttggccccctttcctttgttgccttgcttgttggccttgattgctatcacctttccattctttttcttcttgatcaaatatggtgtagcatcctttttgttcacctttttgatgtaggtgctggagattttgcttgatggcttttgctggagcttttgcctttgattatccccggtcatcaccttgcattggaaagacttgtggccttccatgtggcatagcctacaaatcacagtttctccctctacaggcttgttcactcctgcagtggtgttatcctgtggaggtcggatttgtttggctttgcctttcttgtcatacaaagcctttccaaggcgagccacttcttgctttaattgttcattttcctttgcaacctcatccgaacatttctctacaacaatattctcaacaacgacttggttgcaggagttagaatcatcaattaaatcaaagcaggaagtagaagcatctttcttaattatttcaggtatttcaactaaagatgttgctggggtgctaccaatgttttctagcttagtagttagctcattattgtgtatgctaagaattttcattttctctagcaaattttcaatagcttcttgggagctagctaacttagccttaagtttttcatttgttgggtctatgcttcgtcgccgaaggtcttataggaagaagtggttttcggctgaagctgtttgtataagatggccgaaggtccctcttcgtgaagcttcggtattacaaaccgacttaaagatagaatgaccttttagtccataaaggtctgagtcaatgttgtaagcttttataagggacatacttgtaattcctcacaggctgcgtcctgtgcctataaatagtgaacagtattcctttactgttcacgcattctggtgattgtaatcgcatcttctggaatccaacctttgccaaggcagaggtattattgtattcaatgattcaatatattaagtaaatataatataattcgttcatgatttatttatcccttttatacctttttattttatgttgtcttacaatatctattgcaattttattacgaagactcaagcttcgtaattatactctcattaaccttcgtccaaggcccattatcctcaagggaataatgtttcaaggacgaaggacattaacatttaacactaagagggccttgttcttaattcatagcatttgagaacaagtccccaacattggcgcccacataatatgaattcacttccacttttagagtggatggattcgttcaatgatcaagctggagctgattcagacccgaagctggtgctccggatcacaggtggttcgtcatcagagccagctaacaagaaacaaaaagaaggaagcacagagaagggtacaacatgttgggggtgcaaggacccttcatcaagtcaagatggtctcacattcctattaccttctcccaagaggaccttcagctcaagggattacccacacaacgatgccatggttatctcttgtgttatcaaaaggattttatggtccacaatgtcttggttgacacaggcagtgcagctgatatcatatttgctaaggccttcagacaaatgcaagagccagaagataagattcatgacgctacacatcctctctgtggcttcggagggagacagattgtagcattgggcaagatcaccatgtcagtgaccttcgggttcatcaacaacactagaactgagcaagttgtgtttgacattgttgacatggaatacccttacaatgcaattattggtcgtggcaccctcaatgctttcgaagcaattcttcatcctgcctatctttgcatgaagataccttcggatcaaggacccatcgctatacatggaagtcaggaagctgccagaagggccgagggcaattggactgactcaaaagcaatccataacatagatggagctgaagcttgtgaacagtacaaattcagaagggagaaagcagcttcagcagatcagccgaagcctatgctcttatgtgaggacatagcagagcagaaggtgctgttaggctctcaattatccgaagagcaggagaaaaccttgataaggtttttgttcaacaacaaagatgtttttgcatggtcagctaatgatctctgcggagtaaatagggatgttattgaacactcgctcaatgttgacccatccttcagagccagaaagcagaggcttcggaaaatgtcagatgataaggccgaaggtgctcgtaacgaagtcaaaagactcctcagtgcaggagtcatcagagaagtaaagtacccagaatggctagctaacactgttatggtaaaaaaggccaatggcaagtggcgaatgtgtatcaattttacagacctcaacaaggcttgtccgaaggacgaattcccattgccaaggatagactctttagtagatgcagcagcttcttccgagctcatgagtctgctagactgttactcaggctatcaccaaatctggatgaagaaggaagatgagccgaagactagcttcataactccaagtggcacatattgctatcttcggatgcctgaggggctcaaaaacgctggaggaagtttcagcagaatgactgcgaaggttctccagtctcagataggcagaaatgtgctaacttatgttgatgacatcattgtaaaaagcacgaaacaggagaatcatattgctgatctgcaggagaccttcgccagtttcagacaagctggtttaaagctgaatccagaaaaatgcgtcttcggagtaaagaagggaaaatttcttggatgcttggtttcaacaaagggaattgaagctaatccaagtaaaattgaagctatacttcggatggagccaccaactacaaagaagggggctcaaagattgacaggaaggttggcatctctcaatagatttatatccagatcagcagagagaaacttaccattcttcgaagtactgaagtcagccgaagtctttcaatggggaccaatccagcagaaggcttttgaagagctgaaacagtatttgatagatctaacaacattaactccaccgacgccaggggctcctttgttattatatgtggcagcttcgcactcagcggtaagtgcagcgcttgtccaggagaagcttgatggtcaagccaagaggcaggccccaatatattttgtatccgaggttcttagtttatcaaagaaaaattatacagagttggagaaggtactgtatgctgtcttgatggcctccaggaagcttcgacactattttcaagcttacaacataattgttccttcttcacaacctctgaaggatattatgaggaaccgagaagctactggaaggattggaaaatgggctgtagagctcattgaattttgtattgaatatgttcatagatcttcgattcagtcccagacgttggcagacttcattgttgactggacgccaggggctcaggaggaagaaacaaataaagacgccgaagcatggacagtgttttgtgatggatcttggggaaccttcggagcaggagcggctgctgtgttggtttcaccttccaaagtcaaaacttgttatgcggcaaaacttgattttagttgcacaaataacattgccgagtacgaagccttgcttctaggtcttcggaagctaaaagcaatgggaatcagaagggctatactcaaaactgattcccaggttgtttcgggtcatattgacaagagttgcaaggctaaggatccgaagcttgaaaaatatctggatatggttcgaagagttgaagcttccttcgaaggattttctgtcaaaaatatccctcgaggacaaaatgagcatgctgatttgctagctaagtcagcagcacaggggctgcccttaccttcggatgtgttcttcgaaacaataaaagcaccttcggtggaacttcttgaaagagcagtcctcaatatatctcctgtttatagcgaagattggagaactgagatcatctcttaccttcagggaaaattcctttcagatgacgaagcttataacaggaggatagaggcaagagctcgtccatatgtcatgatagaaggggagttgtacaagcatggagtttgtgctccgctactcaagtgtttatccagaaccgaaggtatagagttgatgaaagaaatacatgcaggcctgtgtggatctcacattggatctaggccgttacttggaaaaattttccgccaaggattttattggccgaaagcagcttcggatgcagcggaattagtccaaaagtgcgaaggttgtcagaaatgtgcacgagatcaaaaacaaccttcgtccttaacacagctcatacaacctatttggccattgcaaaggtggggccttgacttgttaggtccgttaccaccggcccaagggaacctaagatatgttgtagtggcggtggagtatttttctaaatggattgaggcaaagcctttagccacaataacttcggccaccgtccaaaagtttttctggcaaaatattgtttgtcgtttcggggtaccaaaggctattactgtggataatggaacacagtttgattccgaagcttttagggatttctgtgatcaaattggtacgaagatccattttgcatcagtcagacatccggagtcaaatggactcgttgaaagagccaatggcattataatgacaggaataatgaagttaatcttcaatcaacccaggggaaggtggccagatcagttaaccaaagtggtgtggagccacaatacaacaacatcaaggtctacaggctttactccattcaagttattattcggtgacgaagcaataactccggaggaagctaaaaccggatcaataagggtagtagcttcgacagaatcaggttccgaagctgcttattctgtggaaaaagatgctttagaagggatcaggctgcaagccgtggagaacaacaataaatatcaagccgaaacaattaaatggcgagatagaaaggttcggctaaagaatattgagccaggacacttggtgcttcggagagtggccaacccagaaacagtgggcaaattgcagttgaaatgggatggacctttcttagtagcatcttcgtcaagacccggttcatacagattgaaggatatggacggcaacgacattcctagatcttggaatgcggatgagcttcggcgatattatgtataactcgatgtaacttttcatattttttattttttctttcatggcacccttttcctttccgaagggggagaaaggtttttaatggggccatcacatgtaatttccttttttagttctataagagcaaaatcccccaaggaatgtaaatgtaaaagctgagaacgcaccatcgagtgccgaaaagtaaaggcgaagaagctccaaagtcgttcctaagggaatgcagagcttacagcgaaaagtcaacgctgattccgccaaaagtaaaggcgaagaagctccaaagtcgttcctaagggaatgcagagcttacagcgaaaagtcaacgctgattccgccaaaagtaaaggcgaagaagctccaaagtcgttcctaagggaatgcagagctgaggtgtgattgtggctatgagtatggcttcggatacgcgtttggacattcatttgcacgtcacattacatcatagcatttgcattcataaacattcatctaggcatatgtaggataatcatcatcatggcataaatgcttgctttggcaaaaaggaaaaaaaagaagaggaagaaagagcttcgtgtacaaaaaggaaagcttcggaaaaaagggaaatgttgttttctatgcttcgctgcgtacgaaaagaagggaaggtgttttttcgccttcggctcaaaaaaggaaaatttcgttcacatcaaagcacttctcatacatcaatggaagggtaaggatatatcacaaggtatgaacagaattcattaaagacaagttttagttacatccacaaaagttatctcaaaagttcctcaagtgctgtctagtctactatttaatctccaaggagcttcagcttcggcgtcagtttttaatcatcggcttcggcttcgtcatcctacgtgaataaggtcgttgtaagtcaaaatcgagcttgcaggaaaaggtaagcacaagatatggtttcttactggttcgaggtggctacgagcttcgtctccagccttttctcgcccaccttttgtccatatcatttttacaaatctattagagatacttcgggcgagatcagggatgtcatccaggattgatggtgataaagtgaaatttggcctattgacaatctttccatgatcgcagccagctttcaggaaagctgcagcagtgcctcgagaagccacccaggcacagaagtcaccatgcccagctatgacttcgtcgagctcgtcaatctcaccctcaatatgttcgaaggtcttcggtagatcttcagctgagggggtgaatttttcactgctggctccaactgagtggaaaatttttcttaatcgttgaatgcatttgttgctaaattccagacatttttcttgaaggcttgtcaatagttttctcaaatctgaattttgttgagcttcggcttcaagttttgcattaagctctagcttttctcgttcgaactgttcagactggcggagaagcttcgtgttcagttctgttatttttgcttcagcttccgccaatgaaccttcggttgcctggagctcaaagttctttttctcaatagcatctgattgctcctttattctgctttccaaattttcaattataacttcgtgcttcttgtcttcaaaatcttgctgcattttcaaggctttgctcaatagcatactctgcacgaaaacaaccttcgtcagatatgttttcattattagaaacaataaaagttaagggaaaagtagttcaccttgaaattggaataaaataaactaccaacgatatgttgtcgtcggtagcggctgatgtctgtttctagcttcggaaaaccgatactctttgacagagtaccgataactttggccccagtttgatctcgaatgcaatctaatttttcatcatcaatgcctccgaagaggagtgctccaggtttgtatccgcaggattttgcatattctctaagctcttctctttcagcttttgacagtttttctccaactaaattttggaacatgaaagcttcgtcttctgaagcttcatcagcaatttccttccctttccccgacgctgcggtcacggcctcttcggtggcggtggtagcttcttctgcagccatatctagcagtatcctgtcaatattttcgattgtgctctccaggttcaaatcttcagctgaggcagcttcggcagccgcgacctccgaaggtgtaatttcaacatctgtcccttccgcagacgctggtgttttttgagctgcagctcttggcggtgtcttgtcaattacctctgtcacagtaataattctttgtttctttgctttgattgttttcttcattttttcgggctccttgtccttctgaaaaaactttgtcagtcgaggccccagtggacttagctttgcaggtaagtattcagtcattaccttcagaattgcctccacatcagtggcagagggtgatgcaggggatttttcttcgtcggatatttttcgtttcggagaagacgctttccttttctttggaattttcttttttggtgtctctttttcatcttcgtttgaggcttcggttattcttttccttttctggcctccggcacctttgttcagattttcatagtcagggtattcaaaatccaaggcgtccaacactcgatttagccttcgcttcggacgggtgccgaaggctgcggtcatcaattgatcttcttttttggaataattgccaagtatttcattgcacattacttcaattgtatctagccactctcggcaaggtgtttaaagtacttttttaaacttgaaatagtaaggtaaacgtacaagttcaccttctttcttttcccccctgtagcttcggcatttcccattctttcaaactgggaaaaactttgaaagccaaaaactcctgaaccaggtcccttgtgctgatatgctctgcaataattctgaattcattcattgcttgttgtgttggaccttcgggtgtcatgttgcagcgaggtcgggtttctccgaagattagttcgagtggactttgcacaagcttttccttgtcatcatcaaccttgacatagaaccactctgatttccagcctgctgcccacttgcttcggtagctaattacaggaaactttgtagttttccgataggcgaagttatagcaaccaaaattgtcgtgcaatccatcctttctagccttcgtttgataatgcaactcgtgaacccggcaaaagctgtccgcaaatggttccactgcttggcttcggagtgcccagatataaacaataagcctaacgatagcgttaggggtcagttggtgaaaatagataccgaacctcttcagcacctctgcaataatcccatgtagggggaatcttaatccagcctttagaaagcttttgaaaataacaatttcatccttctccggctttggggtagtctcttctcccccgaagcgtaatagcttcttctggttttcagtaaaaaaacccgattttaccatcttggacaaatcagccttcgaaacagtagatttcccgaagtccaagtggctgggtttgcttggcatggcaatgcgataatcatcttcgggatcagtttcctcaatatcttcttcctctgcttcagcgattgcttgttctacatcatcactaggaatcttttccgaagtcactagcccggatcgttgcatggcttcggagatggggacagtctccgaagcttcagtttcgtccccctcacgctcaaccctggcggtagaacgaactctggccatttaattatgaacttgtggaactttaatactttcttcctccgaagcaggcttcaaactggagcttcgttcgattccgacagacaagcttcggcgacggttaaaaattttggcagcaaaacagtgcaaatagcaatgaatgctgtagtaacttcacacctactcgtctgtttatatagtgctgcaggtaagaaggcgaagcgccaggatttttacaccaggcggacacccgctcgcactcgctgcgtggtggaccgcagagaccgaacagtaactctgcaaggtggggccgctacacactgggaaattgaatcgtttctcgacaacgagctcagggaaggtgttttttagaccttcggcgctccgaagcttaagagacttttttcacggatcaagctcgttacgaaaaacgatctagcaccgcgaaaggggctactgttgggtctatgcttcgtcgccgaaggtcttataggaagaagtggttttcggctgaagctgtttgtataagatggccaaaggtccctcttcgtgaagcttcggtattacaaaccgacttaaagatagaatgaccttttagtccataaaggtctgagtcaatgttgtaagcttttataagggacatacttgtaattcctcacaggctgcgtcctgtgcctataaatagtgaacagtattcctttactgttcacgcattctggtgattgtaatcgcatcttctggaatccaacctttgccaaggcagaggtattattgtattcaatgattcaatatattaagtaaatataatataattcgttcatgatttatttatcccttttatacctttttattttatgttgtcttacaatatctattgaaattttattacgaagactcaagcttcgtaattatactctcattaaccttcgtccaaggcccattatcctcaagggaataatgtttcatggacgaaggacattaacatttaacactttatgttgccttgttcttaattcatagcatttgagaacaagtccccaacatcattctttttaataaggctatcatcggtagcagtggatggagcactagattctaatagctcaattttagctgacagctcactatttaagtttgcaaaagtttcaaatttttctagcaaacctttataatcattttgggagctaatcaacttatttttcaaagttttaagttgagctttttgcttagtgcaaacatcctggaaaaattctacggcttccgcaagctcatctacagagggctttccctcaccttcatcatcactactactttcatcactagaggatggaatgctttggttacctcttgccataaggcatttgtgtgatgaccgtgatgagcgtgatgaggaccggtggctacgcgtccttggaggttcatcttcacttgaagaatcatcccaagttctaacacttgttagcgccttgcctttgctcctctcctttttgggtttggccatatttggacagttgtccctgaagtggcccttctccccacatgcgaagcatcctctcttcctttgctttttcctgtcaatgttaaagagaagatcctcgacctgcaggggcacacccattagattaatcttgcggatcatcctcattacctttccgacgcgtcagattgtttcttcgtcctcggaggatgatgtgcatggctgattatcttcatcatcatcactttcttcttcttcctcttcttcgcttgaggaacttagagtgggagccttctttttgcccttcctatcatcacatgcaaaagcatatggtcttgaggatgttggctcctctccccgactcatttttcgcgacatctcaaaagccgcgattttcccaatcacaatggtcggggtcatgttgctcaagtcctccatgttgtgaaggatggtgatgatgctcccatatctttgttgtggtagcagggagataatcttcctcacaatgtccgcatcacctagcttattaatgccaatcgaattgagctcattgataattagattcaaacgagaatacatgtctctaacaagctcatcatctttcatagcaaaagaattatactcatttaagacaaggcaatgtttttgctcacggacattggatgtgccgtcatggagctcatgcaattttagccaaatctcattagcagtttttaaggtaaatacttgattaaaaatatccatgctaagagattcatacaagcaatttttggctctagcatttaaattaatttctttttcctcactcgtggtgggtttctcgggattcttgaggggtttcatcccgtcacgagtgactctccaaacacctagataaacggcctctaggtaacaagccattctagcactataatatgggaagttagtgccgtcgaagtgtggtggcctatgggtatccatcccttcctccaaaaagcgtcggctcttttagcggtgaagctaaagcgtttcaaatgagccaaaccggcctctgataccacttgtaggaaacgggtgacgcctaagagggggggtgaattaggacttctaagctctttttatgtcttcatttgaggtgttgcatcctcagtgtcttagtccaatcctcttcgcatcctgtgaactataaacataaacactagcaaacacattagttcacaggttgtgttaatcatcaaacaccaaaactcatttagccaaatggcccggggtccatttttccttacactaacaatatcctttgttgttctattttaggttgcgatcaattgttcgaaaaccaacctttgaat

SEQ ID NO: 966 - DNA, 14978 bp, Zea mays
  Intron number 1 from transcript GRMZM2G436649_T01 (locus G RMZM2G436649) derived from phytozome v7.0 (chr-ID 7; pos 1 00267426 to 100282403)
aggtaactagtgtagacgacaaaggtaagaaggtaagggtctctgccatttgcaaacactgcaaaactaccttgtctgctagatcttcctctggtactggacatttgcttaggcaccaacaacattgtaaagctaagattgagcatgatcgagctggcatagtacagccagtccttaaattcaatcctgatgggtctgtgcaacgttgggagtattcagcttcagttgcacgaatggaaatgtgtcggttgatagctagagaagatttgcctttatgttttgccgagtctgatgcttttcatgagtatatcactcgtgcgcataaccctaggtttgttaggtcttataggcaaacaattgctagagatttaattaaacattacaatggacgaatgaagagtctaattgaaactttaaaatcctcagtatcttctgtggcactcacttctgatatttggtctggtaaagccaaagaagattacattagtgttgttgttcattatgtgaattctgattggggtttggaaaaaaggttgcttggtctaagacctattgagtctgcacatactggttccaatattgctgaacatgtttccatggttgtagatgattatggcatatcagataaaatttttgcaattacattagataatgcttcatcaaacaaaactgccatgtcccttcttcaacctatgtttactggttaccttgactttggtagcactcagcaatttgacttagatgatggtgaagatttgaggtctatttttttgcatcaaagatgtgcatgccacattattaatcttattgttaaatctggtttgaagcgcatgaagccttatcttaatgatttcagaactgctattactttcttgaatgcttccaatcaacgtattgctgcatataaaatggtctgtttgagtcaaggtgttcgtcctcgtaagtttggtgttgacatggatgttagatggaactctacttacttgatgcttaagcatgttgttccatacaaaagcacattttctatctttatccaaagtaatcatccattgagttcagatggttctcctttgttaacagatgaccattggtacattgcagataaggtgttgtcttttcttgaactattttatgattcaactgttgcactgtctggtatttattaccccacatctccattaatgttgcatcatatactaaaaattggtagtcatctaaatgcttttgagagtgatcatctacttagggaagccattattcctatgaaaaccaagtatctaaaatactggaggaaaataccaattatttatgcatttgctttcattttggatccaagagcaaagatgagggggtttcataaacttcttctacggttggctagtctaactggaactgattactctagatttccacaatctattcgtgctaagttaacaaagacatttcagttgtatgaatgcaagtatggtgacacactcttgcgtggacaacatgtattagctagtggtagtgagtctaaggcaaaagaggcatgagatgatatttatggggatgatgatattgtactaggaagtagttctactcctattgcatctactgcagcatccatctctgaactgtcttcttacctagacagtgatactgtcacccaatttggtgcagacttcaacattcttaattggtggcagaggcataagcttacttatcctattcttgctcttcttgctaaagatgttttgactgttcctacttctaccatatcttcagaatctacatttagtcttgctggcagggtgctcgaggagcgacgacgacgactaacaacagatatggttgaggtcttatcctgtattaaggattgggagctagcagacaagcatatgcagaatactgtcgaaaacgatacgaaggaacttgaagcaacttatgagaacatgtaccttgatgttgaagatagagacaaggacaaagatggagaatcaagacctggaagaagttgagtttgtagctgtctctgtggctgtttcattatggctgtttacttcaatgtgactgtttacttatcttttgatgtaataaactactctaaacacttgaacaattaggagctagctgtactcttttctttcctagggttttctcacgaggtgtgagttcttacctaggaaggtttttaatgaggcagcattgcactaacagctccaatattattcaacttatcttgcattctgattttttgcttgctggtactgtgatcttgatattaccagattatgtgtgtaagactgtaagtgtaattgctggcagattatgtgtgtaattgtgaatttgtgatcttgataccagattatgtgtgtaagtgtaattgctgtcatattatgtatattatgtgtgtaattgtgatcttcatataagattatgtgtgtatgtctaattgctgtcacattatttgtgtaattgatttttactgttatctgggctaatgggcggcacgacacatttaagcccaccgggctggaagcccggcaaggcccgtttagagggtccccgtgccgtgcttgggctctaagtccggcccgtgggcaggcacggcccggcccgttgctgtctgcgtgccgggcctgaccgtgcccgggccgggttagcccggcacgcccatttggacatgtatagtaccgagtattttatgtctgaagtctttgtggactccacagagaaaagccaaaagaaagtagcggcggtaacagagcctttggcgagccaaaaaatgacggtaacgaagcctttaccgagtataggtcaggcactcgagtataggccagacactcggtaaaagagagcttcagtgagcctccacgtcaatttctatgtcgagtttaggctttaccgagtataggccaggcactcggtaaaagagagcttcagtcagtggcgagagcttcagtcagtggcggacctagtatttttatataggatgtgccacaacaaaattttcatatataagtatatctaatgtacatataatttcatagtaaatttagtaaacaatttgatatatagatataaagtttgacactcaacaaataaacatgaaaattacatacattaaacataaaaattgcaataatactacttatctggcctgcgcttcctcaacgtcataaaagtttcaattatatcttcttcattcacttcgaagaaaatatctctctcgatgtatgtaacaagacaatcatccaaaagactatcacacatcttatttctcaatttagtcttcaccaaactcattgcagaaaatgccctttcaacacttgttgtcgccaccggcaaaagcaataccaatttgagaagcaaataaaccatatcaaacaccttatgtctctttgtttcaacaagcttaaccgagaggtccacaagattagttatgtctttaaatctatcgtcttctcttatgccatcaatataattgtcaagttgcaagtcaagttttaacaagtcagtgcttgacatgtcattaggataaaaatcagctagctttcataccttgtgtgcatcaaaagaagcaaaagagttggaaggatccaaggctgacatacaagaaagtagatccatattagcctcactaaaccgactatcaagctctaggctaatttgattaatgaccccaatatatacttctcttctgaagtggtcatcattggtttggttatgaaaaaatcgtgatgatcttccataaggctaataatttccatccatagcaggaacttggatatcatgtatgttgcaaaatgaagtgattctttgaaggaattgatcccaaccatcaagccttaaatgtcgcattcttctctttgccacattaacaagtgaaattgcattgataatatcttgctcccttctttgcaaacacaccgataaatcatttgtatatccaagaataacaaacattaactgtgcatcaaaaacaaagtcaaatgacttaaatgctccaagcatagaatgtattcttgtccaatcacttctaattgtagtatcctctccaagaatcatgagaacatctcggatgacaggatacatagtaattatgttgcatatagtttttgaaagtcgcctagaggggggggtgaataggcaaatctgaaatttattaagttcaagcacaactacaagccggggttagcgttagaaatataattgagtccgaaagagagggaaaaaaaatcaacaaagaaataaagcggatgaacacagtgatttgttttaccgaggttcggttcttgcaaacctactccccgttgaggtggtcacaaagaccgggtctctttcaaccctttccctctctcaaacggtcacctagaccgagtgagcttctcttctcaatcaatcgggacactaagtccccacaaggaccaccacacaattgatgtctcttgccttgattacaattgagttggaaacaagaaagaaggaagaagaaaagaaatccaagcgcaagaactcaaatgaacacaattgtctctctcactagtcactattcgattgaaatgatattcggacttgggagaggatttgatctcttgtttgtgtctttgaataaagtctagagctcttgtatgaggtttgaaggctgaaaaacttggattctttgaagtgtggtggttggggggtatttatagccccaaccccaaagagccattgatggaggctgctgttgaatggcgcaccggacagtccggtgcgccagccacgtcaacaggccgttcggttctgaccgttggagcttctgacatgtgggccaccggacagtcactattcattgtccggtgcgccttgtggtgctgctctgacttctgcacgcgcaggcgcgcactgttcacttttgctgttccgttgcagacgaccgttggcgatgtgtagccattactccgctggcacaccggacagtccagtgctacaccggatagtctggtgaattatagcggagtggctcccagaattcccgaaggtggcaagtttggagttgggttccctggtgcaccggacactgtccggtgcgccagaccagggttgcctttgggttgtcttttgctctctttatttgatccctttcttggtctttttattggtttgttgtgaacctttggcacctgtaaaacttataatctagagcaaactagttagtccaattatttgtgttggacaattcaaccaccaaaatcaattaggaaaaggtgtaagcctatttccctttcaatctccccctttttggtgattgatgccaacacaaaccaaaacaaatacagagatgcataattgaactagtttgcataatgtaagtgcaaaggttacttagaattaaaccaatatacatttcataagatatgcatggatgctttcttcatatttaaacattttggaccacacttgcaccacttgttttgtttttgcaaattcttttgtaaattcttttcaaagtctttttgcaaatagtcaaaggtaaatgaataagattttgagaagcattttcaagatttgaaattttctccccctgtttcaaatgcttttcttttgactaaacaaaactccccctcaataaaatcctcctcttagtgttcaagagggttttagatattaattttgaaaggggttataccaatttgaaattgaatcaaaaataagataccaatttgaaaactcttcttaaaatacaaattgaaagactaaatttttgaaattggtggtggtggggtccttttgctttgggctaatactttctccccctttggcatgaatcgccaaaaaacggatacttgtgaatgaaatataagcccttataactactttctccccctatggtaaataatatatgagtgaagattataccaaattggagagcggtgtggagcgacggcgaaggatgaataattcgatggagtggagtggaagccttgtcttcgccgaagactccaattctctttcaatctattacttagcatgaaatgcacttgaaaccacattagttatagcacatgaaagagagatgatcaaaggtatatgagtgagctatgtgtgcaaaatatcaatcaaaattcttagaatcaagaatatttagctcatgcctaagtttggtaaaagtttgctcatctaatggcttggtaaagatatcggctaattgttctttggtattaatatatacaatctcgatatcccccttttgttggtgatccctcaaaaagtgataccgaatggctatgtgtttagtgcggctgtgctcaacgggattatccgccatgcggattgcactctcattatcacatagaacaggaactttggttaatttgtaaccatagtccctaagggtttgcctcatccaaagtaattgcgcgcaacaatggcctgcagcaatgtactcggcttcggcggtagaaagatctacagaattttgcttctttgaagcccaagacaccagagatcttcccaagaactggcaagtccctgatgtgctctttctatcaatcttacaccctgcccaatcagcatcggaatatccatttaaatcaaaagtggatcccctggggtaccaaaggccaaacttaggagtataaactaaatatctcaagattcgttttacggccctaaggtgaacttccttaggatcggcttggaatcttgcacacatgcatacggaaagcataatatctggtcgagatacacataaatatagtaaagatcctatcatcgaccggtataccttttgatctacggatttacctcccgtgtcgaggtcgagatgcccattggttcccatgggtgtcttgatgggcttggaatccttcatcccaaacttggtgagtatgtcttgaatgtacttcgtttggctaatgaaggtgccctcttggagttgcttcacttggaatcctaagaagtacttcaactcccccatcatagacatctcgaatttttgaatcatgatcctactaaattcttcacaagtagatttgttagtggacccaaatatgatatcatcaacataaatttggcatacaaacaaatcttttgcaatagttttagtgaatagaataggatcggcttttccgactttgaagccattagcgataagaaaacctcttaggcattcataccatgctcttggggcttgcttgagcccataaagcgccttagagagtttatagacatggttagaatacttactgtcttcaaagccgggaggttgctcaacatagacctcctccttgattggtccattgaggaaggcactcttcaagtccatttgataaagcttgaagccatggtaagtagcataggcaagtaaaatgcgaattgattcaagcctagctacgggtgcataggtttcatcgaaatccaaaccttcgacttgtgaatatcccttggctacaagtcaggctttgttccttgtcaccacaccatgctcatcttgtttgttgcggaagacccacttggttcctacaacattttggttaggacgtggaactaaatgccatacctcattcctcgtgaagttgttgagctactcttgcattgccaacacccattctgaatcccttaatgcatcttctaccctatatggctcaataggagacacaaaggagtaatgttcacaaaaatgagcaacatgagattgagtagttacccccttttgtatatcgccgaggatggtgttcacggggtgatcttgttgtattgattggtggactcttgggtgtggcggtcttggaccctcgtcatcttccttgtcttgatcatgggcatatcccccttgatcattgtcctcctcttgaggtagctcatcttcttgatcctcatcttcatcatcttgagcttgatcctcatcttgagttggtggagatgcttgcatggaggaagatggttgatcttgtgcttgtggaggctcttcagattccttaggacacacatccctaatggacatgttccttagcgcgacgcacagagcctcttcatcatctatctcatccagatcaacttgctctacttgagagccgttagtctcatcaaacacaatgtcacaagaaacttcaactagtccattggacttgttaaagactctatatgcccttgtgtttgaatcataaccaagtaaaaaaccttctacaaccttaggagcaaatttagattttctacctcttttaacaataataaagcatttgctaccaaagactctaaaatatgaaacattgggctttttaccggttaggagttcatatgatgtcttcttgaggattcggtgtagatataaccggttgatggcgtagcacgcggtgttgaccgcctcggcccagaaccgatccgaagtcttgtactcatcaagcatggtcctcgccatgttaagtagagttctattcttcctctccactacaccattttgttgtggcgtgtagggagaagataactcatgcttgatgccctcctcctcaaggaagccttctatttgtgagttcttgaactccgtcccgttatcgcttctaatctttttgatccttaagccgaactcattttgagcctgtctcaagaatccctttaaggtctcttaggtttgagatttttcctgcaaaaagaatacccaagtgaagtgagaataatcatccactattacaagacaatacttactcccgtcgatgcttatgtaagctatcgggctgaatgggtccatgtggagtagctcaagcggcctgtcggtcgtcatgatgttcttgtgtggatgatgaacaccaacttgctttcctgcttgacatgcgctacaaaccctgtctttttcaaaatgaacattggttagtcccaaaatgtgctctccctttagaagcttatgaagattcttcatcccaacatgggctagtcggtggtgccagagccaacccatgttagtcttagcaattaagcaagtgtcgagttcagctctatcaaaatctactaagtatagctgaccctctaacactcccttaaatgctactgaatcatcacttcttctaaagacagtaacacctatatccataaaaagacagttgtagcccattttacataattgagaaacagaaagcaaattgtaatataaagaatctacaagaaaaacattggaaatagaatggtcaggagatatagcaattttacccaatcctttgaccaaaccttgatttccatccccgaatgtgatagctctttggggatcatggtttttctcataggaggagaacatcttcttctcccctgtcatgtggtttgtgcaccctctatcgatgatccaacttgtgcccccggatgcataaacctacaaaacaagtttaggccttgttcttaggtacccaaacgggcttgggtcctctcacattagaaacaagcactttgggtacccaaacacaagtctttgagcccttgtgtttggccccaacatatttggcaactactttgcctgatttgttagttaaaatataggatgcatcaaaagtcttaaatgaaatgttaggttcatttgatgcaataggagttttcttcttaggcaatttagcactggttgattgcctagaactagatgcctcactcttatacataaaagcatgatgagagccaaagtgagatttcctagaatgaattctcctaatcttatgttcgggataaccggcagggtataaaatgtaaccctcgttatcctgaaccatgggagctttgcccttaacaaagttagacaatcttttaggaggggcattaagcttgacattgtctttctgttggaagccaatgccatccttaatgcaagggcgtctcccactatagagcatgcttctagcaaatttaaatttttcattttctaagtcatgctcatcaattttagcactaagttgagctatgtgatcattttgtttcttatataaagctaagtgatcatgaatagcatcaacattaatgtctctacatctagtgcaaatagtaacatgttcaacagtagatgtagagggtttgcaagtttttaattcaacaatcttagcatgtaaaatagcattctcatctttaagattggaaatagaaacattgcaaacatttaaatctttggccttagcaattaatttttcattctcaattttaaggctagagagtgatgcatttaacttgtcaatcttagtaatcaaactagcattatcattcctaagactaacaagagaatcatcacaaacatttaaattctcaaccttagtaattaatttagcattctcatctctaaggttggaaataacatcatggcaagtgcttagctcactagttaatttttcacattttctacctctagagcataagcatttttaaccttaacatgttttttgttttctttaattaggaagtcctcttggctatctaagagttcatccttatcatgaatagcactaattaattcatttaatttctccttttgttgcatgtttaggttggcaaaaagcgtcaataattcatcctcatcatcactagagctagcctcatcactagatgttgcatacttagtggaggatctagattttaccttcttcttcttgccgtcctttgccatgaggcacttgtggccgacgttggggaagagaaggcccttggtgacggtgatgtttgcgacgtcctcgtcggaggaggagtcggtggagctctcgtcggagtcccactcccggcaaacatgggcatcgccgcccttcttcttgtagtacctcttcttttctcttctctttcccttcttgtcgtcgcccctgtcactatcacttgataatggacattttgcaataaaatgaccgggcttaccacacttgtagcacactttcttggaacggggcttgtaatctctccccttcctttgcttgaggatttggcgaaagcttttgatgattaaagccatctcctcgttgtcgagcttggaggcgtcgatgggaagcctacttggtgtagactcttccttcttctcctccgtcgctttgaaggcgacgggttgcgcctcgggtgtggaggtggtgcctcgctcgatgatttgtttggagcctttgatcattagttcaaagctcacaaactttcctatcacttcctcgggagacattagtttatatcttggatcaccacgaattaattgtacttgagtagggttaagaaaaacaagtgatctaagaataaccttgaccatttcatggtcatcccatttggtactcccgaggttgtgcacttggttcaccaaggttttgagccggttgtacatggcttgtggctcctctccttggtgaagcatgaagcgaccgagctccccctcgattgtttcccgcttggtgatcttggtcacctcatctccctcgtgcgcggtcttgagcatgtcccaaatctcctttgcactcttcaacccttgcaccttattatactcctctcgacttagagaggcgaggagtatagtggtggcttgggagttgatgtgttggatttgttcgacctcctccgaatcataatccttgtccactttctctggtacctgcgctccatactcaacaatatcccatatgcttttgtggagtgaggttaggtgatgcctcattttatcactccacatagaataatcttcaccttcaagcataggtggtttgcctaatgggacggaaagtaatggagtgcgttttgaaatacgaggatagcgaagaggcatcttactatacttcttgtgctcatggcatttagaagtggcggatgccgattccgagccagaggtggagggtgacgaagagtcggtctcgtagtagaccaccttcttcatcttcttcttcttgtcacccttccgttgggacttgatggaggaagaggattcctccttgtgcttgtgggcggactcccttgagtgtgttctccccgagcttgcggacttgttgcaggtcccgatctccctcatggcggatgctcccgacatcacttcgagcggttaggctctaatgaagtatcgggctccaataccaattgaaagtcgcctagaggggggtgaataggcaaatctgaaatttattaagttcaagcacaactacaagccggggttagcgttagaaatataattgagtctgaaagagagggaaaacaaatcaacaaagaaataaagcagatgaacacggtgatttgttttaccgaggttcggttcttgcaaacctactccccgttgaggtggtcacaaagaccgggtctctttcaaccctttccctctctcaaatggtcacctagatcgagtgagcttctcttctcaatcaatcaggacactaagtccccacaaggaccaccacacaattggtgtctcttgccttgattacaattgagttggaaacaagaaagaaggaagaagaaaagcaatccaagcgcaagaactcaaatgaacacaattgtctctctcactagtcactatttgattggaatgatcttcgaacttgggagaggatttgatctcttgtttgtgtctttgaataaagtctagagctcttgtatgaggtttgaaggctgaaaaacttggatgctttgaaatgtggtggttggggggtatttatagccccaaccactaaaagagtcgttggtgtaggctgctgtcgaatggcgcaccggacagtccggtgtgccagccacgtcactaggccgttgggttctgaccattggagcttctgacatgtgggctaccggacagtccggtggtgcaccagacaatcactattcactatctggtgcgccttctggcgctgctctgacttctgcgcgcgcaggcgcacattgttcacttttactgttccgttgtagacgaccgttggcgctgtgtagtcgttactccgctggcacaccggacagtccggtgctacaccggacagtccggtgctacaccggacagtccggtgaattatatcggagtggctccccgaattcccgaaggtggcaagttcggagttgggttccctggtgcaccggacactgtccggtggcacaccggacagtccggtgcaccagaccagggctgcctttgttttgtctttttctctctttatttgaaccctttcttggtctttttattggtttgttgtgaacctttggcacctgtaaaacttataatctagagcaaactagttagtccaattacttgtgttgggcaattcaaccaccaaaatcaattaggaaaaggtgtaagcctatttcccttccagttttgtaataagagccccatcgagcctcaccaggcctaggcaaccccatctcttgattcaatcctctcccagtttcaagttcaccacattcaagtgatttcatgagattctcaagtctagcatctcgaagcataccgtgacgcttacaagaaactccaatgaaattcaataagagagttacttgatcaaaaaaccacacacaatcattatttcccttggcaacaacaagaactagttggagttgatgtgcaaaacaatggatataataagcagaaggtgactcttgcatgatcaatgttttcaatcctttaatatcacctctcatgttgctagccccatcataaccttgtcctcgaattcgtgtcaaagtcaagccatgactaacaagtaaagcttcaattgcatccttaagtgataaagagctagtatcatctacatgaacaactccaatgaagtgctcacatggccttcccaatgcatcaacaaaacgcaagcaaagagctagttgttctttgtgtgatatgtcactagactcatccgctaaaattgcaaatggctcttccccaagctcttcaattattttctttctagtttctatcgcgcaacactgaataatctgcttttgtatctttgggctagtcaaagtggaattacctggagcgttgttaaaatatacttgttgacctcttcactatttacaacaagaaattttaagatttcaataaagttgcctctgttgctagactcttcactttcatcatgtccacggaatgacaatccttgatgcaaaagaaacttcaaacatcgaagtgaatatgtcaaccttatcttataaagattgcgatcatcatcactccacttctcaattttgttatcaattgctgcattaggatttataaagccaagatatttctcttcggctgtcttatgtgacatagaagccacatgttttagaagtgcttcggaccttttattccaattattccaaccatctgaagtaaatgcagaagtcccttcagggccggtcctggcggggggcagggtgtggagccgccctgggcctcaaaatttgtgggccccctagatatgtacagtaggtctataggtgccaggctttaaaacattttggcccagtccatctcttcgagaaaagtccaagcgagagaagaaataaaccgcccaatccatatgttctgtgacctatattccctaattcctgatccttgttcctcgacatcgcgtcgtcacgcacagccgcaccagctcacgcgtcgcagttgcagctacagctattcccaaatagggcgctgttcccaaatcccaactctggaatctggttcagtcgccgctgcgctacttcagtatgcatggtatgcacctgtgagactatcacatggagtttaatcattgtttgcttgctttccgtagtgttatttttttctttcaagtggtctaattaatttaatgatgtatacaagattgttattttttctttcaagtggtctaattaatttaatgatgtatacaggattgtcaggatacagccatacacccatatgtgttctatctgtcctgaacttgctgtcctgtaactcctagtcgccttgggccttgcacccatcccaagtgaccgagaagagcaaatgtgagccataaaaataaagaaatactctaatatttaattctttgttttctattggtaactcgtatcttgatgtgttaatttttattgcagtgctttgtgcaatc

SEQ ID NO: 967 - DNA, 1540 bp, Zea mays
  Intron number 2 from transcript GRMZM2G177276_T01 (locus G RMZM2G177276) derived from phytozome v7.0 (chr-ID 9; pos 1 1703579 to 11705118)
ggctcgcccgctgcccaacgacatactggagtggcgtaagtagcctcagctgaccctactacttgtagattcgattcgtcgccttttgattggctagtgtttgcagtgaaacggggtgtgattggatgattgcgcagcgatggtgtaggcataacggtttaggcgtaacacatacgttcatgttgggttagcaatcatctcgatcggttttataagtttctatatgcatgttgttgcaccttgcattgtgtgatgtgctcagctcatctgctcattgctaacggttcctgagcaacgcttgctgcctagcaatttattgtttaaagttcaatttgtcggatgttgagccttagttctgtatagtgagctgagctgagtatattgtttgctcatataggctagtcttcacagtactacacactaacaagattcaaactctacttcatgttcagtgacaagaattctggaaaataggcaacatgcgtgtaattgatcattgttttgtttcaaactttcaattaaggacatgtgcatcaacctgtttacattgcttgcttgtggagttgtggtacaatatatatttgatgcatttgatagatatttgctcaatagtcatttggatatctggttcaactgcactatagccttatcttgtcatgataaagataccgcttgttctgtttgttgtacatgactctaattttcatgtgtttgtttatatgtatacatgtcatcatcagggtttgcactggcataactataattatcaagtgcaacagagacagcactgtacatgttgtcagatggacgatggtgactgctaattgtgtgcatcaacctgtttaatagtaataaagtatcgcttcattagatatcataggttcttgttgggttatttatgacaaattgggcaccgttgcttgctgctcatagccttcaacttgtctcttggatgactagtgcaagaagtgtagtttttagttagtcattttacgttgtatactaaaaggaaaagaattttagtagattatgtggttggtatatgtgttcatgaaaatgtcaaagttttgtactagttattatgacctcttaaatttgattggtgcaattttatagtaatagatgattagatattgtagggtcttggtggtgggctatgaatgactaattcagcaccattgatttttattaaaagcctgcaacttgcctcttggataggtgatactaaaagtgtggagtttttagttggtcattttaccttgtattttaaggaaatcaattatagtaaactatgtcctctatggaaaggttaaagttttgtactccttaggtattacacctctgaattttatgctgaagtgcccttactcatttgaagctttgttttatagtcagaatcctttttgttcttcagattgtatctagaagattctgtatttgtcatgcttatcttaatgcaatgtccattttcttgctttctgtcaatgctatatttggctatttggtaccgacgtatgtgtttttcttttaatgccagact

SEQ ID NO: 968 - DNA, 11170 bp, Zea mays
  Intron number 4 from transcript GRMZM5G870253_T01 (locus G RMZM5G870253) derived from phytozome v7.0 (chr-ID 5; pos 2 05567463 to 205578632 reverse strand)
ctaaacaaactgtacaactcaataaggttggtagttattctatgaaaataaatagggacagttatccttcttgaatgagctcacactccttttccccttggttcattggaaattgtaatgacccgccttcaaagtataagacacatttttgggatgggcataaagattaataagggcttggaaccaagagaaagaaaatagataattaccatgctacccgtatttagcttagaaacatgagagagaacaattagtgaggtattaaccatgaatgcagatgagagaatatattatacaaatgcaaagcttgaaaagcgtcaacaaatttacatgaatgccttgacaaaattatgtcatataaaaagacaaggctatacgatctagatggaactgcaccaaactaaatagattttttgtggttcctggctatgtgaagtacttgtgatcttgttagttgggtgctttgcatattacattctaagaaatgcggaaattgatagaagtgttggaatgaatgaaaaccctaattgatagatgagttgcagtattacaagtattagatagtctactcctaacgggctgggctctaggctcatagcacacacacataagtagtctaacacccacacagtcaaaactctagccacgacaaatgttgagactggaccgaaagtctgagaacaatgaggagggaagacccttattgaagatgtcggcaaactgcgagctcattgggacgtgatgaacatgaacgttcgtgacaacaacacgctcacgaacaaagtgaagatcgatctcaacatgtttcatgcactggtgttgcagtagacaattgtactcctagagaggggctgtgaaactccaggaggagttggcgcaaccaactcacctcagccaccctattagcggaagtctggtactcagccttagcactgaagcgggaggccacatgctgatgcttagaggaccaagagatggtgttgtccctaagaaacaccgcataaccagaggtggatcggcaggtgtccaggcacccgaccaacatcggtgtagacaactaaatcaagtgtgggggtctgggggagcactgaagaagcctatagcctgtaagtagagggactctaactctcatcagaggatgacactatgagttggggcaattttctgtttatttcttcaaacactacacaatgccatacccgtctaagggtcgggatacatatttatagcccaaggggctgcaacatatgcttcctagagttgcgaatatgctgtcctacaaactgcactaaccactaggtgctgttgtactctagtcaaaaaggaaaaactgcaaactgcagcaagctgctgtcctccaaaagctgaaactgaaaggagatgcttgcaggctgtccttgcagtcaaaagactgctgctgtgctgcctgccgcagtccttgctgtctgccgcagtccttgcagtcaaaagctgctgcgttgctgctgtcctgcagcagagatgctgtgcggactgcggactgtcctccacacatgacttattccatcattggagatgcttgcaggctgtccttgcagtcaaaagactgctgctgtgctgcctgccgcagtccttgctgtctgccgcagtccttgcagtcaaaagctgctgcgttgctgctgtcctgcagcagagatgctgtgcggactgcggactgtcctccacacatgacttattccatcattctccccctaagtcttgtgtgtcgccttgtgggaaagttgagccattccggacctggagcaaagctcaacaaacttaatcttcccaaggggcttggtgagcaggtctgcaagctgatccttggtgttgatgtagcgcgccttgatgctcccttctgccaagcagtctcggatgaagtggtatctcagccggatgtgcttgctccgttcatggaacacggggttcttggccaatgccagagcggactggctgtccaccctgagttccaccgctccagtgtctctcccgaggagatcaccgagcagtcgagccagccagagcgcctgagtcgaagcagtggacgccgctatgtactcggcctcgcagctggacatggccaccacctgctgcttgaccgactgccagctaatgaggcacttgccgaggaagaagaggatcccgcttgtgctcttgctagtgtcgatgtcgccggcgtggtcgctgtcgctgtacccgacaaggtgtgcctccccagggcacctcgggtagtagagaccgtggtcgagagtccccgcaacatagcggatgatcctcttcacagcctgctcatgctccgtcgtcggtcgctgcaagaaccgactaacgtagccgacggagtatgccaagtcaggtcgtgtgtggacgaggtagcgaaggctccccacaagacgccggtactgagtagcatccacctcctccgtcgtgctgtcgcgactcagcttcagcctctcctccatcggagtgagagctgggttgcagtcggtgagcccagccagctcaacaatgcgcctggcataggcggtctggcgaagtgtgatcccggagtctccctggtgcacctcaatccccaggtagaaggagagatgccccaggtcactcatttggaaggtggccttcatctcttccttgaacgctgccacctctgcatccttggcgccggtgatcaccaagtcgtcgacgtagacacccaccagcagggcattatctccattgccccgccgatagatggccgcctcgtgcgggattggcatgaagcccatcctcttgagcgtggaatccagcttggcattccacgcccttggtgcctgtcgcaagccgtagagagccttgcgcaggcgcaacaccttgccctccttgccagggatcgcaaaacctggcggctggtgtacatagacctcctcctttaagtcgccgttaagaaacgccgacttgacatccatgtgatgaacatgccagccctccagggctgccagcgcaaggaggagtcgcacggattccatccgtgctacaggggcgaaggcatcgttgaagtcgatcccctcctgctgcaagaaaccgcgtgccaccaagcgagccttatgcttgacgatggcgccggcttcatccctcttcagtttgaacacccacttaagggtgatcgcgcgatgaccatgagggagatcagcgagctcccaagtgcggttcgtctcaaccgcgtccatctccgactgcatcgcggcacgccaagccgcatgttgctcggcctccgcgaaagaccgaggctcaccatcgtcgcatgcaagatgcaactctcctgccagaatgcgagatgcagggcctggcaccgacgggtcgatgagaaggccctccacccttcgataccgcaacggctcgccgtcgtagcacgcgtcgacgcgctcctcgtcgcgggacagaggggtcacgagctccactgggtcgtgctcgacacgagctggtgtcggagaggacgttcccggagagggtatcgtcggtgctggagtacgtggtggcgaagagctcgttgtagcaggagctggagagtgtggcgctggagtcggtggagacttgggggctggggtagacctgctcggagaagagttgcctactcccccagctccctcaaagtggacgtactcgatggtgaagtcgtacgtcggagtcgtgccgtcgtccaccgccttgtcccacgcccatcctcgcccttcgtcgaacactacgtcgcgcgccgtgcgcacacgctgtgttcttgggtcaaggatgcggtaggccttcgagccctccgcgtagccaatgaacacccccggggtgctcctatcgtcgagcttgctgatgtggccaagctccttggtgaacgcgaggcagccgaagacccgtaggtgagagaccgccggcttgcgcccatgccaagccttgtacggtgtcatcccgttgagagccttggtgggcgagcggttgaggatgtaaaccgctgtcaccaccgcctctccccagaagacagctggcattcctctctgcttgaggagagcccgagccatccccacaaccgtctggttgcgccgctcgacgacgccgttctgctgcgggctgtacggcgcggagtagtgacgctgaacgccctcatccgcgcagtacgatgcgaactcagccgccgtgaattcgccgccgttgtcggtgcgcagcacgcgcagcttgcggccgcactccgcctccgcagcgacctgcacacgcctgatggcgtttgcagcctctcccttgctgccaaggatcatcacccacatgtagcgggagagatcgtcgacgagcagcaagaagtagcgtcgtcctcctggtgtggctggtgtcaccgggccacacaagtccccatgcacgagctcgagcctctccttggctcggaagctcgactgctggggaaaggggagtcgtctctgctttgtcaacacgcagacatcgcagaattgctccacatggtcaaggcacggcaggcctcgtaccatctccttggcgctgagccgcttcagggcttcgaagttaaggtgcccgaagcgctcgtgccactgccatgccccgtcgtctcgacgagcagcaaggcagcaaggttgtgccaccttcacattgaggatgtaaagccgatttgcactcctgcgtaccttggcaagaaggcgacgagagggatcccagatcctcatgactccgtgctcgacctccacgcgcgaaccgttctcatccagctgtcccaagctgatgatagagttcctcaacgcggggatgtagtagactccggtgagcagcctgtgctcaccagacgcggcggtgaagacgactgagccggcgcccttgatctctacgccggaggcgtccccaaacttgacggagcctcggacgctagagtcaagctcggtgaagaactcccgtcggccgatcatgtgatgagtggcgccggtgtcgaggcaccatccttcgatcatgtccttgttggagccgtcgccgaggaaagcgcgtgctttcgactcatcaaggtggaggagtgccgctgcggccggtgccgctggagatggctcgatgcttgcatgtgccaggagcagggcctcctcctccgcctccgcctgtgcgacgttggcctggccacgtcgtggctgccgacaatccctggcccagtggccaagcttgccgcagttgtggcagccgtcgtctcgtgccggcttcttgttgccgacggcgccgccttgggcacctccacgtgcaccaccctcagcatgtcctcgcgccccggcctgggcgcctccacgcgccttgcgtggcttgccgcgtttgcggcctcgtgtcgaggaggactccccctgcttcttgtcaccctggcaggcctcccactgctcccgagtgagatgtagcttcccgccgatagtgataggcccagagagagcctgtggttcgtcgccgtcgaccaccttgaggcgaccaatcgcctcttcgatcgtcatcgtggagaggtctagcagagactcgatcgagcgagcaatctgcctgtacttctcggggatgcaacggaagagcttctcaacagctctctcctcatcgtaggtgtcgtcgccgaactgcaccatcttctgcaacagagtgttgaggcggagagcaaagtcatcaacatcctcacctggcttgaaggccaggttctcccactccttgcgaagtgcctgcagtgtggtcttgcgggcacgatcgctgccgatgcgggtcgcagcgatggcgtcccaggcctccttggcagtccgcttctgggaaagcgaaaactgcatctcgggcgggactgcagcaatgagagcatccagcgcccgccgatcctcgtggtagtcgacgtcgtcgtaacgaactgcttcccacatgtggcgaacctggagccgtaccctcatcaccgcggcccactcgacgtagttggtcttggtgagggtaggccacccaccgccgggaccgatgtccctgacaatggcttgggccatgcgacgaccatggtaccgatccggggagggagaaccgcgccgcctgtagaggccgcgatctccgtcgactcggtcgccgccgccgggagcaccgccggcgcgtctacgcccgtctgggctgccgccgcgtgcgcccccgcctggagcgccgtcagcgtgtcggcgcctatccgggctgccgccacgcgcgcccccatggggatgcgcggctgcccactgtgccgcctgctctcgcgctgcttccctcgccagcctgagctcgtcgtcggtgttgtcgtcgacagaagcagagctaccagctctactgccgcgcagaacctcgagctctgttgccgccgcacgtgcagcatccgccgcctccgctgcttctacttccgctctcgccgctgccagttccgccgccgccaaccgtgctgccctcgccgctgtcgctgcagccgctgctgctgctcgctcgcgttcttgtgccgcggcgacctcggcctcctgctggcgccgcgcactcgaagtggccgagcgtagggacatggtgggctagtgaggggtcgttgcgtgtggaagaggctgtctcagacgaaaggctgctcgtctgagcaggggaggaaggaacagttggagctcttgctaccgactgagtgtggggagaggcacgggacggggatgagcacgagatgtttaggctgcaggatagtttggctctgataccaattgtaagtagagggactctaactctcatcagaggatgacactatgagttggggcaattttctgtttatttcttcaaacactacacaatgccatacccgtctaagggtcgggatacatatttatagcccaaggggctgcagcatatgcttcctagagttgcgaatatgctgtcctacaaactgcactaaccactaggtgctgttgtactctagtcaaaaaggaaaaactgcaaactgcagcaagctgctgtcctccaaaagctgaaactgaaaggagatgcttgcaggctgtccttgcagtcaaaagactgctgctgtgctgcctgccgcagtccttgctgtctgccgcagtccttgcagtcaaaagctgctgcgttgctgctgtcctgcagcagagatgctgtgcggactgcggactgtcctccacacatgacttattccatcattggagatgcttgcaggctgtccttgcagtcaaaagactgctgctgtgctgcctgccgcagtccttgctgtctgccgcagtccttgcagtcaaaagctgctgcgttgctgctgtcctgcagcagagatgctgtgcggactgcggactgtcctccacacatgacttattccatcatagccgacaatatcttaaaggtatctgatgatccacttaaccgcgcccaggtgcggttcccagggattgtgcatgtagggacaaacctgttggacccatacgcaatgtcgggcttgatggaggtgagatactgaagagcgttagcaagacttcggtaggcaatagggttgctgacagaggtaccatcaccagagagctttgcctgcgtgtctattggggtaagtcatgtagtctagcatgtcagcatgctctacgatatctagggtgtacaacccaaatccttcatcgtaaactcattgtgtaatgatccggtgcaagagacttgaagaagaggcaatgtgcataatgtcatcaacatacaggaggaggtacacggtgtcactgccacataagtagatgaacatagaactgtctagcttcaacaaatcccaatgagagcaactaagtggcaaacctgctgtaccgagctcttggggcctgctttaggtcatagacgaacttgttgagtttgtagaccatggtagggtgtgtagtcctacagggtcaacaaagctgacatgctggctgcaatagacgacctctgttagagtcccatggagaaacactttcttgacgtctaactgatgaaccatccaagagtgggagagggtcagtgagagaacgacatggacgatagcaagcttcaccgctggactgaacgtctcacagtcaactttacgacgctgagtgaagccctgaagaacccagtgaacatggtaccggtccaaagaatcattcgcctttcgcttatgtgttcacacccacttgtcaatcaccatattgccacctggaggatggggcaccaagtcctaggtatgttggcaaggagggcttgatactcttcttccatagcgcgacataagtgaggatgagcgaggacgctatgaacggaaacggcacgggggagatcggcggagaggatgtcacagagaggacaagacgaccaagaggtgaagaactccaacggcctaccaagtcaccattgtgtgggcgtgtttagggtcctggtgagtggtgaagaagaggaggtcggtgcactgttggatcaacctagcagcggggcgggacacccgcctgtgcacgtcgttgatagacaattagacatgcatagggtcagtggagcggggaggggccagggtcggcgagggcattgaggaggtgaccagcagggttgtcgttggcccgacaggatccgtcaaggaggcacacatgtcgattggggacggcaagacaaccctggggggtgcacaagggccatgagggcattggtggtgcatgcgggagcaacatagggaaacctgcaggtggaaaaacagaggtggttgagcagagggtgccatagggtcagtttgaagaacaaagtctaacttgacggtgcaatcgatggtggagctcgagggtgacgagaatgtgaagttcgtcttggcgaaaacaacgtgatgggagatcaaaagacgatgagtggtaagattaaggcactggtacgccttgtaatcaggggagtaaccaaggaagacacaatgattagagggaagagtgcggggcaagcttatggggagcggtggcagaaagattagggtagcatgcacatgcagacacaaagatggtcgtaggatggaggggtgccaaagagagtaaagtgtggggtgtgggtgcgctaatcgccttggtagggaaggcgattaagtaggtaggtggcgttgtggaggctctcaacctagtagcaagcaagaacagaaacctggaagagcaaggagcgcaagatgttattagtgtgtatcagacgctcaaccttaccattctaggaggaagtgtgagggcaggacatccagagctgtacaccataggaggaggagaacgaccgagagttatcgaactcctgaccattgtcacattggacggtcttaatggtgtgaccaaactgagtggaaacccaaccgaagacctgcaggagagtcagaaacgtatcatatttcaagcacagggaagcccacgaataatgagagcaatcatcaagaaccaataggtagtacttataacccgaaacactgagaataggagaggtccacaaatcattgtgtatgagaaaaaatatgcacatcctgagaggagctaggaaaagaaagtcgaacatgacgacctagctgacatgcatcacatagatgctcagaagtgcccctagtacaagagatgattgaactactacacaacttggacaacacgtcagggctaggatgatcagtcgacgatgccaattgctggatgtagtggtagtagtcagggtgtgtggctgtggcgaggacgaggtcggtggtgtagcgaaagcggtaggttgaggaatggtcgcagggtgtataggggtctagagctatcgcatctgacgaggaggctatgggtagcgagatccttcacagacaagtcaaaaggatgaaactcattagagcaagagttattggtaactggcaaacgaatagatggctttgaatgatatggcggggcggcaggaacattgcggagatgaaagggcttgggaaggactgaatcacctacaaaggtgattgggagaatattccgctcacaatgatagaagaagggtgagatggaagaggtaggtgggaaggggagagtataccgacatccggagtggtgtggtaggaggcgccgaagtcggtaacccagttggtgatggcgggaggggttagggtcatcgtgctgaacgagctagtaacatatggctgatctcacccaccagggcatgggttctaggagggagttgagtgtggtggtagaggcaggagcagtggcagaggtgccggtggcgcagaggggagtgggctgagaggataccctaggtcgggcatctttaggtgagccggctcacggctggggctggggtgggcaggtgaaggtccaccccaggccgggccacatggagcgtcccctgggccaccatcctcatggcccacccctttgcccctgacggccaccaatctgtactccctagcagcggcagctaggggaggagaggggaagaagaaatgctctgatgccatgttggagtgaatgaaaaccctaattgatagatgggctaccgtattacaagtattacatacagtctacccttaatgggctggtctctaggcccatagtgcacacacacaattagtctaacaagtagtgcctctattcatgcttgagttctgcaaactgatatgtcattaactgtttctcacactttaacacttacgtctttggtattcttacaattacaacttgtatgcatcacatacgtgcaggcatagtatatttctagtatttctcatgctgctttatcatttgtttgcttcttttcactcacaatgtgcccttgtttgcttaaggctagtgtttttatgcaaattgaattgaaattcaactttcaactgcctaactacatatcttgaaccacatctgctaagttcaatcttcaatgtcaatcttgttccataaacccctaatccctctggatctgattgtagatgaatattcactcttttgaatatttgcaaactttgttccagaagtattcttcttgttgtttgttccagaagtctgttaaaactgcagtcttcttttacttgtgcacttcaccttttccttttgttgcacttcgtgctcctgtatggtgactgttgaaaggtgttactagtattttaaagtacttagaagaaaatgttttgttccagtgttatttcatcttaataattcattgctgagtcaattacattttctcacttctagtgcacaaagca

SEQ ID NO: 969 - DNA, 2229 bp, Zea mays
  Intron number 3 from transcript GRMZM2G095037_T01 (locus G RMZM2G095037) derived from phytozome v7.0 (chr-ID 5; pos 1 41196253 to 141198481 reverse strand)
tcccgcgcagcagattctagaggttaagcaagcaggtatcctctgtccctgattcttctcttctttcgtgtggtaaaaagatgcgccatctttcccatcaaattgctccatgagcagctagctagctaaaccccaccgggaaatgcgagcgacgaagaaaaaaaagaaaatacctccattgaaattcttcagggtcttaggcatgtcgttgcgaaacgcatattggtcagacagacactcaagaccatcgatgttgctgctgctttttggaccactgtgcctttgattacgctctctatcctctgtgtccgtgccgcatcttccttcgcctttcttgagatgagagcaacgtaggcagcaccatcccgttgcaatagctgatagtagattgctctgtttctaggcctctcgtgcgatcatagttccgtaggggctggtagtctaccatgaaccctgttccttctccgtcaagctccttcccattccttctatctctactaccttgtggtgaacaaaacatcactaatcacttgaagctccttcacaggcggtagtggggtcctaggggatggtgcacgagctcttaaaggcatacagggacacggaggaggaagtgaccggactagggtcgagcatatgtctgggtggtcgcacggtgatgcacgttgttgtgctcacgagcaatggtgagtctctcctgactgctaccttgtggtgagcatatgcatatgtctgccatccagtgcctgtggggcaccttccgagttctcaacacccatgatgtgcctatcatagcactccgagacacgctcctccagatccagcatcctcacccagtcggtcaagtcgaccacgccatcgttcatgcagatgatctcaccggcaatcttccctgtcatcaactccagcaggatgacaccgaaggcatgcacgtcgcacttcagagatgggcatggcttgctggtgcttgaaaactctggaggggaatatcctagcgcgccggcgtttaggacctgctctgccatgccgatcgaagtcatctgcctatgaaggctgtagtcagtcaccagagcagatggagtggagttctgaatcagggcattgtgcatgtaatctagacagcgggcaatatcaatcgcaatgttcagccgctatccagctgataggggcgggagattctgctcatcaaattctagaaataagaaatatgcatcagaaaacgtccatattgagtatgaaacagagtttgatgagtaaagggggtgaaggaaaggaaccatcataccagacaagtaggtagacagagatgtggcatctgcatagtctgatatcatgatcctctcttgctctttgggggcccagtagtagccacgcaaggggacaagattggggtgccttacactaccaagcttctttatttcacgggaaaattctttcttgctcttagcaaagccctccttcagccacttcactgtcagcatgtacccattgtcatgtgtagccttgtaggatgtcccatggcagctcctgccaattatctcagtaggggcacgagagagctcttcagcagtgaacacaacttgatgccgtgcacaccgtgtgggacctcgtctgcgaggcccccgaacggccgggttggaggagacgttgttgcgcctcatggtgaggtctctcgtggaagacatcacgctgctaccgccactcgactgcaagctcgagtccatgcccgttgctgcataggacgatatgcccatcatgccgctaggcgtgaagaactgatagaaggttgagaattgctggtcgctcgagcaagtgcacgcgaggcacaacgtacgattagtagcatttcactaattttgtgtgtgtggtgtagtgtatccctccgatcgagtctgttgctgctgaattggctatggctcgctgtatcttactgaaaaggtagtacaatttgtagctacatatactcaattagcgatgcgaaattcattcgattttagttgcaaatcaagcgtgcgtgatattggtcgcttcttccatacattttgtgatgctaccatatcctataaatatattggagcagaattggcaatttaataaattttggagtaattgcaaaactaaagtgtcttttgtaggtgaggcgattcacggattgaatcgcaatcctgtgcggccttttctactccaagtaaggctagctctcacctcgtgctcttggttttgcccagg

SEQ ID NO: 970 - DNA, 8758 bp, Zea mays
  Intron number 1 from transcript GRMZM2G120257_T01 (locus G RMZM2G120257) derived from phytozome v7.0 (chr-ID 4; pos 5 0643924 to 50652681)
ccacccgagctcagtgggcgcggcaacgcagtaaggtcggtgtctcagccccaggtccctcctccataccgttcccaggaaaaaaaaccgtagcttggttgtgctgtgccggggcaattgaatctagattcaacatgatgtaggctgaaagaatagttgttcatacggtttgctagttcagtgcaatttgtttcacaaaatgctacacggaagaatatccaccatgccggcgcattcagtcattcacaatttcgcaggctaaccttcacaaaaagtcaagtctttactgatagacaaagacatgatagggtctctgaagcactactctaggagtgaaaaagtacagtgttttccgttgtgctaccattcctcatcagcgctactaaggcctcacatcttgtttttccccaactcaaatgtccatttctagatttaccctatcagcttcttcttgcatgtcaatacctacaaggctacaacctctttttaatcacgcatgtgcattttgtacaattaccaaatattgtttgttttaaggtatctccggggtgatgatttatggtggacccagccggaaaaatataggatggacaattgcaatttaaatgaaccacttttacctctagattttatcttcttcatgccaagataagagggacaccacgaccttgggccgtcattgttgctccatccatggccgccgacacaaggcgaccttggttcgtctctccaaatgtttcaatacgtggcactacaacctctttttaatcatgttgtatctgcattttgtacaattatcataccaaatgttgtttattttaaggtacctctggggtaatgatcaatggtggacccaaccgaaaaagtatagtctgaagtctgaagtctagaactagaaccctagaactctgaagtctgaacttaagtactgattactgaacacagaatcacagaatcacagaagactgagagacacgtaccttctgaagaggtgttcgtctctggtccctggtgttggtcacttgttttcaattgttgtgaattaaaaacaaggcaacacaatgttaaacgttatatgaccttcgtcttatcaagcattatcttttctcaaagataaagactcttggacgaaggtcacgatgagtataagattactcataaacaatccttcttctaaggttgttaataagtaagagtttagaacaaaaagcattcatgtttaagggataagcaaataacgtaggataaatgcttcatcgggtttagggtgatagagacaatgtgtaatgagattcttggtaattataccaagaaagaagaccaactaatgaccactgctttcggcactcgattacacattgtctctatcacctccagccatcgtgaccttcgtccaagagcactggagctgaaaaggctgatgtactggctctgataatcccctgtgtaagcatggcaacacattgtcgtcctagctcatctttttgcagttgtgggtatctatagggcctgacagccaccggttgtgtccctggtcggaggtggatccggtggtcacaatgacgagctgggggaagtccctggggttcgtcaaacataggtgtaaaggatagcagcagctggtccatcatctgtgattctgcgagttgagtagagcatgtggctggttgtgtgatgtcgttgcgtggtgatcccagccccttccaaagaatgtgcctccctcctcgccagaacgccatgtagaggtcgtctaaatcccacaagatagggaccagtgtgcgcagaaattggacccaagatggcatcaaaactgtccaatggaatggcgtagcagggaattgcaaagtgttcttcaccgatgaccactagaatgccgtctgcgaacccggtgcaatccaccttgtccccatttgctatggtcactcttcttcctagactagggcccattacaatgtccaaccgctgcaaggtggtgttgtcaaggaaattatgtgttgatcctaaatccaacaatgttgttaggagatgacccctgatggaaattagaagttgcatggtgtcttctttctgagttcccattagtgcatgaagtgagatgatgggctttgctgctgttgtgtcttcttcatcagtgaccgtgtcgtccgtataatctgagacttccaaatagaatagccactgacagcgatggccacggacatactgctcatcacagttgtaacagagcccctgcttgcatcgctcgaccatctcggtcggtgtcagatgcttgaaggggcgggctagctgtactggttgtgtgcccgctgcagcctggctggtgacttgagctgttggtgcaggatgagccgtcaggcgtggaggttttgaagtggccggctgggcatgaccttctaggatctagggacgtcgctcataggcttgagccattgcgagagctgtgttcaggtcttgtgggttgaacatctcgacatcaatgcggatgtgcttcggaagccttggtgtgaagagttgcgcttgttgtgttggagcgagtggtgcaacatggcccagaagtgcccagaatcgctgctggtattcatccaccgatgacttgaagggtaggcacgccagtttgcctaggggatttgttcggatgggggtccaaacctttgatggcacaggaacatgaaacgctcccaagaaagcgtaggtttgtcgcggttgatcataatgaaccactgtcgagccgctcccgtcatatgataagaggcgagccaaactctatcgtattccagggtgtactgtccctggaagtactgctcacagagattgaaccgtcccagtggatcgttcgtgccgtcgaacagtgggaactcgagtttgtggaagcgaggtactggtggtggtagggtgtatccctgtcacacccggttttaagggataaagccgggtgcgtctcatatgtgcgccaaagaagaacaccatatataatgaccaagtgtatagagataaatgtcacaatatcataaaagtaattattacatagcggaaggcttacaaaaataaatgaaaatataaagcgaactaatgtccatccatgacgccataaagttgactgggagatgccacctagatcaattcgtactcctcgttgtacgactcctcctagaccgcctgttcttctcctgtggggggtttatatatcacatgggtgagctcacaaaagatcatagctcaacaagttgtgggaataatgtgcatgaactcaccaaaggtgggagttcatgtgaagtgtaaggctgatcaacaatagaggttaaagctgagcattgcttttaataagttggtcaaattttattagcagttactaaatgtaagtaaatatcaaaccagaataataatagaacaaaattaataataaatcccatgcaatgcaaatgacaaattgaatttagttgcatagtttaatcatgcgagagtcttgagctgctcatgaccgcgagcacggctagtataccagttttacactctgcagagtttgtaccctgtacccacaagtcatgttacccatctgccaagggatcgtggctcccatacacctctaccaaggaagcgaggctgggtaacactacgaggcctttacaaagttccactagctttagaaaacccgatacaatttgtaggaagagtaatgcaggaatcccccgtctgaccgccatcgcagcaaaatcaacccggtaacctccctacacgcctagtcccctactgcccttgcccctatcgggtaaggtagtccttcactagctttcttagttagtcagtcaagggcgtcccattccactcttgtggtggcacgtgtttcaagttaagcttcatgttccaattaaaaataatgatcttaatatgaacaataagtaaaacaatagtataactgaaacataaacaaaatgtaatattaatcccaaattcatatagagcaatagcaaaaactacccaaatagttcaggggtaaacaaggtaacaagataaccagactagggtgacctattgggtcccatcaaaattaagactatgcataaataaatgataataaagaatattattgggtaataaaagtggtcaagagcacaatttgccttcaatgagctcttgctcagcaacttctacctgttgaacacctggatcctctgtggctgcctcgcctatttgcaataatacaaacagacatggtatcacaaaaattaacatcacatcaaacaacagaacagaatgcatgataatattctatatgtcgtaacgagatcgtaggaacaagaatcactaaattcggaattacagttatttagttatgaatttctggagttatttagtagctagaatagaatactcaagtgaataattttaattcaagtttcatgactaaatagagctaccagttgacagacaatattattacaaaattaatgccactggaatggatcaatttggagttaaaatgaattaaatatgaatttcacaagtttctggaattatttttgtattaaaaatcaatttctattattaattatctactttcattgttctctggtctgcacatcaaatacaggaaaggccaggtgctctggcacaaaatatactaagactcaggctaaccctgagtggaccgcgggttggaatccagaaagcccgagggctcttttgtaaagctgtcagccgaatggttatcgggcgacctgagctgcacgatctgctgtcaatgctccagattagatctatattaaatcgaaccggtatgcgatctggctcattggatcgacgataaagggctatgattcaatctacgcccgatccgatcacgccccctcatcaataatccaacggctgggatgagcccaagccgaagcggtaccctatctctaatctacaccatccatcaaaatctgacggcgctcgttcacccccccatcagaaaacaggcgcacggcggcgtcgcccgcctacacggtggtggccatggccggggatggccagattagtattccgggccacaagctttgatccaattcgtgttgtgcgatgcgtgaacgaaggcgagagcgggtgactagttcataccggcgattgaggggcgagcgaggtaggtccacggcgcgggcggagtcgcggcgggttgcgtactccgacgaggaattggctcaccaccgcaggtctccccgacccgattacaccgtaacgccaatcaccagaaccagttggttcgcccggacccctcgcaggtcaccggaatgatcccaggtgtgatctccgcggcggcggcgatgttcttgcgcagcggaacgcggcggcgcaaggatttgcgtggagtggaggcagcaaagaaaagggagcacgagcgggcgaggttgtggggtccggtatttgaaggcgtcatggagttcggggtggctgcaacggaacccgtagctcacggcacgacgcgacatgcgcggggggcgagtgacgcgtggagaagacggaggcgcgagcggttgagagactgccctgcgggtcccacgtaccatgaagtggtgagatgaggcgcgggcgagcgactgtcccgtggggcccggttgacagcgagcagcgcaggtgcggggtagagtctcggacatgtgggcccggtccatcagcgaccacagttgtcgcgtgagtagggtgggccggcgcgcgttagtggagagaaacgggccgaattgagatcggggcccagttaggttttccctgttcttttctttttatttttcttttctgttttgtttttccctttttatttttagatttcaaatttgaattcaattttaattgtgaacttatactcattttaaatgtacaaattgagcccagtaatatggagggtctaattatttttatatttattttctttatttttgtttagtattcttccttccttttctccacattttaaatttccaaatttaggtttaaatgtctatttcaccatttgtatagttctattatcattacctttatgggtgaatgcacaaacaaataaacaccagcatgatgcatatgttacttaggtgtctttggctcttttttttaaattttttaaatgtgtttattcacatgtgatagtaggtaaagacaaatcatatacgggaaaaattatctcctttctcattctttacaacttgggtattacaatcccccgacgtcccctgcgaccgaggcagtgtggggctgcgtggtggttgagatgggtgctagcggattggaaaagatgggatgggtgacggggatggtgggaactggatgtggtggattggtatggaggagttaggcgtggcggtgatgggggcggatgatggtgggtcggtcatggctgggatgccgccgtatcctggcagcccaaagggaaaccctgtcgggttattggaggacgatgttgttgatgatgccgcactctccaaggctgtcatgcgggaggacagcgaggacatctgctgcaccatctgccggtggaaatctgccatcatcatcttcagttcccccacatcattggtttgaggcgcagcgggtggaggatcaacgatgtcggctggggccccatttgaggcgttcgccgtctctgtcctggtcatctctgataccagattgttgcgcctggtgctcctcaggaaatatggaggacgatctgaaggctggtggagaagatcatctagtcgggacgacagcctaggtggagccgtggtgaagaaccaatatgttggacatgtgagaggtaagggaaacatgaaataaacttctctattacttcttgcttaactattgattacaaaggccctggccttataggcgccggcccctaacagaatcccccctagataggagatctaacagctaatacttatctaatgactgggactttatcccaacaaaccagactgcacaatatcctaacagattgaccctattaggcagattgcccctagccatccttagtccttctattgtagccctttccagtcataacactttatctttgagaaaagataatgcttgataggacgaaggtcatttaatgtttaacattgtgttgccttgtttttaattcacagcaattgaaaacaagtgaccaacacctgggtagccaccggtgagacaggactatccgagcctctgagggagagagaagggtgaagaagggagagaagggagccgccggtcgtggcctcgtgggaagcagaagagtcgcccaaggtaggaagtggaagagtctgggcggctatattaattctgcgccgaaaatgacttttggacttccctaggcatcaaaccctgttgatcgactgatcgtccatcacgacgattaatcgctacagatcgccgattaggcagacgttatggacgatcagctcatctgatcgaatcgaaacctctaatcgagtactgagtaccgattagcctgactaatcgcgattagtcggacgatatggaatcactggccgctaaggcttcaaaccccctgacatcaccgagtggcgagcaagacagggcacaccggactacaagggctgctttggtgacaaaagaattggagtggattcatgaggagtaaatccttcactaaatacaagtattaaggcggcatcggtgctaggcaactcatgagtcatgaccggggccttcgggcaatgtggccatctgatcttacaggcaggcccaagtctgggtggctgggcctctagtttacacgtttagtcagcccaaacactaaacagaggccaggctgatgtaggcaaatgtgcaatttcacggtcattgtcttcagcctccatcagcttgtttgttactccttgagatggcaggatctgccatggctgaggcctgagcagcggatctagggggtttattgacgatggctacccggggcagctgccccaccttaggccttgttcggttaatcccgttatccatggattgaataggattggaaaaacttaagaaggagtttgacttagttaggatttaaacccacccaattctactcaatccacatgaattgagagctaaccgaagtaccgaacaagctcttactgtagcagtaggtctgcccctggtgatgatggcctaattgctactaactgttgacgttatgtttgtttgaaattgaaaccttgtccttgaggtagtgtgaaataatgattacagccctcttgcttctgttgatgatggctactgtaacaaaatcctcaatggtttcttcgatagatagataaataaatcccaatggtgtttgaaagttcaaacctcacctaaagtgataactgttaatgtttataggctgacttattggtgatcaactggagccaggcaaggcatagctgagcaaaacctgcagatactgccatgctgttcctttctttcactttaccatgttccaatctcctattatgcatccttggtattgtgctgtaattaaagttaatgtaagagattatgtcctgagcttagttggcgtgcagctggctagttgcttttagttaatattcaacctgtaggttgggtctatgcattccgatatctcgccttgatgccagcactttgtaggtgcccatgccaataatctttttaattcaaaactggataaacgttctggttggaatctcatggatacatccaagttctctcagtcgagcattgcttgtcaatagattttatttttgttgataaatagcttgtttgtctttgttcaggtctgaaactgacattgtaa

SEQ ID NO: 971 - DNA, 1097 bp, Zea mays
  Intron number 2 from transcript GRMZM2G097843_T01 (locus G RMZM2G097843) derived from phytozome v7.0 (chr-ID 1; pos 5 8738245 to 58739341 reverse strand)
attcgttaattgaggtatgtttcattggcactggtagggaaaaaatgattcttttgtcattccattgttgttcactgattaatttgacttggttgaatatggaattattcttgttattttaaaattttaattttctttgtagtttctcttgttacatatgacatcctaaatattcctattgttctataaagcaaacacatatttctcatagtaacatttttacatttgatttgcaccatttatatttttccattttcagtcatttcatcccttgttttggctgtccttgtctggtgtggtgaggcaagcagagctgataatccaaactcacatacgaagggttatccaagcatatttgattggtctggtgctcaatggcaaactttttctctctcaaatacatccatagcaaaatgctttcatatcttgctttcaaggacttctttttctcgaaaagcgtaggagaactgcgcctcattatatattaagaagaaacaaaggtctatagaagacccagatatatgaattatgattataacatcagactggaaagatgaatctgtggtaggcgtgcatttggccattgtgattctctgttttgatatcaattttgtgaagaattataaatatcagaatggaaaatgaagttgttaggcgtgcatttggtcattgtgattctctgttttgatatcatttttgtgaagaagtgttcattactacccatttcttgaaactgttgtatccatgataaccatggtttttaaagcggtaaggcggtccaaggtgttggaccactgcctggacgcctaggcggcgcctagggtaggcaggcaaggcgcctaggcgttagaccaccgcctggacgcctaggcgacgccttaagaacagtgatgataactgtacgattaagttgtgattatccaaacacaattaatgtgtatagtttagttgcacagaataatcactgacttgcacacatcatatatttgtcaacagcattgaaggatgctgatattttgttatgtaatgccatatgatttgttttgctttcaattattgcaggttttcaaatctttcagtgatagccaaacatcttt

SEQ ID NO: 972 - DNA, 4297 bp, Zea mays
  Intron number 2 from transcript GRMZM2G165195_T01 (locus G RMZM2G165195) derived from phytozome v7.0 (chr-ID 7; pos 1 48322691 to 148326987)
ggatctgcaaaggtagtttacttttcttgatttttttggtacaagtgttaggccctgtttgtaccctctagattatataatccagcttaaataagttaagagacaaacaaacaacgcatattattaagtagattatatgatctagatacctagattatgataatccataagcaggtcataggtgcttaactgattatataatctataagctagattatattatccaacaaggaaacaaacagggccttactctgctagtctgcttgctctctcgtgcttagcatagttcgttgggattttgagagtaccacagtttgtcaaggtgaatctaggaacaatgtagatactaatcaaattgatctcctgccactaaacctaaggttttagaattgatgttcatttcattgtgtaatgtggatttagttctattacatgagcgaaaaaaatcctacaggtcttagtgcaggaatattggacacgataggaggagcaattgcactgaataaaaaaaacaatatcataaccttttcacacctcattacgaattttatatgccaatgccatacatttgatagactataactcttggtgtaaagcttcatatctggcaatctaatataatatgaagcatgtttttctcaccgcaaagagagtgaatgtgaaactggatttgcttacattatataggttgaggatgattggatttttttctccctatctgtttcttacctttattgtgttgtctggttatctgtgaaggaaggagaaaatgcgtataatatgtgggatgtttattgcttgagccctcgagctgtttatataagagtacatggcttggagggcaaggcgcctctcctagagataagaaggctatcatcggattacaatcaatcctaaactatccatatccggtgttgcctaatatactttaacatccctccgcagtcacagagggagtggcgcagacgatgagactgtagaagaagcagtcgagctgacatcccctccacagtcgtaacagtcgatgcgacgtagatgctgtggctagagtggaagccaatgaggttgcccaagcaaggcagtagccctttgtgccgatgtcgaggtagccaaggatgaggacgcagagccgttgtcgaagtgccgtgtgttgggtagtcgtggtcgaggaagatgtcgaggatgacggagaaaacaaactgcacaagtcacagcgctccagaggacgtcgtggtgaccgtggcgttgagaagcagtcgtagacaaaggtgcgatgcgtcgaggcagatgagggtgtcgatgccgggggcgacgtgtcaagcagccatggacgatgtgtgttctaggtttgccaagcctagaaatgtgtcgtggatgaatgcacgtgtcgatggtgccagtaccagacatactaggtagagggccccaacccatatgtgccagcatctcaagggaccagcaaaggaggcctccgtgacggttgtgatgaagcacggagggagtgtcgatgcaacgcacggttgtcagagcggagtatatgaagtagtcgaggacgcgataatgaattccctagatctggcgacaaggctgtgctagacaaagcgaagaggtaggcgtgagcgaagaggtaggcgtggcgacacatcgaggttcctggagtcgcggcggcgagagccacgactcataggaaactaacctcaatggtgccagtggagcgcgatggtggtatttgtcggcgaagaactcgatgacaaatgcggtgcagttcggcgacggtggttgcctggctggcacgcctaggacaggcacaacatcagcgcaaggtgttgacgcagcatgcaggaggacccgcagcgcagaacaatgggtgtgtcgacgcagctcgcatgtgtcgaaccgcttgctcaaaccgtgcgcgggagacacgcactgacgaggtcgacgatgatgtagatgcaacgacgttagttgacgacagacgacgatgctgctaattgaggtggcgacgtaactacgaccctcttgcttggcgaagcatcgcgcgatggacgacaaacgtctcaggaggatggttcacccgcgatcggttgatcaggccgatggcgtgcgagtcggagacgacgatggtgatgtcgatggtggagcctcctgatcggtggcggcgacgacgagccgacattgatggacgtgcaaacgaagaggagagacacatgcatgcgttttggttacgccacatgccatgccagttgcaccatcggataagatgaagaagtcggggttgttgaagccgatgtcgagggcgcgcgagtcgactggcggtgggcgatggagatgcaaacccgatcactgaccgggaaaacaaaaaaagacgtaacaacaacaaatctagggaattcatcggggtaccgaggcgcatcccctgcgggcgtgcggcacagtggcgcgaccacgcggacccgacttgctggcgcgacctcggcggctcagcgcggcgcggcctggcgaggtcacagcctcggcgcgggcgtagcgtccccggcgtaggcacacggctccaacgcgagcgcgcaagcctgacgcgcggatccggcgggattgaccgacagcgacagtcggagccgccaccatggcggcgcacgacccagctagcacgcggggattcaacccggccacaaccgtcaccacgacggcgtgtggaggtgttggatccagccggtgcaggtcgacaggggccgatccgagcaacgccgacggtgagtttttcgatctgctgctactttgacttgacacgatgacgatgatgggcacaacaaatcagagggaccgtccgcgcatcctacaagggcgctgcccccggcggaggacgatcttcccgagggcggcacagcgacggcagcgcggcggtggcagcggaagacacctgttgtatctaaaccctaaactcgtgataccatgcaggaaggagagaatgcgtataatatgtgggatgtttattgcttgagccctcgagctgtttatataagagtacatggcttggagggcaaggcacctctcttagagataaggaaggctatcatgggattacaatcaatcctgaactatccatatccggtgttgcctaatactctaacaatctcaccttgaaatggaacaggctacattaaatatttaaatctgtaccaatcaaagaaataatggaaaacatcaatatatgattagtctcatatttagctctgtgttgttagtgaaagggcctccggctgaattgtccgggcggtctgagtagcattccactataggtcctgagttcgactacccgtaggagcaaatttcgtgccgaagttaaaaaatcttcttgtttgtttcacaccaaagcacaggtctaagacctagccccgatagtggtcattatcatttgggctatgataccactatgtataggtgaggcagttgttcaggggttttctcgacttgtttgagaatgtattccctttcccttcataacaatgcggttgagtttttttttttttactttgcgttattatgccagctaaatataatttcttctgatctttgatttgttcatcatcagaaaggcaagctactgtagcaatgtacaaatagttactaatgttagatctcatttttaaaattttcctgttcttgaatagttgctacacatgtgacaactattcaagaacaatagttgatgttacaatagcagagaatgaataaggcacactcatgccatttaaaacatgttcttaagtactgagggattgtaagtagttagggattgaagtttgccaaactatatacgacaatggcagattgcttgtccaccaagttgtcatggtggtgctggttgctctcaggactgtagaattaagcacagaccacttttcccagcagcaagttgtaaaaatgagttagaaactatttccagcagcatactgttgtcccagctttcacgaatatttttattataagcagcagctgcgtactggggggcacaagggtggttatttgaacaccttgttagttgttacagagaattcattagttcatgaacacacatctcattcacatgtaccagcatttctgtgtgttttcctccttggcatatcaggttccaaacttcaacagcagacacatacaatgtcaatttttcatcactgatcttatctgtcagaataactgaataaggctaacagtttggtgtactgttgattgttgatgttatgacatatttttcatgacaggctcttgctaaggaacttgtaagatcaagacgtgc

SEQ ID NO: 973 - DNA, 1565 bp, Zea mays
  Intron number 1 from transcript GRMZM5G815009_T01 (locus G RMZM5G815009) derived from phytozome v7.0 (chr-ID 3; pos 1 87224594 to 187226158 reverse strand)
gtcacctgcgaccgcgacaaccgcgtcacccgcctgtgagccgctgcctcccaactctccctcgtcctcgctcccccctttcccctgcggcccgcccccttcaataatcccttgacggggggaaacttcagtatgtgtagatgcgacctgcgacctgtttatccgatccgtggatttgtcactgagctcttgactctctggagctacaaacttgtctcgaggacatattggctgctaaatcgatggctttctaaagttagtgtgtggttggaatttggaaaaaaaaaggaatgctaactagtgaggtagagtggtagactgcataggggcttaggccatctagtatgtgttggacttcaggcttattttgcaaactgatttgtgaagttagtggagctgagctaggattgtgtgatctagattgtcctaaactgatcaggaaaaaggtcagcttgccaaatttctgtggcttgtacagctagcagcttagtgagtcagttaggggattgtggtagatgactattagtgttgtgccgccaaataacgaaggtggtggaaccttctatagaagaggctggaaatgctcaaaaggtaaagatatgttagctactatgctggaagtatggattacaaacaccaggccactagtgttggaatgatcactaccactgaaagtcaccattagggtgtgtttggtttgagggcgaagctggatgagatatgtccatcaatgggtttgggggtgagcttatccatgctttctgtttggttagatgaatgggtcgagtcatttttccgtttggttggatgggtgagagtggatgagatgagaatagttgactaattgagtaattgtatatatcatttaaaaataacaagtaaatgtacactaacattatttaaaatgacaactaaatatacactaacactaattttgtcatgataatcactaattaaacataaaaatgtcaattagcactaccactactaccctaattggcacacacaatgttcacaaatcaccatattagcacttaccaaaattaatcttaccatcataattactaagtaataatataatagatctataatctttaatttattactaatgatgaaggttagaaaacatggatgagctcgcttgacatctagagaatattcccatctcaggatatccatattcaactcgcccgtgaaccaaacaatacgtatccagtgaaatccatccaaccaaacacaccctaaatttgcattggtttcatcctctctttcagtatttcagtttggttgtggttcaactcatcttttgatatatctttctgtccactatttatattataataacttaaatgaaaactctctagggtagcagactggtcaggatttcatatttcattgaagaatttatgacaatctaagacacacacatggtctgtagaaaacctttggatttcaaacttgtattgtatgtcttccaaattttagagtagtactgttttctgattgttgcttggatatcttttataacagagatcttggtaatttgaacttatctggtcatctgg

SEQ ID NO: 974 - DNA, 4038 bp, Zea mays
  Intron number 1 from transcript GRMZM2G131431_T01 (locus G RMZM2G131431) derived from phytozome v7.0 (chr-ID 6; pos 6 3563483 to 63567520)
ctcctctgctgcaaccgcgggccctccacaaacctgtacgcccagcttccccctccctcccattcgattcgatgccgccggtcagtgatccggcgtggtgcgcttgtggtcttggggttaggcatgcggatttgggacttgggatcccacgcgcgagatctggctggtttggccgcagatcgttcgattgcggtgatgttggggttaggggtaacgatctagatttgggtagattgtctagttttagagaaatgttttcgttacgagatctcgtgccttccgttgctatcaagctgatcgaactcagtttgtaggagctgtagaggggggaaagtaaaacacccgaactttgttctagcagacctaaacttgtaatacgttagcttgtaattcgccacctaatatttaagttagcctccaagtcagcggctagttttttttgttactcacgcacagtttagttacattgctcaaagacaaatgataagaagactgctaaaaagccatgaacaaatgtcaccacagacgagcattgctggtcaatttgatgtgctcaaatgtgtcaggccattaggttcagtattgaaaggttaatgtctgctcttgtctgaaatttggtatggaaggagccttggttgaagttgcataggttaactctgagtagggagcacaatttaggcacccgtacatacgacgacatcgtgagcagcggcagtgcatgcatccaaggttttaaagtcgggtagtcgactctagtcgcttgagcatcgataaggtgactaatcgcgattagtcgttgatttgctcgattaatcgagcctagtcgactcctagtcgtccacctatatcaggaccatgtgcctagccggactgcgggattgcatgaattgtactagtgccactgccatcgttctggggctagggcaacacattctggggaaatggcttcaacattattatgttgtctcctattctcatctgcagtggcacaacaatcaagtgaagcgcaactcaagaggaggccaaggcgggcacaatactgctcaataagtgaacagagaacactgaacaaccaaaatatcaaagcaattacagtttgaagaggtgctcatctcggtctctgaattctaaacaggtgaggagtggtcgcctactcgtctgtttagccactgaacagacaacagaggaggacgggagcgcgctggaggagggtctctgcagactacagccgccgcgcgatagagggggcaaagttgctgctcaagcagagggccgccagagcacaacaggacagcgggagaggagggtgtgacgatggagaaggggtgacaacgctggagaaggggtggtggcgctggggaagggcgcccgcgagacagtgcgtttcgtattggtacaggtagaagccgagaagcgtagggcaaatcagtgtttgtgcggtgtacatgggccggtccacataatagaggtcggattagtggtccgaacaggcataattagtcgaccataacccctagtcggacgactaatcgcgattagttggcgactaggacgactaatcgctacctagtcactctagtcgagtcggagaccctaatcgagctcggactaacgataaggtcaactaatcacgattagtcgaacgactttaaaaccttgcatgcatcttgagatctagcgggggcatggggcctaaaagtgccacattataggcctgtttggttcatggctaactgtgccacactttgccaaggttagtcgttcgaattgaagaactaaccttaggcagaaaagttagccaaagtgtggcaagttaggcagcgaaccaaacatgccctatgcatgtgaagcatggatcttttaccatcgatggctcgggtaataagtgtttgctcacttataactggttttataattttttcacaagttatgtgctgctttttcatcccttgaaattggcaacaagtaacaaaatgctcctcactgcgtagatttgggggatgtggcagggatgacctgtggcctcttatatttatgtggttgctttaaatcactgtgacagttgcacttatgtgctttccaggacattatatgcccctatttcagcttcttagatatcattccaaatatactccatttgttattcctatgttctatctttgagagattttacttagggggtgtttgaatgcactataactaataggtagttcgctaaaaaaatcgatagtgaaattagctagctaactattagctaatttgctaaaagtagctaatagctgaattattagctagactgtttcgatgtctttagctaattttattagctaactattagctatagtgcattcaaacaccccctattgtcttcaggaaccatcctccaacttttatgttcctgccaggccattttttttaacagaaagcccccccccctatttcattaggaaataggaacagagtgtcaacaagacctgagcatccagtacttattgcatgacttagggcatatagccagcacaaagacagaatcaaacctatccagaaaggattctgaagaggggatcctaagcatacagctagtaaagcaaacaaactaagtcatcacaggcagtctattgccaacgtcttagcaacaccagaagaaagctaacaaaagcgaagttcagaagcagacatcacacgctgggaacagggtttcaggcgatcaacacagccagcccacgccttttatttacataaatttctgtccacaggcacccagccaaagcctcggttgaagatcactttagctattcttctgattagggagcttccttcctccagcatccttcttcttgtttttttcctggagaatggcccaagaatccaaccaaaaacaacagagaagaaagatattagcagcattcactggattaatgctgttaaaacgtcaatcattcctgattttccaaagagtccaaagaacagcactacagccaatagtgatcaaatttctatcattctttttgaaactacagagccaatccccaaacatcacacctgagttcttgggaaggattaaggatgctaggtccatttggatcactctccaggtgaaggtggctacctggcactcatgaaaaatgtgctttgtggtttccaggcagccacaccaagcacagttcacatttccttgccaatttctatttttcaaaatttctttggacaaaatcctgtcctttaaaatcagccacagaaaaacttcaatcctctgtggaattttagctttccttataaaccaatatgggattttattcaaactgtttttgtaactcttgtacatagatttcactgagaatccttcttatccaacagccaaattgttttatcttttctatccaacagacagtgagagtcacacctcattttcaaatcttccggttgctttgccccatctatctccatatagccttcttctaaaggctaaggagttgcagctagaatttaaggctaaattcacattatctctttgtttagagataattcataaagtctattgtatttaattgagaagggggtatcaccacaccaaacgtcacaccaaaaactagtggaacacccattcccaatcactttctttctattgttgcagtagacatctttaatttcaaggatacctctccaaaactgagaatccccttgtgtgttttttttccgaaaggcataaaggcttccccttcatgtattttttcgtgacaattgtttgccaaaggccatcatcattctcgagcttccacagccacttagtgagaagactgatattacctttgtgttgcatcaattttggaatactttagaaacaataagtcatgagtatactgatgttgctacagtgctggcaaaaagccacccaaacggccttttgccagccgaacagcttgtttatttgtaaccattggctaatctgtactgccgggaattatagcatattgattcaacttttgttgcttatgttgtgcaggttccatttgaccttggtgactacagctgtaattt

SEQ ID NO: 975 - DNA, 8373 bp, Zea mays
  Intron number 1 from transcript GRMZM5G859148_T01 (locus G RMZM5G859148) derived from phytozome v7.0 (chr-ID 2; pos 7 3167783 to 73176155)
atcaagaagtcaagattccaggaggcctaaaataggtaaacttgctgttatatcttttgtgctctcagtagtcgcctattacttgttttaattcactgatccatgtgcagtgtatcaatttgtcttagtatttttattcgtggggatgcctgactcaaatgaactcatgttcaacactgagcaacctacttataattttggagcctataaaatttctaagctaaaaaaggtaataaaaaggaatgatattatagtcacatcatctgaacaacagtgaagggaagggagggatagatggtctgaatgcctataaatatcgttcccttggtctgcttcttaaatttgaaaccaagatactatagtcaaatacttctaaacttgaagcctgtaaattggaatcaccaagttaaataagaacaggggtaactattcatagctcagatggttgtcatccaatacgtgcgctaaggcacagacaggtgaggttgcatattcaatcccctagacagtaaaccattgaggcatattaaaacacattttccatgagtgttggggacttgttctcaaatgctaagagttaagaacaaggcaacatagaaaatgttaatcgttaatatccttcgtcctccgaagtattatttcccttaggagataatgacttgcagacgaaggtgatgaaggtcataccttcatcaattcatcaaacaatgatgaagggtgaaatataaagaatataaaagagaacgtgaacaatcaatcatttattattattgagcataaataaagatattattattgaattacaagtgtaccttcaattggaaggaaatgatagtatgagcgtgatgtaaaaagcgaatgccaagtcagcgtgaacagttcgggggtactgttcacctatttataggcacggggtacaacccatacaaaattacatacatgccctttacatttggtgataattctatagcattctatcgaggtctaaatggccttttcatctttaagtcggtgcccttttctgcgaacatgccgaagcttttctgcttcacagcttcggcactgtgtcaaccttcgtatcttttgagcttccccctttctgatacaagtccgaagatacctgttcacacattatactccggaaacattgttaaatcatgtttttgaggaccttcggaagccgaaggcccccaacagtagcccctcgcaatattaatttgttaataaatttagattgcgacatggacgaaggctttaagccgaaggtccgaaaaaacaccttcccttgctagaatagcaacattcactgacaggcggggtctttcaattttgaacgcaccgagcgtataaatacggccataccgcaaactcattttgcacgctttctggccaaccactcccacttactcaatttttagctcctgtgcactgtgatttgctaagcttttagctttgaagcttcggctttaaaaacagttttttagtgtttccgaagatgtctgaagctgctaagaaggctgctgctgagatgaagctgagtcttgatgaggagaagaacttaggatttcttatagcgatgtcgaagaccaacacagaaaaaatcaccaatgagattctggaagggctatctgaagatactggtgacagtgaaagttatgatgtggacagtggtggcgaagactccgaagatcgcccctggcgaccaagccactcagtttatggtaaatcaactatcaaagagaatcatcttgctaacatgagaggaaggtatttccgggatttgtccgttgtgagggccgacgaaggggagaagacttgcccacaccctgaggagaatgaagtcgtagtgttccgaagctttctgaaggctgggctgcgattgcccttgagcagcttcgtcgtggaggtgctgaagatttttgaggtttatcttcaccaacttacccctgaggcgatcataaggctgaacatcttcgtgtgggccgtgcgaagccaaggtctgaagcctgatgcaaaaagtttttgcaatatgcacgaattatcatacgatacaataccttggggtaaagagcagtatcacaataactttggctgctacagttttgtttctcgatctgggtcaagctgccccgtgccaacttttcggaagaggtggcctagcggctggatgacagaatggttctatgtaaaaaatgatctgaaagcacgggaagatatcaaaggtataatcatgcgtcctatttggcaaagcttcggccttcggaggccgaaggttgaaatgaatgaagccgccgaagagttgccaaaagagccttcggcgttgtctgctcttttataggaacaagggacttaatacaagagcatatcgccttcagggtgtggccgcttgcagagaaattgggagatgccacaagaaaccattaaagaggccgacgaaggtggacttatcaggttcaagtacacttttaaatttggagataaatttattgagccagatgatgagtggttgaaaagcattgacaatttaagtgatgagctgctcgggacctactcgaaggctgaagataatgcaatgtcagcagccttcggaggccgaaaaaagaagagactgaatcgggtatttgatgccattgggtttgtttaccctgattattgctatcccattcggaggcagaagagaaaaaacacaacctctgcaaaagaagaagctgcagctgcttctagcgagccagaaccgaaaaggaaaaagataaaggttcttacgcatcgaccgcgttatattgaaccagcttcggtgcccgagtttaccgggaaaacttcttcggccgccgaagctgaaaaaccaaccaagccagccttgttgccaaagatcgcagaaacggccgaagtgccaccaaagatagaatcagaacaatcaaacattttgttgtcagaagcaaaaaagaaaaccgaagcgccgttcacagaaaaaattgaagaggtaaaagaagcaactgagggctccaaaacatcagaagttttgagtcctacagcaatcattgggacaacaaaaaatgaaaaagtgccaaccgcaactccgaaaagaaagagaatggctaatgtgttagatgtattggaaacgatcaaatcttcgagcacacctccgaagaaagctgctgttactcctgaaacaacagctgatatttctagttctacagctccagagcaagagattgaagccgaagctgggccctcagagcccgcaaaaactttggaaggtgaggcagaaaaaataacaaagccaacttttgaagaaactggtgttgttacccccgaagcatcccccaaaattcgtgattatatttttcgtcatgcttcggggaaaaaattatcagaaaaagaagaacaagaggcccagcattatgcccaaaaactgaaatatccaaagggggcgttaatatttaatggcagtggagaagaagacttcttgtattgtcttcccgacagcaaggaaatttctgtctgccgggagataagcaagagcttcggattcccgactttagaagacgggctctcagtgctttcgaagaacgatctggccgatagcctggcttacaatagcttaaaggtacgatatatgaaatctttgtatttttccgttcgtttaaacccactgacacacatttttctttttgcagggcttgatacttagcaatgctcttagagcacaaaaagatgctgaagacgaagggtgtacaatagccctgagcaaccttcgctccgaagtaattgaactgaggaacgaaggtctcgaaaaggacaaaatattatattcattgataaataaaataaaagaggacgaagctgcttctaaaattcaagctgaaactcagaaacgcgaaattgaagaccttcggaaacaactggccagagccaaggaagagcgcatacttgaagaaacgaagcgcgaactcagcgatcaatgggcagatcacctagaaataactgttgaagagcttcgttcgtccaaaaagagatgctacagtaaatctatagattgtgtcaagaaattaaaggctagcttcgccaaggtcggcgcattctcaagtgaggaaaacttttcaagaggcaatcccgaaggtgtcatcgaatggattaaccacgaagctgaagcctttgaagaaattttaaatagccgaggagatatatgtgccttctctggcgccagagggattgccactatcttagagaaggagggctgtgaacatgtaaaattttagcacagtccgaagctgctttgtcctttgaagatacaaaagatccttcggccgaagctagcataattggtggaaagttttttaccgatatctgggacaacggtggccgagaaatggccggagaaattattcgaagaagtgaaaagggcattcatgatgccagagaagtagctgaggctgctgccaagagcgcagaagccgaaggtcaattaggtactaaataatagtttttgtcgtgtcgtaatctttaggcttttaagatcttgtttgcgatttgtaatagtaatgtagccgtgtcctacttcagatccgactaaagcgccttcggacccttagccgaagggggacgacgaaattaaaaagatggccgaagatattatggatgaagtcgtcaatcggctcctgaatgaggccgcagaagtcgttttgagagaggagtaaacatttttgtgaaaaacttctgaaatataatatggtgtaacattttgtaaccccaaatgtaatatatctacttttgttactcaattctttacgatgcatgaaactttacacacgtaccgtttttgagtctttggcgaaaaaacaccttcccttcttttcatgcttcgtgaagaagaattaccatttatcacaacaatatccgaagtgttcagatgaagaatatccaagcttcgtgaaaacattctccgaagctatactccgaagatgaagattgtgtctccttgtgacaacacgattttcactcttttaaagcatacttccgaagatcaatattgtgtccccttcttgagccatatgcaacatgatgtatgatgcttatgctatgcaagatgatgtgatgatgttatgttacgtagatgacatttgttccgaaagatacacccatatccccacgcacaatatttttgtatcagcgctgattcttcgccgtaagctctgcattcccttaggaacgtctttggagcttcttcgccttttacttaggcggtataagctctgcattcccttaggaacgtctttggagcttcttcgccttttacttagactgtataagctctgcattcccttaggaacgactttggagcttcttcgccttttacttaggcggtataagctctgcattcccttaggaacgactttggagcagaaaacttacactgcgctcccttcggaacgacttttgtgacttcgtcagacttactctgcgttccttagaacgactttttgttacttcgaagaattttcgatagtccgaaggtcctttttattatcacatacctgtgaagaaaacatacttttcttgtagaaatcaacgaaactaattacatgaaacctaaacaatgtcctttattacagaaaataaaactgaatgaaaaagattgctattaaggtaggatatttgtcaatagatgtgctttgattctggcacggtgctgttgaccgtgcgagcttcggactgttccctgaagtccctttgatgtggagcatattggctcccttctggctgctggccttgttgcaacggaggtggaggcggaggctgttgccaggaagcttgaggctggctcgccgaagcagcagagactgcaggatggttgcccacgtattctgggatgtagggcgaatgatacgaagctgtatgcataacctgcttcggctgagcttgctgtgctgctgcttcagctatttccttctgcttctgtatagtgacatggcacatcctggtagtatggcctttgttctcaccgcagaataaacaaaagattcttctcggttgatcgccaaatcttcctccgaagcccctggcgcctctgcctcttggagctggtggccggaaggagctttgctgttgtccagaagcctgtgaggagcattgtggcctttgctgttggcttcctctgtcatcattttgtgtagaattgtgaattgatctcacatgcctcgggtaaaaccttcctccgaagcccctggtcatctcagaaaacctgaaagcctcctcccttctttggcgaaaatcattgtcagcccgaatgtattcatccattttctggagaagcttctccaaagtttgaggaggcttcctggcgaagtactgagctgacggacctggccgaagccccttgatcatggcctcgatgacaatttcattgggcaccgttggtgcctgtgccctcagacgcaagaaccttcggacatatgcctgaaggtattcctcgtgatcctgagtgcactggaacagagcctgagcagtaaccggcttcgtctgaaatccttgaaagctggttaacaacaaatccttcagtttctgccatgaagtgatcgttcctggccgaagggaggaataccaggtttgagcaacacttctgacagccatgacgaaagatttggccatgactgaagcattgccaccatacgaagacactgttgcttcgtagctcatcaaaaactgcttcggatctgagtggccatcaaatacagggagctgaggcggcttgtaggacgggggccatggtgtagcctgcagctcagcggacaaaggagaagcatcatcaaaaacaaaattcccatgatggaaattgtcataccaatcatcttcgttgggaaaaccctcctgatgaaggtcttgatgctgaggccttcgatgttgctcgtcctgagcaagatgacgaacttcttcagaggcttcgtctatctgcctctgcaattcagccaccctggccatcttttccttcttgcgttgaacctgctgctgaaggatttccagattttgaatctcctgatctagatcatcctctggaggtgttggactgatagccttcctcttctggcttcgtgcctctctaagagaaaggacgtcttgattggggtccagcggctgcagcgtgccagcccctggtgctgaagccttcttcggcggcatgacgaaggtgatgcttgccgaaggtgttaaaaagctcaagaaatggaagtgagttcactggaggtgggcgccaatgttggggacttgttctcaaatgctaagagttaagaacaaggcaacatagaaaatgttaatcgttaatatccttcgtcctccgaagtattatttcccttaggagataatgacttgcagacgaaggtgatgaaggtcataccttcatcaattcatcaaacaatgatgaagggtgaaatataaagaatataaaagagaacgtgaacaatcaatcatttattattattgagcataaataaagatattattattgaattacaagtgtaccttcaattggaaggaaatgatagtatgagcgtgatgtaaaaagcgaatgccaagtcagcgtgaacagttcgggggtactgttcacctatttataggcacggggtacaacccatacaaaattacatacatgccctttacatttggtgataattctatagcattctatcgaggtctaaatggccttttcatctttaagtcggtgcccttttctgcgaacatgccgaagctttcctgcttcacagcttcagcactgtgtcaaccttcgtatcttttgagcttccccctttctgatacaagtccgaagatacctgttcacacattatactccggaaacattgttaaatcatgtttttgaggaccttcggaagccgaaggcccccaacaatgaggtttcctaagtgatcctttaggtaaacagaaccatacctagctccatatgaaactatttcccgatttgaagtacacctaagttaaggttcatacattggagctctggcagtaaaacaatagtccttaccttgagacagcttagattaggatgaggtggatggtaatatggcatgagcaacataccgcagttcatgcatggaggaaatcatttttactttctttcctagccatggtagctatgttgctccttaccaaggcactacatggagcatcatatggttcatgatgtaaacatggttttagatctgtctatactcacactcaagaaccagccaaaatgtgatattccacaacctgagagaaatcaaaatgaaatcatgtacaacatagtacatatgatgatgtgcggtgatgtgggtgcatgtgtgttgtgtgtgtaggagaggagggcgcagcttgattcaatcc

SEQ ID NO: 976 - DNA, 2374 bp, Zea mays
  Intron number 2 from transcript GRMZM2G019597_T01 (locus G RMZM2G019597) derived from phytozome v7.0 (chr-ID 4; pos 2 38955726 to 238958099 reverse strand)
tcaagaataattcgattgcatttctaattgtttgggtagttttcctcccattacatatctccttgtgcttctgaaagtgcgtattgtagcatttttttcattgattttgccaaactcttaagtgtggctgtgccgctgtgggaccattttcctcctgccaatcatgcttccagcttcaactgaagaggggtagcattctgtgcattttatttacttgacgattcatttttcagttactagtttgaactgaaaacattgtattgttccccccctattccctatttaacataagactgtgttagaattttacatgctaaacattctttattatttagaaacataatacagtgttgtaattttagatgccaaacatccttaactttgtggtttcacttcaccttaatccatgttttgaccaaaacatattgtttgcagtcaatgggtggttcactaagatgagacatttgttgcgatacaactgcatgatgttttgagtcatttattcacactgttattaaagtgtcatttaaacgacgattaagcgtcgtttaagcgctagaacgcgatttgaatccaaaacgtccgaacgttttaaaaaatagtgttgaacgtctgttttggatgtttaagcatcgtgtaaacgtcctaaacgcgcgttttagacgttttagggttctacggacgttctatgtgttagtgggccttaatgggcctttccaggcttcaagcaagcctcccgccagacacgttccagattccaggcttcaagcctcccgctagccagccgccagcctgctaccgccgtcggtcgtcctcagccgcccgccaggtacgccgccggcccctctcctccctcctccggtcctccctcttccctccacccacagggaagtacgccgccgccagtgtggctgcccagtgctccagccgcacagtttttggcaagtgctccagccgcacagttcttccctccacccacaggccacacagcccattgattcaactcctgttgttcactgaccgcaaagatattcttatcaactgattggaatttccgcagcacctattgctccatttcatttggtataaagatttaaaccctttttggggggcatttagctgaagtgtggcattgtctgacagtgaatttcaatatttgaaagtctatgtcaagtctgaaaagacgtttcaacgttcgtttaaacgtttaaacgttgaaaagttggttcataacgttttaccgttttaataaccttgtttattcaacaactgtaaacctgaagcggtgatatgatcatatgagtctagttcagtaccagacttggtgttgcgtgcattgtattgggtacctgaattttttaccataccaggtctgaactaacatgttatcgttgtgtcgcttctgatgcatgatatttccctccatttgttaactgtgcatatcctttagtattttttgcagtgtctgatctcccaagggaactccttatttttgttcaaaaaatcttgatctatattgtcttcatgcaatgacttttgtctctgttcatcttatcagtttagcttttgttcagtaattattgacaggctggaaattctgcctagatatatgtatgcacatgagtaatttatccttgttgaacgatgagatgaaggataggattgtgttctgacagatgtattcaagtatcatctggacctgcacgctattcttggctagaattcagccaccaataggctttggtcaatggttgtgtttcagcctaaactggtggggcgggttggggtgggttcgttgattatatttttaggtgggtgcgttggcaaaagatgtttgcaagcgatgagttggggtgagccatgggtttgaccccattatcagggctatgtagcacagaagatagtgctgctagaaaatcttgttggcaatccctgcaaagttgagtggccacacattctttgatggtatccatgggtttaccaaccagaaatttaccaatggtatatgcatcttttactgaaatggtttgttaacatacagcaattcgataaggttcttgagccatgtcttttgcctgagctgtatctgaaaagaaaagacttgccactagaaaaatgtctattgttttaatacaaaatcttatatagtgaccaaagtggtgtctaactgtgaagacatgtatgatctgttgattatcaatatttgtttggtattttctactcaaaaaaagctgttcaggatgttcctttaacatttaatgtgatattaatagctgtgtccgcttccgctattacatatatttgtatttctatcctttaattgcttagccccctcttaacttcgtttcatgatccaccattgtttgttaggctg

SEQ ID NO: 977 - DNA, 7289 bp, Zea mays; identical to SEQ ID NO: 653
  Intron number 8 from transcript GRMZM2G004475_T01 (locus G RMZM2G004475) derived from phytozome v7.0 (chr-ID 7; pos 9 8408673 to 98415961 reverse strand)

SEQ ID NO: 978 - DNA, 5636 bp, Zea mays
  Intron number 7 from transcript GRMZM2G086489_T02 (locus G RMZM2G086489) derived from phytozome v7.0 (chr-ID 2; pos 4 627034 to 4632669)
atttcactgcgtacaaaagctacaatgatatatataatctgctgtgcattcctttgcctcggtagaatccaccatgtggattgttgatacaaagtagtgtggtggactgaatggtagtgtcgcttgttgccacaaaaaagcaaatccatgcttgttctaatttgcagtgttgataggtcagctttgagccctttttttgccttggtgatggatgaggtcacaagggatgtacaagggataacctttttttcctcgaacacgcaggagacgtgcacatcattaaattaaaaaaatagaacaaaaggtcaaaaatggattttctttttgcggacgatgtagtgctagttgatgaaagccgatcaggagtaagtagtaaactagagttgcaccaggagattctagagtctaaagtattagactcagtagaactaaaaccgatatgtgagatgtgacttcggcactactacgcatgaggaaaggagatgttagtttggaaggtcaaatagaccttttgggatttaggatcaatcgatgatttcaagtcgcctagtcgcctggtcgaaccctgggaccgaccaggcgactagtcgcgattaggcgacgactagggcgactagtcggtcctagtcggtccctggtcgtcctagactagtagctatacttatataggtatatatataaatatacatgtatacattatataaattagaacaaacaactaggataaggggaaaggacgcagccacagccggttggagactgcagcaggctgcagaactccaggagaaggggcagggacacatggtgctgtagccgccgcccgccggtgtagccgtcggcaatcaaagtccaggactgcaggggcgtgcaagagactgttggcggctaggttagattaggagaggagaggagacgtgcagtgactgtagatgggctaaaaaaggcccaataactaaaccctagccgggacgaccaggacacataagtcggacgactagtcgccctagtcgatgattagtcggacgactaggttgtctagtcgagtcgttcagcaaatcatgtactaattaccgaccaggctgactaatcgcgattagtcggacgacttgaaatcattgggatcaatgttacaaagagacggggatattaatgaagatgttagccatagaatcaaatcactgtggatgaagtggcgtcaagcatctggctttctatgtgacaagagggtaccacaagagctaaaaggcaagttttaggacgacggttagacttgctatgttgtatggtgcaaaatgttgaactacaaaagatgatatgctcaatagataattgttactggaatgtgtatgttgcattggatttgtggccatacaagggatcaagtttagaacgatgatatacatgaaaggcaaggggtagcaccaattgaagaaaagcttgtccaacaccggttgagatggtttgaacatgtgcaacggagacctccggagacactagtgtgtagtgggattttaaggcgcgatgtcaatgggaagatagacacggaaaagaccaaagttgacataggaagagacagtaaaaggagatttgaaaggatgcaatatacctaatgatttagcctcgaatgggggtgcatgaaaaacaactatccatgtgtctgaaccttgacttgtggtttttgttgggtttcaactctagcctacaccaacatgcttaggactaaggctccctttggttgggcttttgaacttgcttttgcttttgcaaacgccaaaatccaaccaaaggggtggaaagaaacaattgctttgggtcaattgcttcttttactctggtaaaaaattgaaagtagctccctccgcttttacctgttgtgaaggtgagcaacttcaaaaaattacctagttcccatgaacacctagcaggtaaagcccttggggcctcacgtaccccggggcacctaacgaataaaggcccctaggtccctcataccctggggcacctagcgggtaaacccccagtgcccttgccccctggggccacctaatggtacaagctctcagaagtccttgcgcctcggggtacgtgttagctcaggctcctggggtcccacatatagggacctagaggaccaaaggacctttcccagggagatatggtcttggcaaccccatcgagttgccacaaggctaaaaggcgtcaagtgcccattagggtcacacagaacaaaggtgtgggcctaaccctaggaaagtaaaaaggagtgcatgagagcaatgacctagcgttaagtctaaggtacatcacattgaatgcacgataggtcatattatagggctggtaaggcatgcgaagatacatcacaacctgcataacacttgagggctctaaaccagacactccatggtcctataacatcagtaatatgcgtacacactacttggaagtttgataaagctgaaagaacaacaccgtaacctattgggattgggtgacatggctagtggctacgacacaaaggtttgtggcatagatattaaacgcgtgagacaggcatggcgggttgtctaccaaaggatgactccgacaacattgtattaaatgtggagatacacacatgccaccaccttgacttgcacaacggacgcaatgccgctacacagataaactagaatatatcgcggtatgagagcttgaaaccctcgcctgtgggaaggttgagaggatccacctcaataggacagaacggtatgaggggtcacactcatggtaaggggtactggaagcattaatacataagagtagatcagtatgattacatggccccattaagatgctccatgaagatcctctaatgtgatatgtgtagttagccctatgacaggctagggccacaaaattgaaggtagttcatccaagccaagagtgatagaaagcggatagctcagatttagttctttactcctcagagaggatctcctctacctcacttaaagcttgaaatcttgtacattgttttcatataaagactctccactagaaagatgacatatgatattacacttcaagcaacccaaacctccgtaaaaacccccatgtcacccttgtcattactgtgctagtaatgtcatgatctgataggcaaactctacaacatcaggattcactcgaattgattctacattggtaccttgcgtaccctggtgttgttatctcgacaacactattctagcttatagattaaatatatgccttaaatctatagcagtgagtatatccatgtttaattctgcaaaaactttacatgaccatttgaactacgaaagcattttgtctttctgtacagaaataaaaatgttgtaatttattatgtttgttatgttctattatgttagaaatgatcagctgctactgctgcagtacaggagcaatagcagctccacgcctccaccatgtcatatcctgtctatctagtgacagcagttggcagtagtggtagtgtatgattgtatggcctggtagttggtagtagtagatagtgatctgactttgatagatggagtagaagggcaagctgcatgttagagcctctccaatacttgaaaaaaataatccgtaaatcaatcattttccaatttgctaagaaaagtagggaacatatttgttgtctttccttaaccatttccaatatcttgcttctaaaagctagaaggaaattttgcatcaggaatcccagacttcccaaatgagttccagccacttctatactttctttctctcttgtacatttgctttgggaaccttgtcttttctccttattcttccccatgttgttccacctccagattggtgaattggatacacgcctgtatctttcctcatgattgggcgattttctcaagtgcagaaagattgggagttcagattctgagtttttggagagatctttttcaatcttgccaaaaaaagatgaacaaagcaagtgttacttagaagaggaaaggcaaatgcaaatagggaaggagaatgcacatgaggcacaatatttgtttgccggagttcggttccacaaagaaaccaatgtctctgttgaggggttaacatagaactagatctctgtcaaccctttcctcgctcaagcgatcaccaagatcgaacttgagtccctttcttttctcaaatggtgagagcaaactcacacaagtcactccacacaaagttggaggctcttgattgctttaaaactttgggagcagcaactccacacactttgatcacaagaattctctccttcctcagaatcacaacacaacttaagtgctattgcaactcttttgctattctagctctcaaaagatgtctattctaagcacataactcaatttggagcacttgaacgatttggatggctaggagatgatccctttacttctatttgatgtttcttagctcatggatggagttgtgcccggttggggtggtatgtataggctccccactcaaatattgccgtttgaaccccactcagatttctgcgcgttcattggacatgtctggtgtcgccttagaggtgaccattggataaagatgtcaaatcgtttagtgtgtcaaggttcacctgacatgtccggtatgccaccggacatgccacgtcagatagctgttgaagccttcacgcagtcgactgttgagcattgtacactcggtgccgaattcagtgtgccacttgactggtctggcgccttctgtccaacttggtccaaaatatagcctctttggttggttcggtgtgtcatctggtgcaacaccagactcgtcgggtaccctatatttgacacgtccattttgcaaccttctctaagtaccgtatttggtggggtgtttggtgcgccatcggatacgttcggtgtcctctgcttctcgaagtccaaattcagcctttctgcaagccatatccggtgtgcaatccggtgcaccgtcggatacgtccgttgttctctggctgttctaagttgtttctttgacttcctttgcttgcgcttgttttgtattgtctcttggacttttgtatgacctttccaaatattcagtaagtcccttaagtcctttgcatgacacttatcttctgaatctctttgcacatttgtccaagtctatgctgcatctttttaattctacaatcaatcacttagctgagttgttagtccaattagttgtactggtcatcaaacaccaaactaatatagaaatagtctgaggtccatttcccttacaggagtgggttttggacttttggcaactcttggaaatgctcttagttcggtaatgtcattttgcactgtgtttgggtgtgaggtgtattctgttctcccccttatctcccgtgcgcgtgagcgcgcgctgtcattggtggtggcttacctgattccttaagtcgatcaacatattagttctgtagtgcatgatgtttattctgtttttttgtctgattctaatccatccattggtatattctaaatgccaggttgctgttttgtatttgtaatgtttttggtattgctgcctgagtgagaaccatatattccttattgttttctgtaggaaagaactagtgtggccagaattagatcaattgc

SEQ ID NO: 979 - DNA, 5788 bp, Zea mays
  Intron number 1 from transcript GRMZM2G177263_T01 (locus G RMZM2G177263) derived from phytozome v7.0 (chr-ID 2; pos 1 0876507 to 10882294 reverse strand)
cgtcaggcgagcggggcgcacggacgctgcgaccggtaagttacctcggttttcattcgggggtcagcgggtctgcagctccgtccggcggccgggggcggttctagggttagattgtgacgacccgtggccacgacgcgcctacgccggacgtgagccgagcagtggatcgccggtgagcgtgtcggcgatggcgaggaagacgctggatcagccggagggctgctaggtttgtggttttctattccagatggtagatagtgttcaccgttcggcgtcccggctctcagtctctgtttcctccagtccggctgcttcctccagtccggcagtgtctgccgtgacatctcccccggcctcaggtgttgcttggccccaagcaactgcttcaggaaagcgatgcttcaacaccgtgtagtcttctcatgtggtggcagcagggtcgagattcttccacctgatgagcacctggacgattgccttgtgtcccttttttaccatgcgacgatcgagcacctgaaggggttcagtcccttggaccgacagatctgttagagtggggagctcagtaaacacaggagtatagtttggagtaaatggtttcaactgagagacgtggaagactggatgaatttgagaagttgctggaagatctagtttgtaagcaactgcgcctagtttctgaagaactgaaaatggcccatagtaacggtatgcaagcttgggacaaatacgcttggccactgtgtgctgagtgtatgattggagcttgagcagaacttgatccccaacttggaactgacggtcgatccggtgtttgtcggcctgaattttcatacggttgcgagccactgcgagatgctgtttgagtctgtcagtctgcacttccctgtcccacagaaaatcttcagctgttgggtctggtttggccgcagacgctggaagaaaagagcagtctggatcatagccatagattgccttgaatggggagcatcctaaggatgtatggaaggatgtattataccagaattcggctaacgccaaccatcgtttccatttctttggagtttcagcaactgcacagcggagatacatctcgaggcattggtttactctctcgctctggccatcggtttgagggtggtaggctgtgctgaggagtagcttagtgttgaaccgagtgaacaagtgttgccagaggttgcttgtaaagatccggtctcaatctgaaacaatcgttttcggaaggccatgtaacttaatcacctgatccagcaattcctgggccacttgcaaggcagagaatgggtgtttcaagggtatgaattatgaaatgagccatcttcgagaatcggtcgaccaccactaaaatagtgttgaacccatcagaagaaggcaaaccctcgatgaaatccatggcaatatcatgccacacagtggtaggtgttggcaagggttgtagcaaacccgtggggtgtgatttctctgtcttggcctgctggcaagttgtgcactgttggatgtagtccactacatcttgtttaagccctttccagtagaagaattttttgattctgtggtatgttgccaaagtacctgagtggccttcaatagcactatcgtggaaggaggagagcagtctggttcgaagggctgaattgtgtcctatccagacttggttgtggcgcttgatcaatccttgctgcaaggaatacccttggtcatcaggactacagattgccaatttgagtaacagtgcctgtgctgctgggtcagtggcataggagttgattacttcctgaatccaactcggtatgatctcagtgacagtagtggcgagagaagagtgccccctgcgagaaagggcatccgctgccctattttccttgcctttcttgtactgaattttgtagttgaggcccatgagtttggtcatggctttgcgttggaggtccgactgaagctcttgctgctcaaggaaactgagagctttgtggtctgttcgaatagtgaatggtgttctttggagatacggacgccaacggtccactgccatcatgagagctaggaactctttctcgtatatagatagatgcttattttgttctcccaaagccttgctcaaatatgccactggtttgccctgttgcatgaggactgccccgagacctccatcactggcatctgtttccacctcgaatggcaggtcaaacctgggaagtgtgagcactggagtagttgtcatagcagtcttgaggttttgaaatgctgtttgggctgccgcagtccagtgaaattgtttctgtcgcaacagattggtgaggggtttggcgagcagtccatagtgttgcacaaatcgcctgtaataccccgtgagacccaggaatcctcgaagctcagtgaaattggttggaaccggccattgtaacatagccaccactttggaggggtctgttgccactccagcatccgtgatgatgtgccccaagtaactcagttcagatttggcaaacttgcatttggactgcttgagaaagaactgatggtcccggagtgcagtaaggactaatctgaggtgggagatgtgatcagccaaggtagcactatacaccaaaatatcatcgatgaaaaccatagcgaactttcttagataaggagctaggatcgagttcatagtgcactgaaaggtagctggcgcgttggtgaggccgaatggcatgacaagaaactcatagtggccgtggtgagttttgaaagcggttttatattcatcccctggtttcatacggatttggtggtagccagcagtcatgtccagggaagaaaagaaggtggcaccagctagctcatcaaggatctcgtcaacaagtggcatagggaatcgattttttatagtgagggcatttaattttcggtaatagacacaaaatctccatgtgccatctttcttttgcacaaggaggattggggaggcaaagggactcatactgggaacaattagaccggtgtctaagaggtgttgaacttgtttctctatttcagttttgtggagaggtgaatatctatagggcctggtgttgacaggaatggctccggggagaaggggaatggaatggtcatatactctatgtggaggtaaaactgaggggatagcaaaaaggttttggaagtcaaggaggaggtgagagatctcaggaggtaccacctctggagtagtggaagtagtgtgatcgagtaagacacatgaccaaatatcattggtgttgaataactggtgaagttgaggccctgaaatttcagtgagtgcacatgcttgaggcactgtctcaccttgcaattgtaccatcaccccttgatccacaaattgcaacagcttctgatcccaattgcaatgcatgggactgtgactagtgagccaatcaaagcctaagatagcatcatatggtcctaggttcaggactctcatctgtgcgaaaaatatgtccactagccttccattcgactgccttgaccatagcatcagaaatgactgtgtctcctgtggcaactgtgacttgcactggaggacatggaatagcacatcagccagccttggtcaccaccgccaagtttataaaacatgtcgagctaccggaatcaacaaggatcagaatgatcatattgttcagtgtggctcggatcttgatgctgcctgaagagtcatgtcgactgatgacattcagagacaggtgacataaataatcttgggcctcatcctctttctgcagctgctccaacactgagtcagacaattccatgctcaaatcttcagtggagagaacgtgtaattgggctgcgtttcgtttggcacacttggcaagatgccctggctcaaacctttcaccacaggcataacagagaccatgcaacctgcggtattcccgaacctgtcgctctttggacaagtcagaaggaagattcactggaattgcatcagggcgagcagtagaggcagatggtttggactgaaagaagcctttcgtcccccgggctctagctttgtccaggttggtctggtgcagttcagctaggatcatggctcggttcactgaagatggtagagctgtctgcactaacccttgtagctcaaatttaaggcctctgatgtactgctccacaaagaagacttcatcaatctctgaattgtgtatagccactctataacggacctcttcaaattctttggtgtactccaataaggagtgctgttgccgtaggccgagcagctgtcgcatggcttgggggtaagactcagctccaaatttgttcatgactgattcagtgaagccctcccaagactcaataccatgcttgattttgtggacttggtaccaacgggcagcattctctttcatgtgtaacgaggcagaaacgacccaaatgtcctgtgggattctgtatatactaaagtaagtgagacagtgatcaatccataccaccgggtcacgacccacaaactcgggaaactgcatcttgggaagcgaaggtggtggtgggtcatgccgaagaccagttcttcctcttcttggtcgctgggggcgtcttggggaatttgaaaggtgaagactttctgtcctgggggtaaaagaagcatcttgatggtgcatccgacggtgatggggatgatggtcaccctgtgatccctgatcagagtcaagctgtgctgccagtcgctcgagccgcatctgcgctaccaccttgccggtctcttcaatctgccgagacatcaacaacctctctctggcggcttcttgtgcaactccagcggcaagatcagcttgtgccatgagttgctgctgaactccatccatcgttaacatccgttgttccaaagaatccaacttttgaaaaacccgatcccatcgcgtctcctccctctgcgaatccgatgccatagcgtgaaggatcagctgagtttggagcgagggtttacctggtggagccgtggcggatgatcgagggtggtctcgtcgtggccgtgacgagacgtggttgaagacgctgctgccgcggcgaaagcttgcaacttgagtcggggaaaaaaaattcccgccttcctgacgccgagtcgacgatccaacccggctgaggaagcccaggctcttgataccaactgtgacgacccgtggccacgacgcgcctacgccggacgtgagccgagcagtggatcgccggtgagcgtgtcggcgatggcgaggaagacgctggatcagccggagggctgccaggtttgtggttttctattccagatggtagatagtgttcaccgttcggcgtcctggcttataagcctgactagacaaccctgatacatgggtcctacacacccagaatgcgtttccgcttacaagaatacgcaagcttacagaatacggttcagctcagtctctgtttcctccagtccggctgcttcctccagtccggcagtgtctgccgtgacatagatgtctggagcgttccggtactgtgatttggcaagttgcgtagcacggccggtgtttcgttcctggccgagcgcagcagaagtggtgccgtgagcgctaaggagcaagcagatgggatgggaagacggaaatatcgaaatagagaagtatccgatgtcaagtcctttaccgaaatagagaactatttgttgtcaaatccttgataaacaaccaatcgtcaggcaaataattatcttggccttgttaaaaacaccagagcatacttgttcatctgccttttgcttttgagcatgtcgtttttgtag

SEQ ID NO: 980 - DNA, 5115 bp, Zea mays
  Intron number 1 from transcript GRMZM2G047028_T01 (locus G RMZM2G047028) derived from phytozome v7.0 (chr-ID 3; pos 1 88319981 to 188325095 reverse strand)
gcaacggcgccagggtcatcctcaccagccatctggtaagcctcgattactatcgtgatatgcacgcatatgtctcccatatgagtgtacatcaaactcaaatcggttcgatacttctatcaaatctatagaactgaataactgatgcatatattagctgtggattcagatgtagtaacaagtctgaatgactgatacatatattagctgtggattcagacgtagtaaagccgcattggcacttgtgttagtaggtgcttgagttgtggactggtggccatttaagttatgttgagtgacatcctctttggtgatttagataacacgcgcataattttttgaaaacttttacttagactaaccatattccttagcattcttctgtaattcgtttttctatcttctaaaataattgaacctgcacaatcgaatttaccaagagatgtactccctccatctcaaattaaaattcgtttttcccttttagtagattcatataataattaatgtatctgttctatatacgtgtctagattcgttatcatctatatgaatatagacatacaaatttagaactaaaactactactattttgaaacagcaggagtagttaactctacatcatggaagctagtgttcgagtttacatgtcccggatctggcataatatttcaactttcaagtgacgaggtgatgtggattatgtagggatagtaattctttgtcgggggaactagaagttctgaatgatctgcacttgtatttgctgctggtgaaacttttactagacaacatttatcacaacgcaaggttcatgtggagggtgtccctagggttaaacttttgtgaatgacatttagggctagtttggcaacaagaggataaaaaatctagggaagcattccaccaaagggattctaaatggcactttaattccctaggaggattttccccacgagtatactttcccaccaccgtttggcaaccaagtggctaaatacccctcttgagtaaaaaacgctttaaaatcagaaaaaatcaaagaaaataagaaatatttagacaaattagaaacacaatgaaatctcactaaaaatccaagaaaactgcactagatataattcacgcaaagtataagttcaaatagctagcatacgttcaaatagctagcatacggacagcaggtaaccaattaccatctgtcccgaattggtagccaaattcacttctgaaccttcaagccaaaaccgtaatcaccattctttcaaccaatagttttcataacataaacaaatattttcagaaccaaaatagtacataatgaccatacataagactttagttttcatgacagaataaaatagaaacgtaagctacaaagataagtaggtaagagatggctttggtcttcatgtcaatgtgataatttcagtcttctcgacagtgctttcagtctcctactctcctggaccccggtcttcacggtagcaggaaatgcagcatgcacaagacagggaaacataaccaaggagatcatccattttccttttccgtgtcagcttcatatgttgcttccactcagcactctgcaagtaccaagtaacaccaatgtaatggcttggagatatataatctagttggttgtccagccatccttcatcaccattttgccctctaattatgttgtgaaatgtaatggctgcagctgcgatcttgatttgattttctatgggatggaatgtgtctacttttagaattgggaaccttttcttaagaacaccaatggccctctctatatggttgcggagaattgcatggcgatgattgaataactctttgtagtttgcataaccactttgtgatgaacgactcctcctaaattgactgagatggtatcgaacacctctgtatggtgcaatgtatgatggtgtatttgcatacccaccatctacaagataaaactttccttctggcacactaaatcttttgctaatagcagatcgaagcacccctgcgtctgatgccgacccttcccatccacacgagacaaatgtaaaattgagatcaaagtcgcagactaccataacattgtgtgaaagagttccttttctatttctatatggaggggccctatcttctgcgatagtgatggatacatgtgtgccgtcaatggcaccaaggcaattctgcattaaaggaacaaatatgaaaatatgttgaggacatgtggcaattagcataggataattgtgtgtttgcagttgtagctcacctgaaaaaagggcatgaacctagaatctgttgcaatcctagcatgagtttgaactgagctaggaagcttcacaaatcgttgagttagtatgggaactatctcaaaaacttcagatatttttcgatggatagtctctccactgtgttgaaaagccttttgtagcatttggttactggcgttgtgggagatcatatacatgaacatcccaagttgcttctcaacactaactcctcgtgtgtcacgtagtaaattctcccttctaagaaaatttgacgtggctttgaatatttccttttccattctaaactcagatttgcaccagctctcatgcccttcaagaatttctttaacctttttagcaccggtgagggaggatgtgtggatgggtcttttctcttccgagaggtatgggattatagcagggagaataacaaagaatagttcatcatcatcttcctcctcctccaacaaaaattgcctaacattctcctcccaagaacccattatctagaaacataaattttaatcatggacttatatagatgtgctacctatcaatataacatataaaactgatgcaaattaaggaaacaaattggaacaaaatatagtcgtgacaatgtgaaatatagacttcagattaatggtcgtggggagtcgggggtggtgtggggggcaatataatgccggcaaggagatccaggacgaggagcatatatatggatatgaaatgtctgtaagcaggggtgctactcaaaagctcgaagcagcagcttccaagaagtgaattgaaatctggttgggtgtattggggcgggcaggcagcaggcagtttgatcacgagcagacactgacaggatggcgacgacctctagtctagctccatgtgacaatgtgcgacctgtgctcagtgtcgtccgaaaggcaccgcgctcgctcgctccaactgcaatgccgccgtcggccgcccgtcgcttttggtagcgcctgtgatcgcttttggtagcgcccgtcactccaactgcaactgcaacggcgtgatcgataggaggcgagacaagtctagatctggtagggttcgacgcacctgtgatctgtcaggttgtgatctgtcagggtctgaggctgctagcgcccaggtccttcgccgcccaaagcacgaccacctccttccaactcgtgttcgtcgcgcgtcccagaaatcactggcggagggggcagcgacggagatcgcacagcgccgccattcgcgagaagagaagacgagacgaggccagagggatagtggcccgacgtcaagaggccgggcgtctttccacgcgtaagttggactcgaggcgggctgagttccccacggagccgccttccaaacaagccaaaaatcaagcccgtggaatcttgtcacgtgggctgctggcccagggaaaatgctgggttcccgacggggaaacgggctgcgaaaccagcccttatgggtcggttggatcccttcattttgaaggaattgaaatttacttaataaactaattaatagagtaggttatttagtttggaatttgatgttccaccgctttcccaagttcaggtgtgaaaattgattttatgtatcactagtttatgtttctattctgcaacttataatatgttactcggctcgctcccggtaatagaaatgtagcatataaatatctcacacatatgatcaacaatagtatacaaataaattctatataaaattatattaacttaattgatctatgcctaaattaggattattattttctcgttctttgttttccccactgtggatgtgcagggtcgccctaagggtgttactcccaagtttagcttggctccccttgtaccaaggttgtctgaatttctaggtatacaggtaccttttgctttcacaatgatacaaatatcaaaattagagctcatctattgctttatttatgttgagtatatcgtgtgcacatgcacaaataggtgataaaggcagatgatgttgttggaccagaagttgagaaattggtgtctgcattgccaaatggtaatgttgtgctccttgaaaatgttagattctacaaggaggaagagaagaatgacccagagtttgcaaagaagcttgcctctttagcagatctttatgtgaacgatgcctttggaactgctcacagagcacatgcgtcaactgagggagttaccaagttcttgaagccctcagactagctccaacaatgagctctaaagggtcctgtaccctaaatttagaggatgaagacgtcctctacccctccagcagcgtcctctaaacggtcctctaaatttagaggacgctgctggatcctctatgtatagagttcctctaaacggttctctatctatttgaatactttaaacaaccgttttagtaaaactaaaatatgtacaatacatttgagagtatgacaaacacgtatgtacaaaaatttaaaaataaaaatgtctttaatatatgtatttacatataggggacgtgatttagaggacgttgttggagaggaaataaatatagggggtagaatcttttagagaagactgtaaaggacgaatatagaggatgtatatagaggacgttgctggagacagtctcagtcgcagggttccttttgcagaaggtttgtgtattttatgtcaatatatgaatcctaaccatgaaaagtttaaagagcaaatgctattatttccttttattttcctgtatttctcttacatgcacaggtttgtctcttcagtttcctgatcttctacacaaaataaaaatagcaggagcttgattaccttgtaggagctgtttcaaa

SEQ ID NO: 981 - DNA, 3533 bp, Zea mays
  Intron number 1 from transcript GRMZM2G084014_T01 (locus G RMZM2G084014) derived from phytozome v7.0 (chr-ID 7; pos 1 32590984 to 132594516)
caggtgaggagctgatcgagtcacgtcgctccattaactaataataatactaccatttcactgctagcgctatagctggtagctgctgctgcccttcttcttcttgcaacttgcaccgtgcattattatttccccctcgcttttcttttcttttttacttgaaaactaacaaatctgctggtttggttttctcaaacgctggcaattcgactcccaaaccgaatttttctctcgggtcattacctcatctcgttggtaatcagtaaccagctgtgtttcattattgccttctttaaataaatttacccagagacctttctttctcgtctgattgaggacgacgaaccgaataattttggggttgctatatagtttcttcggcaacccacacaaagagggaacgtagatgtcgtcgatcccaataattggaactactagctagttacctaccaccgaatgatgtggcacgcagtagcttagctaggctaacaagcagcaagtaaatcaaagtttctacagtcgccaacaagccggctgtgaaatgaacacgacggacgaaacacacaaacagctcggttgctgcaaatagtccccggccggttcctttgtcggggagaaacgctgaacaatacgcgcgcgtctcatcactggcatccgctgctatgttctaactgtcctttcctttaacgcgcgtgtgctctattgaaggctatagattcattctacgaattaaaatttggcagtgagtacaaatagctagcatatatgtgttctccgtgtgcatacgatcaatatctgagatacgaacgactatgagatagatatagaaagccagatagggtagtacatagaaaatctcaaagtgtgatatacatgctaaaatacattttttttacccgtgtagattgtattcgtgctagtgtaacaatgatcgacctgatcttgttagaattttacgatggtagacacacatatacataccaaaatacatatatatttctagatccaaaggtttggccacgcagttcttctctctttctttatttcttctgtctgactgaagtagcatatatagatgggcatcgtgtgtgtgttttgtggtttcgtttggacaaacgacaagaaccacgaagcagcagcaaactgttctctcctcgccaatggccgctgccctttttggtctactaggtagcttctcctgtaaaagagagagcaaggtagcaacaggccaggtgattataatccggatcggaacgaagtagctcgtcgctagatacatatatacacgtgctcctgtctggtccgtctgaacggcggaaggcctgctgctgggcggccgcagttgccgcctttccgtgtgattgaacaagaccgaccagccatggccaggagaagccatgcatgcatgcggcttttgagcttttcccgggacggacgggaggccggccttcgccttttcccgggagttgtggtctctttcctttgggaatgcatgcatgcatggagatggagcccgcgcgctgtggagatccatgtgaagatctgtctccctcagtgtttgcagatctgggtctaatttcatttgggcatgacatgcatgtagcttggtcatcagattcagatgcatgtatggtgtgcctgcctgtctgcctgcctgtctggctggccacggaaagagatgagcatgcatatcgcatatgcatgagtgcagcagctaagtagcttgcatatattggtcatcaggtagtgcgtgtgtctggtcgatccgtgtggaaattgctgctgcctgcctgcctgatcagcttctgcgtgtagtaggccatggccgctactttcttttgtctacacagcctagcctctctctctgagccacaaccacactggcctgatgcatgcatatgcatgatccatctcccagaacatccatcaccactaactactgatctatacatacctttcctcatcttaatcttcatctccacataggatgaatggtcgggcacgagtcacgagtatgcttgaggacgacaaaaactccagctagtctctgattgagcattgacttgggattcctccctgtccctggcaggtgcctcgctcgctccttcacggctcccgagaactgcaagagatgtgcagtgttcttgctgtagcttagctatgccgtcctgcccacgctcgctgcgcgcgcgcgcggacgcaaccgcgcacgtacactgcacggtacagcacacacgctgacacgcacggacgccacccccccccccccccctctgatctccctcctccgaaagaaacaacgcgaacacatgagccatatacactccatagcaagctagtctctggaagctagctagataatagccctctcgctttcaaaagcttgcatgcatgctgcgagtcctcttgctctccggccccatgcatgcggcctctgatccggtttcaccgctggactgacatggtgcaaagtaaagaagcctgagacaacactgtttacaggagccagtcttctctgatcaacattaagcaacaatgcgtatgtcaaggagatcgcatgcatatgcataatgcatgtatagttgtatgcctcccgaaataaacaaccgccttcaaatcttagcttgctgcatgcatgttactactaccacaccactggttcctctatatgaatttagagggtgtttgatttgaggaatcacttcatccaatatgaggtggtgcatcataagttcattcttaaaattggttgggatgatcctattattcatgttggtagtaactaactaactatgtgaaataaggtggtgatggattaactaatttcattccacgaaccaaacaaaaaagtgaggagtgaaaagataatggactagcttattccctcaaaccaaacaccctactagttccccgtgctaaaaaaacatatagttttagttttaccttcagtcaaactatccaaaactcaactaagtttataaatcaatatcagtctttaatgaatctaatgactgatatttgatattataaattaatactgatatttattgtgtaaataaatttggttaaaaactcaataatgtttgttatggtactaacctgaaattatatgctcttatcgagaaagtaatagatcaatgaacagtactcaagtgtagtaacagtagcagtaatagctaatgttaccttctcatgcatgcatgaatgcatataatcacatgaatgaacactgccctacctgatattattgcagcatatgatcatgtgcgcgctatgttcgctcaaaagaaaaacatgtacgctaatccccagtacgtatgtagctatagctcccaagcatgcatactcatattaggacactgcatgcacatagtacgagtattattcgttcgcgctgtttcctagcagcttgtgcttttcgatcgcaccgcacgacgcacgtacatatatatgtgcatacgtctcgatctgttgcgtacgtgtgtgtgtgggtgattgattaaactggatgcatgcatatgtctgcgatgcag

SEQ ID NO: 982 - DNA, 19247 bp, Zea mays
  Intron number 1 from transcript GRMZM2G001454_T01 (locus G RMZM2G001454) derived from phytozome v7.0 (chr-ID 9; pos 5 0162352 to 50181598 reverse strand)
aaatagactgcttataccattctgaggtactaatttttttaatgaattccttccgtgccattctgcaatgaagtgcagcatttagtgcaatttcaatgttgcctgttggtcacttgttcaagtaaatgttacttatattttactgcaaagatggaagatgttgaagccacaaaatgccattggtaaatgtcatccgaggtcagatgatgatgcaaatctttattaatcatgaaatgtcattaagacaatatcacacacttaggcaatgtagttctttcctcatgtagatcactgtaccagctttctttactagttttgtcactgcagttagggatgaaaccagatcggttacagacggataccagtgatcctgcattttgtcccatatcccatatgttttctcagatctcaaaactggatatggagcattcggatattgatacctatctcatatcaaggttttaaattcggctagtcaactctagtcgcctgagcaccgataagttgattaatcgcgtttagttgtcgattcactcgattagtcgagcctagtcgactcctagtcatcctatagttgtccacctataacaagaccatatgtgtgtgtgtgtgtatagctgtagcaggacaacaatactgtcggggaccataattaggggtacccccaagactccttatctcagctggtaaccccatcagcacaaagctgcaaaggcctgatgggtgcgattaagtcaaggctcggtccactcaagggacacgatctcgcctcgcccgagcccagcctcgggcaagggcggccgaccccggaggattcacgactcgcccgagggccccctcaagcaacggacacaccttcggctcgcccgaggcccagtcttcgccaaaaagcaaccttggcccgatcgccacgccgaccgaccgtatcgcaggagcatttaatgcaaaggtggcctgacaccttatcctgacgcgcgcccttcagtcgacagagccgaagtgaccgtagtcacttcgccgctccactgaccggcctgacaagaggacagcgccgcctgcgccgctccgactgctgtgccactcgacagagtgaggctgacagcagccaagtccggcctcaggcgccataggaaactccgcatcgcccgaccccagggctcggactcaggctcagccccggaagacgacgaactccgcttcgcccgaccccagggctcggactcgggctcagccccggaagacgacgaactccgcatcgcccgaccccagggctcggactcgggctcagccccggaagacgacgaactccgcatcgcccgaccccagggctcggactcgggctcagcctcggaagacgacgaactccgcatcgcccgaccccagggctcagactcgggctcagccccggaagacgacgaactccgcatcgcccgaccccagggctcggactcgggctcagccctggaagacgacgaactccgcatcgcccgaccccagggctcggactcgggctcagccccagaagacgacgaactccgcatcgcccgtccgtggggctcggactcgggctcagccccagaagacgacgaactcagcttcgcccgaccccagggctcggactcagccctggcctcagccgacggtctccgcctcgcccgacccaggggctcggactcgacctcggccttggaagacagactcgacctcgacctcggaggagcctccacctcgcccaacccagggctcggaccgaccacgtcacaggaggcgccatcattaccctaccccaagctaactcaggctacggggaacaagaccggcgtcccatctggctcgccccgataaacaagtaatgatggcgccccgcatgctctatgacgacggcggctctcagcccccttacggaagcaaggggacgtcagcaaggactcgacagccccaacagctgtccttccgccaggctccagcgctcctccgacggccacgacaccacacgaaccgggtgccaaaacctctccggctgccacgatggcatgtacttagggcactagctctcctccgctagacacgttagcacactgctacaccccccattgtacacctggatcctttccttacgcctataaaaggaaggtccagggccctcttatagagggtgggccgcgcggggaaggacgggacggcgctcgcgtaaggccgctcgctccctcccgcgtggacgcttgtaacaccctactgcaagcgcacccgacctgggcgcgggacaaacacgaaggccgcgggtttccccttttacgcctgtctccctccgtcttcttccccccttcgcgctccatctcgcgccgacccatctgggctggggcacgcggcgacaattttctcgtcggtccagggacccccgggttcgaaacgccgacaaatacactatatcgcagataagcagatctattgacaatatcacaatataactacacaagcatgttttcactaaaagtaaaaggtaaagatcacttaccttggattatacaacaacacactgatttcaactctaggaattattagaatgccaaacctgtaggctactgtcagtgactacaacaggaggtcaggactttaggagcatatgtagagggtcgtcggagtatagcagggcgacatgagaggagggcggtgcgatggagaaggggcgacagcgttggagaaagggcggcgacgctggagaagggtgcacgcacgactgtgagctgcgtaatgcgtgtaccgtattggtacaggtacgacaaaacagtgtttgtgctgtacagatggtgggttggcccatgtaacaaagaccggattagtggcccaaaataggcataactagtcgcttattacctctagtcggacgactaatcgcgattagtcagcgactagtgataggaaagtaatccttgattgttgccagtttacttattctgttttagtaaataactaatatggtagtagtccagtcctatatggacatgtctggtcggtaggatcaaggctgatagcagtctagtttatttccttgtaatggttagtttgtttccatgtaatgttctataaatatatggccttagaggctaagaaaaggcagtcaatagggcgccaccaaaaccacttgttctgtctctgagtttccagagagcgcgcgtgtgtgtgagactaacctaggaggtaggagctcgctagcaacctgcttaaggttgtctctctgtcgtggtttctaacaattggtatcaaagccaaggggtgccaagatgtcatcagggaagactgttgacatcagtgcgacatttaataagtccagcgacgacacctccaaagacggagcagtggtccaacgagtaatccgtgaggtgagtacagggtgtggatatcccacactcaccaagaccaattactcggactgggcgctcctgatgaaggtgaagctgagggcgaggatgctgtgggacgtcatcgagcatagaggagcagacattcatgaagaaatgatggcactcgacgctctctgcagcgtggtgccaccagagatgttgtcttcgatcgctgataagcttacgacaaaggaggcgtggaagaccattgcagacctgcgtgtcggcgatgatcgcatgaagaagactgttgccatgctacttcagaggaagtttgacttggcgacgttcaacgacggttggtccatcgaagatttcacgctgcgcctaaatggcatggcagcggaactctccacccttggagctggcgttgaagagaagatcatggagaagattgctcgcagcgttccgtcgcggttcaagcaaatcgtcctctccatcaccactctgctcgatctgtcaaccttctctatctctaacatggttgggagacgcctttgaggaggccccaggatcactgcattacattggtcgactctacctcacggaagaagagtggaatgcccgacgcaagaaggaagtcgggcaccaccctgacagcagttccggtggaggatcagggcaccgtggtggagggtatcgtggccgaggagggcgctcaccaggtgggccaccgtctagaaaggccaccagtgatgagtgtagaaggtgtggtaagatgggacactgggcgcgcgagtgtccatcaaagcacaagaaggagcaagcacatgctgtccaagaagaagaggaggctacacttcttgtcgcaagaacgttcccggtaaaatcctccttagaacttcaatcatgctgcaagatgtctggttctcatctagagatcagggagaaggtgtttctgcagcgtgaagaagaggagaaactggaggagggaacctggatcttggacactggagccacaaaccatatgtctggatccagggctgtattcactaatcttgacacaaaagtgctgggcactgtccgatttggtgacaatttggtggctcggattgagggacgaggaaccatcaagttcatgtgcaagaatggcgagacccggtcatttgttggcgcttatttcattccccgattgacaacgaacatcattagtattaggcaacttgatgaagcgaagtacaagatccatgttgatgatggggtgatgcatattcaggaacctgatggaagattactggcaagaatagtgcgggttgaaaacaggctgtatcttctccatttgaagatacaacggcctgtgtgcctagaagtgcgtggtcgtgaagatgaagtagcctggcggtggcatgagaggtttggccatgtcaatatggctgcactacgaaaactggagaaggaagaattggttcaaggcttgcccaagctcggacaggttgaaagagtgtgcgaggcctgccaggcaggcaagcagaagcacacctccttctcggcacatgcgaatactgggtgaagcagcgcttggatttggtgcatggtgatctgtgtggtcccattacaccaatgacaccaataggtaataaatacttcttgctgttggtggatgatctgagcagatacatgtggatggctgccatctcatcaaaggaccaagctgttgatgccgtgaaaagaattcagatgcaagttgaaggagagtctggactcaagctgaagacactccgaactgatcgaggtggagagttcacctcggatgagttcgcggagtattgtgcggctggtgatgttcaccgacaacacactgcgccgtacagtcctcaacagaatggcgtagtggagcgctggaatgggactgttgtagcaacaacgagtatgctcaaggcgaagaaactccctggttggttttggggagaggtggtaaaaatagctgtgtatgttttgaacaggtgcccaaccaagagtgtagatgtgatgactccatttgaggcgtggcacgacaagaagccggcagtgcaccacctcaagacgttcggctgcatcgtctacgtccgcaacgccgtacctcatctgaagaagctggaggatcaaggaaggaagatgatcttcatcggctatgaagaaggcacgaaggcgtaccacgcctacgaccccatcaccgagcgcgtccatgtttcaagggacgccatcttcgatgagcaggcccagtgggtctgcgaaacccacggcgacaccatctcagccaatgaagaccatgatgtgtttacaatggaatatgccatcaagaagcaaacacatcctgaggaagaagaaacagttgaggaatctagagatgagcaagccgctgggcaatctgaagatgagcaatctgctgggggtctgtcccctctgacccctcatgttgatgcagggcatgtatcggaagaggagaatgagatgcagggagtggagtttgcttaaccaccggagggaaatattgatgaatatctagatgcctatcgagcagaagatgatccactcaggttccgcaagattgatggactacttgaatccacaactccacccggttatgcaacaaggaggctgctagatgaggagttacatgcagtaagtgctgatgaaccagtctcctttggtgaagcagaaaggagtccgagctggaggaaagcagtcatggaggagatgaaatcaattgaagataaccagacctggacacttgcatatctcctctagggcgcaaggcaatcggtctcaaatgggtatataaggtgaaaagggatgagcaaggtgcagtatccaaacacaaggcacgactggtagtaaagggatatgcacaacaacatggtattgactatgatgaggtatttgctctagtagccaggcttgattcagtgaggttgcttattgcacttgcatcacatgagggttgggtgggaagtgcatcatatggacgtgaaatcaacattcttaaatggtgaattgggtgaagaagtataggtgtagcagccatcaggctttgtggtcactggcaaagagcacaaggtgctcaaactgaggaaggcactatatgggctacaccaagcacctcgagcctggattgaaaagtctcttggcttcaggaagagcagttcagagcttgctatttatctcaggagaaacatcaaatcacagttggtggttggagtgtatgtggatgatttgataatcactggaaccaattgtgaggacatcaatctattcaagaaagagatggcagctgttttcaagatgacagacctgggattactgaagtattatctgggcattgaagtaaggcagaacaaggagggaatatctctcatccaaggagcctacgcagcacaaattctggagaggaatggtatgaaagaatgcaacccgtgtcagactcccattgagacacggttgaagctgagcaaactaagtactgaacccctggtggatgccactatataccgaagcgtagtaggaagtttgaggtacttggtcaacactcgacctgaccttgcttttgctgtgggttatgtcaaccagtttctagaagaaccacacaaagatcacatgatggctgtaaagcacatcctgaggtacgtgaaggggaccaagaattggggtctgcggttttgcaggaagagaagaaaggaggttgggctgattgggtacagtgatagtgattatgctgggatgatgatggcaggaagaacacgactggagtaatcttcttcctgaacaatagtccagttacttggacataaatgaagcaaaaggtggtggctcagtcaacctgtgaagcagaatacatagctgctgccaatgcagcttgtcaggcattatggctagcaagggtactggcaggggtacaaggagtatcaaggaaagctccaatgttcaaggtggacaacaaatcaggcattgctctcatcaagaacccagtgctacatggtcagagcaagcatatagaagtaaagtatcattttgtccgggagtgtgctaataatgggcaggtcaaggtggatttcatcagaagcgaagaacagttgggggacttcctgacgaagccgcttgggaagaccaagtttcaagagttgcgctctaaggtcggtctggtggatgtagacagattgcaccacaaggcttaggaggagattgataggaaagtaatccttgattggtgccagtttacttattttgttttaggaaatagctaatatggtagtagtccagtgctatatggacaggtctggtcggcaggatcagggctgatagcagtctggtttatttccttgtaatggttagtttgtttccatgtaatggtctataaatatatagccttagaggctaataaaatatatagcaatctggtttattgcgaaggtgctgagatccttccttgatgagctcgcttgctgggttctagctggagccaagcagctggggagcattggtttggctgaccgggtttctgctctgtagacgtcgggtcctgcgtggcaggtctccctgtcctggtgtgttctttagaagtgtgtgtgtgtgtgttcgggtgtatgtttgtgttctgtatttttgccctttgtgggtgtttttcttctctctaatatataaagatgcgcagtcctcctgcgcattcaagaaaaaaagaggctaagtaatggcagtcaatagggcgccaccaaaaccacctgtgttctgtctctgagattccagagagcgtgtgtgtgagactaacctgggaggtaggagctcgtcggcaacctgctgaaggttgtctctccagcgtggtttctaacaactagggcgactaatcgtttcctagtcgagtcggagaccctaatcgagctcgctctagtgataaggccaactaatcgtgattagttggacgactttaaaaccttgtctcatatacatataaaaatatgattttgagtagttggatttggatgcgataggatattatttttttgtattctgatacttactacccatataggccttgtccctttcggggtggacagatatcgggaaatatccgtcctattttcatccctactgcagtccactaaggcagtgcttttagccttttactaattcatgcctggttttcttgcaatctatcaataaccttgcaactgcccctctgttctactatccgtgcatggacctagggacactagtaccaaaaaggaaatcagtataaggtggccatccatagttccatacccctacccctattatatgtaatgtaataactaggtgagttccctgcgtgttgctgcaaaatttaaggtaaattgtgtaaggagaggctgtacaaatcttgcatacttctattgtgtattttttgtatgaaggaaaggtaaggattgtcatagccattctaacaattaaattgagtgaaattatataattggtaccaatataaacccacctggctatccgataaacacaaaataagacatgtgatgaacaattcaaacaagttttcattgtcaccatgactttaattcaggtacttcagtcccttgtaggattatctatgcatcttataattgcatgtttattcttcttcttaggataaggaaaatctaagtgttggctgcatatttctatcactttatctcgcatcaaatttgaaccccttgctgcctacccagagtgcaaggtgtgccccatgcataagcaattactgattatttctactgattactgatagggatgaaaacgggacggatacagccggatacagggtcattccgtatcctaccctaacgtatttctctcggatacggaaccggatacgagtagttaagattcgggacggatacaggacaggaccgggtaataatccgggcgggtaagaaacggataacagatactactcgggtaggtaccggataattgtcgggtagttcgttccgatgatattaattgtccaaccacccaacaaatacataaattaagcaatacataatcatgtatatgatagatcaaatgtaggaaagtaaacccataaaattgacatcatgcagttcaaagttactaattacaaggacattgtagaaccaacaccgcaatattaaaaattcataaaatattctagtttcactcaaaaattggaaataagttacaaaaacaaataaacattttatatgaagataaagacctcgtatgaaaatgataaagtaaagtactgattatgttgaaacttggatacttatagtgattttacatgtaactcatacaaataagtgaacatgaaatggaagaaacgcgggcatcttatagttcttatgatccaaacattttttatggttatataggaacatatgttgtgcctccgtaaagtttcatgattttttgagactttatacattattaatttcttgtcgtagaaaatcatcaaaatacaattaaatccatcaaataacgtagtgttcatggtgatcttgatgaaacattacttccttgtgttcatggtgatcatggtgatcttgatgtgatatcagtatgtgcaatgaggtgttcatggtgatcccctccctgttaatgaggtgttcatggtgatcttgatgaaacattacttccttgtgttggttcacaaacatcaaagaagtgactaaagccaatgtagagacactgatatcaacttcaaatgtatattgcttcaaatttcaaaaagaccccatcaaccagatccgagacctacaaatatttgaccaagacctagacatatagagcacctctaatgtcttccacccatccacaattgttgagggcctgagcagtcatcgtagcctttattatccatttagaaccaaattgtgcaggttggggcaagctcagtagtcttgtagccagcgatctttctaggattttatagattctccaaggcccaatatacaaacaacagcgacgctagaaaggactcgggtattttacggaaattggataggtaatcccatcgaaggtcgtggattgtctgttttcttagcccacatccacctgatacacggagccccgttcaaagtttcgagcatatgtacccaacccactgtactgcaaagggtgttgaaccttttcccaataaactagacaatttccaccacacctttccaaagaaactctcttcacttatcaattgctttaaacacccattttggcaaaaaccaaagcaatcaagtgatggatactagtgtttatcaacatggtacttgccatgattaatcttccagccctgttcatgagtgaagacttccaacctggaagttgaccagcgatcttattcactagtggcaatagattggactttgtaggttagtattgtgagcggtagaccaatgtaagtgcaagggaaacctttcacagcaagacaaccccaacaccagaggctcacacatgagtggggttagagaagggataaaccgaggcaaacctttctcccgcaaatatggagatgatgttatgaacccgcgacctggtgagcgatagaccaatgtaagtgcaagggaaacctttcatagcaaggcagacccaataccggaggttcccacatgagtggggtttggagaaaggataaaccgaggcaaacctttctcctgcaaatatggagatgcttttatgaacttgtgacctggtgtctcagtgagataactttcactgttgttgtcatgtgggggtgcacgtacaggcgccgtcgtgacgtgcgtcgcgccacagaacgcgctgcgcgcgcgcaggaggaggaggccaccgcaagtggacaagtatggaaagagagattagtttctattcttagtccttaagtctaggagagttgggttggaaagagattagtttctatccttattccttaagtctaggagagattggttaaggcccttggccatatattcctgtaaccagagattgagaagttaaacaagatcattatcctaatttcccgtctctctcttctccaacaagccgacgacagaagggcacaacctcgccggcgacgacggaccgtggctacgaactacgtagtcaagggccggctaccctaagtcttgacatccttgacaacctggtatcggatacccggtgttcctcgtcttcaaccgctccaccgccgcaacatccccccaccactgtgccaccactcagcccaccccgctcgccaccatcagccactacgtcgatccctttagccatgtctgaaccgaccaccgccgatcttgccatgatgatcgagaccttggccacgactgtggcgtccctatagacgaccatggccaatctccagacggagaaatctgcttcctcatcgggcggccttggggtccacaatgggtagcaccaccatgatcgcccaccaaggttccagaagatggattttccccgctatcacgggaaaaccgatcctctgatcttcatcaatcgctgtgagtcgtatttccatcagcatcgaatcatggagaaggtatggatggcctcctacaacttggaggagggcgcgcagatgtggtacgccatggtccagagggacgaaggcaccctgtcctggcactccttcaaggagctgttgaacctgcgttgtgggccaccactgcgctttgccctgctggtcgaattggctgaatgccgcgcacgggcatggttgccgagtatcaagatcgtttccatgcgctcatccctcgtgctggtacgcttgaagaggcgtagaaggtccagctgttcaccggtggtcttcaaccgccgctcaacatcgacgtccggatccaaaacccctagtcccatgagcttggttcgctagttcgaactgctagagcagtacaccgcccggccgctagagcgctaccacaccctctgctgtcgactccggtcgcccgactggctctgctcgtgccgctgggtgccaaagcgcctactcccgcgacaatcaccgtcgagggccaccccatcaaacgcctcacctaggcggaacaagaagagtgtcaccgtcaagggctctgttacaattgtgatgaaaattcaccgggggccacaaccgtgtgtgcaagtggctgtttctcctcgagggttttgaggaggaagatggggcgaacacggagaccgctggggacatgggacttgaggacgtgcccgtgttctctttccggaccctagccggggtcgctttcaccgacacgatgcaactggaggtcgggctcggatccggatccctcgtctccttgttggactccggcaacacccacaacttcatctcggaggtcgctgcccttcggaccggactgcctcctacaacaccaaccacgcctcacggctatggtcgccaacggcgaatgtgtcgcatgcgtcgaagtcatccgtgacgcaccgttgaccattggtggcgtctcattccccgctgatctctccgtcatgcccttggcgggatacaatgtcgtcctgggcacccggtggctcgtcgtgcttggcccgatcgtgtcggatttcagcaaccgctcggtctccttcacataccagggcctcgctttctgctggcaaggactagcgagccctcgtgcgccagccgtgagcacgaccacagctagcagctcgcttctcgaggagctcttggcggatttcgacgatgtctttggcgagccgcacggcgtggccccatcgcgcaaccgtgaccacaacatcaccttggtgctggggcgccatcgatggctgttcgatcgtacgaatacccactttagacaaggacgaattggtgggtcaatgtgcgtccatgctggaccaggggattattcgacgcaacagctaggggagttctcgtccccggtcctcctcgtcgactaccgcgcgctgaacaccatcaccatcaaggacgcctttcccattccggtgtggacgctgtcgcctacctcagccacaccatatccacggccggtgtggccatagattcggctaaagtccaaaccatccaggactggcctcaaccgcactcgacgcgggcgttgcgcggcttccttgtcctggcgggatactcgtccacaactacgacaccattgctgctcctctcgcagctcttttgaaggaggggttcacctggaacgacgatgcatcaacggtttttagtgccctaaaagaggcggtgacgttggcccagtactggcactgtcggacttcgccaagccattcgttgtcgagtgcgacgcgtggacctatggcttcgacatggtgctggttcaggaaggccatcccatcgctttctttagcaggccggtggcgctgcaccatcgctcgctcgccgcatatgagcgggggctcattggtcttgtccaggtcgtatgacattggcgaccgtacttgtgggggtggcgcttcaccgtcaagacggaccactacaacctgaagtacctgctcgaccaacgacttgccacgatcccgcaacaccattaggtcggcaagctgttgggcttcgacttcactgttgaatacaagtctaggtcgaccaacatcgtggctgacgccctctcctgccgtgacatggaggagactgccttactggctatttcgtcacctcgcttcgacttcatcagccgccttcgtcatgtgcaggccactgatccggcactggtggccatccacgatgaggttcgtgcgggtacacgcaccgcgccttggacagtagtcgatgacatggtcacctacagggggcgtctctacatcccacccacctcaccgctgttgcaagagatcatggaggttgtccatgaggatgggcacgagggtgtccatcgcacgcttcatcgcctccgtcgcgactttcattttcccaacatgcgtcgtttggtgtaggaattcgtgcggtcgtgccctacttgtcagcggtacaagtcggagcatctacacccagtggggctgctgatgccgctactcgtgccgtcggcgccatggttattaaagcggtaaaacgttaaaacgttatggaccaactttttaacttttaaatgtttaaacgaatgttgaaacgtcttttcagacttgacatagaaattcaaatatagaataagttcatacataagttgagttcacaaaccaaatagcataaaaagatcatcctggatcatttgactttggccttcgtgactcatctttgagtgggtcataggagtcatttgcctcactatttgttgccattgaaattcactgtgagcaatatggttgcacaatcagtactcaccaatatggttgagcaaatagagcttgaatgattgattcactgttgggcaatatggttgcacaaaatcagtactcaccaatatggtcttttgtgggcgcagtgccatagttcgtggagggctgagggcagtctgctgtggtcttcaggctgaggagagcagcggctgccggctgggctgctgtgggcgcggctgggctaccatgggcgcgagagagcagcggctggctgcctggcaaagaggagagcggcggctggctgaggagaggagagtagagctgcggccggcgcagaagaggagggcgacgaccggctatggctgaggagaggagagaggagagcagagttgcggctggctgagggagtgagggcgccccgtccagcgctggcagtgcccaggaaagtgacctagaaaatgttaaaggcccagggcgagtagaacgtctaaaacgccctaaaacgctatttggatgcttaaacgtcgtttaaacactcgaaacggacgttctacgccctaaacctaaaacgttctgacgttccaacttttaaacacgttttctcgtttaaacgatgtttaaatgacgttttaataacaatggtcggtggtctgggtcgacatagtggaagcgctacccagggtgaacgtgaagacatccattctctccgtcgttgactggttcagcaagtactgccacttcattcccctcgctcatctgtacacggtggagtcggtggcgcaggccttcttcgctcacattgttcgcctccatggcgttccacaattcatcgtctccgaccgagacccaatgttcacttcgacattctggcgcgagctcatgtggcttatgggcaccaagctgcacatgacatcggctttccatccacagtagggatggcaacggacgggtataataaatacccgcccttgacggtacctagggctggaaaataagctcgaggctcgcgagcccgctcgagctcgaagcggctcagctcggctcggagcggctccactgcagcctgccttttgggctcgttcccgtagcgagccgagccgagccgagccgctcttcaggctcggagccggctccgactgtgtcaaattacttaatatgtaaactaatgatggatattgcctaattttatagattgtcagtttgttccttagcgtttcatgataaatatatgacaattaataatttagattcctcataataatgaatgatatctatatatttcatatttatatactaataattcactatataatgcaattatataatatcacagggtgtggctcgcgagccgggccgcgccgcttcgagtcgagccgagcctggttcctcagctcgtgaaatggccgtgcgacccgagctcggtcagccaccgagctgcaccgagccgagctcagctctctttccagccctaaccgtacccgcgggtaaaaactgtacccgtgccgtactcgtcgggtatcgggtacccgcgggtacatatatattatatatctaaaaataatacggaaaaatttcccaaaaatataatcataaccaacaaaaattctagaaaacttattcgtacatggattatgcgtcaacacatgtatacagaacataatatgagaacactttaagtcttcatgatacatgctcactagtttttcagtttttacggatatccacgggtaacccgcgggcggcaaaaaatatctgtacccgacccgattttatcacgggtcgggtacgagcaagacccgcgggtacaaattcgtacccgaactcgagggtaaaattgccatccctaatccacagtcggacgaccagatggaggccgccaaccgggtcatcagggtgtacctgcgctgcttcaccggagatcgtcctcgccagtggctgcgctggttgtcgtgggccgagtacgcctacaacagtgcgtaccagacctcactccggacacgccgttctgtgtggtttatggctgtgaccctccttccatccactcttatgggccaggggagatgcgggtggccgccgtcgcccaggacatggaggctcgctcgcgaggccttcctagctgatgtacgccacctggagcaggcacaggtgtcccataagctccgctacgaccgtcagcatcgtcaggtctcttatcaggtgggcggttgggcacttcttcgactccggcagcgcaccacgtcctccctacctaggatgacccagctgaagccccgatttgtgggaccctagcgcgtcgtcgagatcatcaacgatgtcactgtttcgcttggaactacccctggggcccgacttcatgatgtgttccatgttggcgtgctcaagaagttcatcgacgcacctctggcctcgccccaaccctggctgccatccacaacgacacagttattccagagccactgcgtgtcgagcaagcttggttggcgtgtggggttcgtcaggtacttgtccactggcgcggcgagccgacgcagtctgcttcgtaagaggacctcgacgagttccgcatcaagtaccccgactttcagctcgaggacgatctaggtctccagggggagatatcatgtgggggtgcacgtacatgcgcccccgtgacgtgcatcgtgccacaaaatgtgctgctcgcgtgcaggaggaggccaccacgagtggataagtttggaaagcgagattagtttctattcttagtccttaagtctaggagagtttggttggaaagagagtttggtttctatccttattccttaagtctaggagagattggttaaaacccttggccatatattcctgtaaccagagattgagaagttaagcaagatcattattctaatctcccgtctctgtcttctccaacaagtcgacggcagaggggcaaaaccttgccggcgacgacagaccgtggctacgaactacgtagtcaagggctcggtaccctaggtcctgatgtctttgacagttgcaccaggcctgcctttctctgaacattggagctgagaagtaaatccttctctgaacattgaatgggtgtcactgaactttttgtcttcatcttatgacctgaggcatgaccacaaatttgtagcaccaacatgatagtacggtgatcaacgctcaaggccgaaggaacactacttcatcatttgcatagaaagagaccctatgcttggctccttggacagcatgtggttgcagcagattcatttcaacagcatagttcactagggaattaagaacatccatataaacaacatcggggacaaaggatctccttgatgaagtctggagatgagatatagatcccccagggtctgcattcaaaataatctacttcgagtaggtagataatagcagacatgagattcctccatcgccaaccaaaacccaaatgttgtaatacttccaacaagaatgataaaaaaactgggttagaagttttagaaatgtctaacttcaggaggatgtgtggcttctttttgtggagactcctagccatttattagacaaataagaagttatcatgaatatttcttcctcacacaaaagcactttgatttgtagatatcaaagtggacaacgactactttgcaatcagcccttatgtacaagcgagcttcatagtctgttagatcgtgatctaatcatagatataactggtttgttaggggttttcttataaatctacgtgggctggtggtgggagggtttaagtgtaaaatgtgacatggttggatcaggccatgaggctcatttgcacgcttgtacataaggtctaattgcacaatagtatggcaacgaaggaactaattgataggccaagatttttcgtcaccaacttcgcaaagctatacacaaggctactctgtctgtagttaacttgcatggcatccacctttttgggtaacagagttatgaaagctctgttgaggagtttatatctgaaaacatgaccaaactcactagctgaaagagcctgtagcacatcaccttttataatgtcgcaacaagacctataaaaatggcctgggaaacccatcggccctggggctttctccaatgacatgcctttggtaagttgcccgtgcttcctcttccaagaatggctcatcattggacgcaagaccatgttgctgtatatggagggcagcaatgtctattgtgtagtctgtcttcagtcgaacctagcagattatatacaaatccagaacagcatcctgtttatcctcttgagatgtgacaatctgatcaatctgaagtttagctgcaaaagtctccttggggattcctagattgactgagcaatgaaatcttctacatgtatgaatcttattctcaaacagtaacaaacaattcattatttgtgatgtcattgaggcatcctttgctgtcttctcatttttgtgtgtgaacaattatatgttaagatgttcaatcatttcttcgatggggttattaagcattgtactgcatgttctactgcaaattagtagaccatattgtcaaacttacaaatgttcatcagaatatatccttcacttttttcctataaacaattatggtgttcatatcaatgaaaggtactattgtacaacaggttattgttggcaacaggag

SEQ ID NO: 983 - DNA, 1674 bp, Zea mays
  Intron number 1 from transcript GRMZM2G071021_T01 (locus G RMZM2G071021) derived from phytozome v7.0 (chr-ID 3; pos 2 21687379 to 221689052)
cttcatcgacggcaagttcgtcgacgccgtctccggtacgtacacacgcccgcctccctagctagctagctccggcggcatgcagcactcttgctagtgaatcacgtcacgggcgggcggccgggctcacggcctgccgcggccatatatgtacggctaggttcactggtgcagaatccgatggctccaatcttggctgctccgatggagcgcatgaaggacaagacaagttgcctcgatcgctcgctagctagcttcgcatgtggcttcgctgttgggaccgcgtgtgtgttgtggtaaatcagtaaccaagtactagtagtacacagagctagctgacacccatcagctttgcgtactcgtgttttcgtctgctcgcggggacagtagcttcacgggctactactagctaccttcgtcctactagatcttatgtttatttcttttgcctagatttagattagattaaagacttacagtggtttcttatagaattaagaccgcaagctagctagctggaaccttgtatcatcccatgaacatccgacgacgacgacactcgacagtgaccacccgtcgtccttctcctcgattcaatcgatcgggcaagcagaccaccgatcgagaggccgtcgaaatccaaacggcacaagcaagcagattgtgctagcaaagcatcagtgtcctgtactgtggcctcgctcgtcgcgggccggtctttaatctagctggctagtatttccccgtttatttttagttgtcgctggatagttcaattttacactatccagcaacaactaaaacgaaacggagggagtatatggggcctgtttggttcagctttttctgaccagcttttctgaaaatctggctgtggagagaatctggctgtggagagaatctgagtatcattacgattacgtgcggaggaagataaagttgttcatagggctcaggatctagaaagtgatggattcctactattacaacgactcaaccaattatgtgtttatgttgattttggatggtttttgtcccaacgaattttatagaagctggctgaaaagctgagcgtttggtattccgcgcaaactatcgacgaccacacacgcggacgatgacatggctgcctcaagaaggttgttacccgcaccgggacctgccaacctatttctgttgaacatttcagtccaacagagtcaaacttgtttccgtcccattttatgtcagtggtaattagtttagtagctaatggatggatggatgtctgcgtccgtcgtcctcagccacccagacgtatgtatgtgtagaagccgccatgcttgtgcagactgcagttgcatatcccgatcggccaacagcctcgatcacctgatgagtggctctcggtgccattcccctcccagggccaggagtctcctcgctcaatgagttgcaaagtgcgccaccactaactgcgcactaattaattaacagcacaagtctgtctagacgccgacgcaggaagcgacagtcgtgggctgtcaacttggcgccacgcactgtccatcacttagcttgttgtctgcatccgcgtgcttgtgattggatgagttgattattgcatgatttggttatcgtcattgattgattcgggcaggcaagacgttcgagacccgggaccctcgcaccggc

SEQ ID NO: 984 - DNA, 23510 bp, Zea mays
  Intron number 4 from transcript GRMZM2G024411_T01 (locus G RMZM2G024411) derived from phytozome v7.0 (chr-ID 9; pos 1 46482733 to 146506242 reverse strand)
agaatctctacaataaacttcaacaagaaaaacaggtttgtcttttagcatatgtatctgtcggtgttttgggtccgaccgcacacccggggttgcccctcaaggtgtttttaggagtaggacggtgccaacgactgtagcaaaatggttcgtgccggtcgcacgagggacagtggacaagatttgcaggttcgggccgcttagaggtgcgtaacaccctacgtcctggtgagtatatgagcgtggttacaagagggttctctggatagaggacgcagagagtttatgtgggtggctaagtagaacagggtcgatcgttctgaaggggtgccccctaggccttatatactcgaccgtggggcagtacacgtgagtatgataacaacaagtagctaaaagatagtgaacctcttgagtttatccctacgtaacccttgccgacttatcctcgcatggctccgttgcatgggggcttcagcgcgggaaagtcaggtctctgttgcgattcattcgttcgacgttgtgggccgtctgggtttgcactaatcagtctcacgtcttcttttctttgttggttgtctttccctaggcccacgaaagaatgaccttacgaattattgggcccttgggcctttcgtgaggccttttacttcttagtggacccaggggatatctatcccccacaagcccccgatctttgggttgatttagaggtaatcaactcaaagatccaaggtccaaaaaatgacttcttgctgtcttctctagctctgatcactcgttcgaccaaagtttggttttgtgcttgtgccttagaggttggcattttggattgtaagactctggacttcattgggtgcaccggaggtgcacccaatgggtgtagcccccgacctttgagtagattttagaagataatctattcgaaggtcttcttcccaaggttatctccattcgcgctcctgcatctcggttgaggatcggtcttttcaatcttgctctacgccttagaagtcggcgctatatcggcttagaataatactccatggggtgcaccggaggtgcacccaatgggtgtagcccccgaccttcaaatggattttttaaggataatccattcgaaggtcttcctttcgcttgtggaaactggcatgaagctattttgcattatgctttggaggtcagcattatgtcatcaatattttgctgcaaaggtcagcgtatattttgtctttagcagccgagtttgcaatccatccatatcttgctaggtagtgcaatttatttgcttctgcgattgattggacgtttgacgaacgttttctgtctagtcttcacgtcgcttctgtcggccatatcttgtactttgctggctatatttggctttcctctgatccttactgatatctcatttttgtcttgaggcattcactgcatgctctgcacggatgtgtccgttttgaaaaatatactgataattcctgggcgtcccccccaatgggtgtgggcaagggacggcttggtacactgagtgttttagccggttgcctctgagtagtaatgcgatgggacggctagtgtaatcatatcctttgcgctgttgattacagtcccaatgggtgtagtgttgcatgaaacggcatccgccgtctgacgtgtcttcagatgggtggaagtgcttattgaatgccttgcgactgttcagtgaccgcggttagaagtgagcggttgcctttcccttctataaataacccctttgcttctctggtttctttacatctcttcgctgctccttactgccttcttttcctcccctctgtccgcttccaccatgggcaagaacaacaagcgcaagcgcgagccgactcctccatcggaggatttcggtgactcggaatactcggaggaggagttttcctccgagtccgaggggtctccggctcccgtctctcccccggcgtcgtccgatgactcggacgactcccaggggatagccgcggaggtctggacgtacatccgggccgtcgagcgctccgggctcgagggctcggatgagtcggagtactcctcggatgaggaggactcggacggcggcgacgaggatgaggacgacgacgacgacgacgacgacggcgacggcgacggcagcggcagtggcaggggcggcggcgacggcagcaggggcagcaccaagggcgacagcagcaaaggcagcaccaagggcggcagtagcaggggcagggccagtggctagatgccactggtcttcttagatgttagtatagtttagtatagctagaataatgtagtagtaattagtgtagtttagtagtagtagtaatgtagagtagaagtagggaagtaccaactcgtgaagagttggtttgtaaactcgttaacttccctttaacgaagaactgtcgttgatccccccttttcgatgacttgtcgttgcttttcctgaatgttgaactgattcttttgatatagtagaaacaacgccgagcgatgtggaggttgacatcagcgttttagaagtaactccaagcaatcgaacacaagacccgcgttttagaggtaatgccgaatgatagaaggccggcatcggcattttagaagcaatgccgagcgacagaatacggggtcggcgttttagaaacaacgccgagtgattgaaggtcggcgtcggcatttttagaagtaatgccgagcgattgaacacgtggtcggcgtgttagaggacacgccgagtgattgaaggtcggcgtcggcattttagaagtaatgccgagcgattgaacacgcggtcggcgtgttagaggacacgccgagtgattgaaggtcgacgtcggcattttagaagtaatgccgagcgattgaacacgtggtcggcgtgttagaggacacgccgagtgattgaaggtcgacgtcggcattttagaagtaatgccgagcgattgaacacgtggtcggcgttttagaggcaacgccgagtgattgaaggtcggcgtcggcattttagaaataatgccgagcgattgaacacatggtcggcgttttagaggcaacgccgagtgatagccagcttttcaagttactttgaggaaaataaccgaatgatgaggtggcacgtcggctttcttggaaataactgtcggatatccacgtggcatgctgggatttcggagatgaccgccgggtgatgactgggcgctttttttgaaagggtatctggctcaagaatatcccttaagagtcgcgcttttagccgcctttgctttccgtgccctagttcttgcatttccgcatctgaatcttctctgccactcgcctcctactctgtttcgccagtgagaagcaagatggcgcccaaaagaaaaactgtgaactcgtctgctgcagtgatccccgcaatcgaccccaacagccagttacccttcgcaggtaaccacatgtctgtaatttctgaagctgagcttctccgccttgtctccatcggggttcttcctccgcgggaactctgttcttggcgggtttgccacgggactactgtcccaaccgaagatacccacgagtcagtagtttacactcctttccttcttcgcggcctcggccttcccatatctccttttttccgtggcatccttgatttttatcacatcaacctgactcatttgaaccctaattccattctccaaatctctatttttgttcacctttgcgaagcttatcttggcgtgctgccgcattttggcttatggaaatatctgtatcactgccgtcctgggatggccggggggcaacatcagttggtcggaggtgccagtttggagatgcgccgtgggcggaagaccgagtatctcgagatacccctcaaggacagcattaaaggttggcgtctggagtggtttataattgataattatggaaattctctcccttcccgttcaggaagacagccagacgttcgtactccgagttggactgagtctcccacggatcaagaagtggccgaggcaggcgtgttgcttactgaagtcggattactgaaagagagaggtctgactgccgaagctgtggtcacagattttgttttcaaaaacattcagccgctgaaagacagggcctatccggcatatctttaccgagggctggccgactcaacccgagttaccaataggagaattccttctgctgatttggtaagccgactcgaaatgatccttaggggtaaagtttcaaacgttggtgctccagtggcatactcggcttggaacctaccttctcccaaagctttcaccctttttgtgtccaatccgcccgtgactgatagcaatttgggtcttagagtgcgaccctctgctgaagaggtccgttccttagttgcttcgctcggggagatacctgatgatgaacggcagatttattttgaagtgcccctgaaccctagtgatgcagacataaatgatatgctcgatctgctagctgaggattcatctgatgctgctcctgatggtacattggcagtggtgccccttccagaggttgatgcgaccttggatgtcccgaaacctgtcagtactcgcccgaggcgccctagccgaaccagtcagcccgagccttctgctgatgagcagaagaagaagagaagacgcctccggcgagtatccagctttgacgaggatgccagtaccttagctcctgctgctgaagaaatgactgcaactggccttgctgacgttgatcccaatgggtgtgctccgcctgctgctgaccccaatgaggatgttgtttgtgctgttactgtggaagatgaagaggaagaaaatgaaacttcattaactcggaaaaacagtcggcagttcgtcgctagcggtggaagtagtggagttccttctcctgccttgtctgtccttattggtctgcaagaaatgtccatggccaattttgatcaagctctagaggatatggtccctgagaacttgttgttggaacctgcagatgctgatgcaacagaaacttgtgcagccgtgccagatgctgggttgaggtcatcccgtgcctcgtcgaccttagagcatgatctcgagggtcgggatgctgacctggatcgtcctgatcccatggaagtagctgaaggcccatcaaccttagaggtggtcacgacagagagcttggatcccttgaatagtgctgacacgtgcccagcccccgaggatgtcgccggggagaactcagctcgggtgaggagtgtaggccactacccagcccccgagggtgttgccagggatgacccggctcgagtgggcagtgccaaccttgacccagcccccgagggtgtccgagcgaggtctccttcctgcacttccatggatgttcatgtgggttcacctccacactctggcggcatggtggtggctcaaactccggatcagggggtcgctttagaggacagcatccccactggtctggcgttaggctctgctgaatgtactgagctcattcctactggtctgctgcaagctgcttcgggtggtggtctggcacctggtcatcagctgatttctcctgacttggggatcccttcgtttttttccaacctccaggtgctgtgctgtgctttagtttgatttttatgttgcatgaattgttgccattatgttcatccgttcttcttatcaggctttggtggatggagtggtcggtcaactgaagtcgcagggtgcttccatcccggaggtggcttcatctcttgagcgttggaatccggtgttgcttcggggtcgtgtatctgagttggaagcaactaatgctggttagtgttctttcttcttcttctttgttcttgtccgtggattgttttaccttctgacctcattttgtttggatacctcttgatagggatgactcgcggatcacagttcttgaagaaaaacattcccaagatcaagctgaaatggctcgacgatgcgctgacttcgaggagaagtattctcagagtcagatcgagttgagtcaggtctctgcggctttggatgatgccaacgctctgagttcttctcttcatgctcagcttgactctgagaaggtagcttacgaacccgtgcttcgccttatcatgctcttggattctgaatgagttgatttttgcttgtaggaagaaaaacgcatccttgctgcttctcgcgacaacctggacagattgtaccgagattccagcaactcgctgaccatcttggagaggagccaccgttttacgatggaggaactggaaaatcagcgtcgtcagctgcaagaatcctcggacgaagtgacccgccttacacagttgctatcagcaaaggataccaccatcaagggactccgagcttctaagaaatccattgctcaggagttagaaactgctcagcaggctgttaaagttgccgaagaaactgctgtcactttcaaagctcagcgcgataaggccctggacaaggccattcgggcgggacgaatcttgatgagaagacccggcgtggttgtccctgaagatataagagctgatgtgaatgctgcccctgattcctcgaatcgcccttcttcgtcagtcgttcctgagaaagacattggaaaataaagaaacagttcgcgtgctctgagcgcgcagttagcatgatcaagtacccgttagagtttatcggcttatcattcgaatgacatcatcactttcttattgtatccgaatttcgaatttgtggtaacgctacatgatgattatgaagtttgtttgtgggatatggaaatcatcccctgaactgcataagcgcgagtatgctataccggtttaagccgtaaatgacttttagccgataactccgttagtagggtatagtggtccccctaggtaaagtaagcgtgaacatgttgcaccgccttaagtcgttgccgacttaagtcgattgctccgtttgtagggcatagtggtcaccccgagttaagtaagagtgagcatgttgcaccgccttaagtcgttgccgacttaagtcgattgctccgtttgtagggcatagtggtcaccccgagttaagtaagcgtgagcatgttgcaccgccttaagtcgttgccgacttaagtcgattgctccgtttgtagggcatagtggtcaccccgagttaagtaagcgtgagcatgttgcaccgccttaagtcgttgccgacttaagtcgattgctccgtttgtagggcatagtggtcaccccgagttaagtaagcgtgagcatgttgcaccgccttaagtcgttgccgacttaagtcgattgctccgtttgtagggcatagtggtcaccccgagtttgagagcacctagagggggggtgaataggtgatcctgtaaaaacttaacttatagccacaaaaacttgttagaggttagcacaataattgccaagtgggtaaagagaagatcttgcacaatacgacaattacagagaattcaacacagaggagacacggtgatttatcccgtggttcggccaagtacaaaacttgcctactccacgttgtggcgtaccaacggacgagggttgcaatcaacccctctcaagcggtccaaagacccacttgaataccacagtattttgccttgcttatctttatcccacttgcgaggaatctccacaaattggagtctctcgcccttacacttaagattcacaaagaagcacggagtaaggaagggaagcaacacacacaaatccacagcgaaacgcgcacacacacggccaagattcaagctcaaagactatctcacagtttctcacaagaacagagctcgaatcacttagaatcacaaatggatgcgcaaagactgagtgtggatgatcaagaatgctcaagagttgcttggtgtgctcctccatgcgcctaggggtcccttttatagccccaaggcagctaggagccgttgagaacaaatctggaaggccatctttgccttctgtcgtcgggcgcaccggacagtccggtgcacaccggacagtgtccggtgcccgattcctttccttaaatggcgaagccgaccgttgcagatgcgggagccgttggcgcaccggacatgtccggtgcacaccggacagtccggtgcccccttccgaccgttggctcggccacgtgtcctgcgctgatcgcgcgaccgaccgttggtcctggccgaccgttggctcaccggacagtccggtgcacaccggacagtccggtgaattttagcctacgccgccagcaaattcccgagagcggcctcttcggctgagatagcctggcgcaccggacactgtccggtgcaccaccggacactgtccggtgcaccaccggacagtccggtgccccagaccgaaacagcctgttggctgtacacagccaactttcttctcttcttcttcttcctgtttctaatacttagacaagtatattagtacacaaaaccaatgtactaagacttagaaacatacctttgctctagatttgcactttgttcatccatgggtattgattcacatttaagcacttgtgttgacactcaatcaccaaaatacttagaaatggcccaagggcacatttccctttcaatctccccctttttggtgatttatgccaacacaacataaagcaactggaacaagtgcaaaatcacttcaaataaaaactcaaattggttttgattcaattttggcatatatggatcatcctttgccgccacttggtttgtttttgcaaatcaaactcaaatctctatttctatgtcaaacacacatgttgaggcataaagagagttattccaaaagagattgatcaaagatttcaaaaactacccctatttcccataatcaacacttctccccacaagaagccaacttttgacaatagagacaatacgagataataaaagccttttgacacaacaaaaactctattctactattttcaaaatctctcaagtggtagctgatccatttatcactttggcctttattttctccccctttggcatgaagcaccaaaacgggatcaatcttggccttttaaccccagtgcctcaccaaagtcttcaattaagagcaaatggcaataagatttcaggagatgaacttggaattagttaccctctcatcggagtgcagtggaagtctttcatggtccaagtccaccttttccctttcaatcctccttcgagactaaattatcaaactcaagcacatggttagtctcaaagggtcaagttgtaacacatctccccttaaacatgtgcatcactttgcaacggacttgtgaggtccagggagtgtttgtacaacttgagcaccataataagcaacaaaatgcaaaaaggaacatgatcaaaagcataagtacatgtatgctacaattcaatccaggttccgcgaatctatgacatttagctcactacgcaacctgcaaaaggtcttctcatctagaggcttagtgaggatatcggctagctggttctcggtgctaacatgaaacacttcgatatctcccttttgctggtggtctctcaaaaagtgatgccggatgtctatgtgctttgtgcggctgtgctcaacaggattctccgccatgcggatagcactctcattgtcacataggagtgggactttgctcagattgtagccaaagtcccggagggtttgcctcatccaaagtagttgcgcgcaacactgacctgcggcaacgtactcggcctcagcggtggatagggcaacggatgtttgtttcttagagttccatgacaccagggaccttcctaagaattggcacgtccccgatgtactcttcctatcgaccttacatccagcatagtcggagtctgagtatccaactaagtcaaaggtagacccctttggataccagagcccgaagcaaggcgtagcaaccaaatatctaagaattcgcttcaccgccactaagtgacactccttaggatcggattgaaatctagcacacatgcatacgctaagcataatatccggtctactagcacataagtaaagcaaagaacctatcattgaccggtatgatttttgatcaacggacttacctcctttgttgaggtcggtgtgtccgtcggtccccatcggagtctttgcgggcttggcgtccttcatcccaaaccgctttagcagatcttgcgtgtacttcgtttgggagatgaaggtgccgtccttgagttgcttcacttggaacccaaggaagtagttcaactcgcccatcatcgacatctcgaatttctgcgtcatcaccctgctaaactcttcacaagacttttggttagtagaaccaaatattatgtcatcgacataaatttggcacacaaacaaatcaccatcacatgtctttgtaaaaagagttggatcggctttcccaaccttgaaagcattagcaattaaaaagtctctaaggcattcataccatgctcttggggcttgcttaagtccatagagcgccttagagagcttacacacgtggtcggggtaccgttcatcctcgaagccagggggttgctccacgtacacttcctccttgattggcccgttgaggaaagcgctcttcacatccatttggtacaacctgaaagaatggtgagcggcatatgctagcaagatacgaatggactctagcctagccacaggagcgaaagtctcctcaaagtccaaacctgcgacttgggcataaccttttgccacaagtcgagccttgttcctcgtcaccaccccgtgctcgtcctgtttgttgcggaacacccacttggttcccacaacattttgcttcggacgaggcaccagtgtccaaacttcattgcgcttgaagttgttgagctcctcctgcatggccaatacccaatccggatctagcaaggcctcctctaccctgaaaggctcaatagaagagacaaaggagtaatgctcacaaaaattaactaatcgagatcgagtagttactcccttgctaatgtcacccagaatttgatcgacgggatgatccctttgaatcatcgctcgaacttgggttggaggtgccggttgcgcttcttcctccatcacttgatcatcttgtgctcccccttgatcaagcgcctccacttgaggtacctgttcgtcatcttcggttgggggatgcaccatagttgaggaagaaggttgatttcgttcatcttgttcctgtggccgtacttctccaatcgccatggtccgtatagcggccgtcggaacatcttcttcatctacatcatcacaatcaacaacttgctctcttggagagccattagtctcatcaaatacaacgtcgctagagacttcaaccaaacccgatgatttgttgaagactctatacgcctttgtatttgagtcataacctaacaaaaacccttctacagctttgggagcaaacttagaatttctacctttcttcactagaatgtagcacttgctcccaaatacacgaaagtaagatacattgggtttgttaccggttagaagctcatatgacgtcttcttgaggaggcgatgaaggtagaccctgttgatggcgtggcaagccgtgttcacggcttccgaccaaaaacgctcgggggtcttgaactctccaagcatagtcctcgccatgtcgattagcgtcctgttcttcctctctaccacaccattttgttgtggtgtgtagggagcggagaactcgtgcttgatcccttcctcctcaaggaactcctccacttgaaggttcttgaactcggacccgttgtcgctccttatcttcttcaccttgagctcaaactcattttgagctctccttaggaagcgcttgagggtcccttgggtttcagacttatcctgcaaaaagaacacccaagtgaagcgggaaaagtcatcaacaataactagaccatacttacttccccctatgctcagataggcgacgggtccgaagaggtccatatgcagcagctccaggggtcttgaagtggtcatcacattcttgctgtgatgtgctcctcccacttgtttacctgcttgacaagctgcacaaggtctatctttttcgaaatgcacgttagtcaaacctatcacgtgttctccctttagaagcttgtgaaggttcttcatccccacatgtgctaagcggcgatgccacagccagcccatgctagtcttagctattaagcatgcatctagaccggcctcttcttttgcaaaatcaactaaataaagtttgtcgtctaatacacccttaaaagctagtgaaccatcatttcttctaaagacagacacatctacatttgtaaatagacagttataccccatatgacataattgactaacagatagcaaattatatccaagactctctactaaaaatacattagagatagaatgctcattagaaatcgcaattttacctaacccttttaccttgccttgattcccatcaccgaatataattgaatcttgggaatccttattcttgacgtaggaggtgaacatcttcttctcccccgtcatatggtttgtgcatccgctatcaataatccagcttgaacccccggatgcataaacctgcaaggcaaatttaggcttgggacttaggtacccaactcatgttgggtcctacaaggttagcacaaatattcttagggacccaaatgcaagttttatctcccttgcatcttgcccctaacttcctaagcaacaattttcttatcctttctacaaaatagcaaaggaagcaatttagagcacaaataaatttcggaaggttcattcactactttcctaggagcattatgaactacatttctcctaggcatttggtgaacaacatttcttctaaacacatttctaccatgcataacatgagaactagaagcagtcatagcataagagtcataagcatgtgaatcaaaaacatcattacttctaaaagcatttctagagtatctcctatcatagtacatgaaagcatgattcttcttaacactattagccataggagccttccctttctccttggtggagataggagtcttatggcttgttaagttcttggcttctctcttgaagccaagaccatccttaattgaggggtgtctacccactgtgtaggcatcccttgcaaattttattttatcaacttcactcttgctagtcttaagttgagcattaagactagccacttcatcatttagttttgaaattgaaactaagtgttcactacaagcattaacatcaaaatccttacacctagtgcaaattgtaatattttcaacatacgagttacttgctacttctagtttagcagttaaatcgttaatttcaccttttaaagaagaaatggtttcattacaagtagaaagttcacaagaaagtattccatttcttttaacttctagagcaagtgaattttgtgcactaacaaatttatcatgttcttcatataagaggtcttcttgtttctctaaggttatatccttttcatttaaggcatcgatcaactcattaatcttagctatcttagttctatccaatcccttgaataaactagagtaatcaatttcatcctcactagattcatcatcactagaagaatcataagtattagcattacgagtgattaccttcttttcccttgccatgaggcaagtgtgatgctcgttggggaagagagccgatttgttgaaggcagtggcagcgagtccttcgtcgtcggagtcggacgaagagcaatccgaatcccactcctttccaaggtgtgcttcgcctttggccttcttgtaaaccttcttgttctctctcttcccatttttcccttgctcctggtcactatcattttcgggacagttagcaataaaatgaccaagcttaccgcatttgaagcatgatcgctttcccttggtcttggccttgcttggctgtccctttcgaccttttagcgccgtcttgaatctcttgatgatgagagccatctcttcatcattgagcccggccgcctcaacttgcgccaccttgctaggtagcgactccttgctcctcgttgcctttagagcaatgggttgaggctcatggagtggaccgttcaacgcgtcgtcgacgtatcttgcctccttgatcatcatccgcccgctcacgaattttccaagtacttcctcgggcgtcatcatcgtgtacctgggattctcacgaatattgttcacgagatgaggatcaagaacggtaaaggacctgagcattaggcggacgacgtcgtgatccgtccaacgtgtgcttccgtagctccttattttgttgataagagtcttgagccggttgtaagtttgagttggctcctctccccttatcatggcgaatcgtccaagctcgccctccaccaactccatcttggtgagaatggtgatgtcgttcccctcgtgagagatcttgagggtgtcccatatctgcttggcattgtccaagccactcaccttattgtactcttccctgcacaaagacgctaagagaacagtagtagcttgtgcatttctatgaatttgttcatttataagcatagggctatccgagctatcaaatttcattccattctccacaatctcccatatgcttggatggagagagaataagtgactacgcattttgtgactccaaaatccgtagtcctccccatcgaagtgtggaggtttgccaagaggaatggaaagcaaatgcgaattcgaactatgttgaatacgagaataatcaaatgaaaagttcgaattgaccgtctttttgtagtcgttgtcatcatccttttgggaagaagtagactcatcactatcatcgtagtagatgatctccttgatgcgccttgtcttcttcttcttcccttccttccgtctatgccccgagccggagtcggtaggcttatcgtcctttggctcgttgacgaaggattccttttctttgtcgttgatcacgattcccttccccttaggatccatctcttcgggcggtaagtccctttgtgaagagaacggctctgataccaattgagagcacctagaggggggtgaataggtgatcctgtaaaaacttaacttatagccacaaaaacttgttagaggttagcacaataattgccaagtgggtaaagagaagatcttgcacaatacgacaattacagagaattcaacacagaggagacacggtgatttatcccgtggttcggccaagtacaaaacttgcctactccacgttgtggcgtcccaacggacgagggttgcaatcaacccctctcaagcggtccaaagacccacttgaataccacagtattttgccttgcttatctttatcccacttgcgaggaatctccacaaattggagtctctcgcccttacacttaagattcacaaagaagcacggagtaaggaagggaagcaacacacacaaatccacagcgaaacgcgcacacacacggccaagattcaagctcaaagactatctcacagtttctcacaagaacagagctcgaatcacttagaatcacaaatggatgcgcaaagactgagtgtggatgatcaagaatgctcaagagttgcttggtgtgctcctccatgcgcctaggggtcccttttatagccccaaggcagctaggagccgttgagaacaaatctggaaggccatctttgccttctgtcgtcgggcgcaccggacagtccggtgcacaccggacagtgtccggtgcccgattcctttccttaaatagcgaagccgaccgttgcagatgcgggagccgttggcgcaccggacatgtccggtgcacaccggacagtccggtgcccccttccgaccgttggctcggccacgtgtcctgcgctgatcgcgcggccgatcgttggtcctggccgaccgttggctcaccggacagtccggtgaattttagccgtacgccgccagcaaattcccgagagcggcctcttcggccgagatagcctggcgcaccggacactgtccggtgcaccaccggacagtccggtgccccagaccgaaacagcctgttggctgtacacagccaactttcttctcttcttcttcttcctgtttctaatacttagacaagtatattagtacacaaaaccaatgtactaagacttagaaacatacctttgctctagatttgcactttgttcatccatgggtattgattcacatttaagcacttgtgttgacactcaatcaccaaaatacttagaaatggcccaagggcacatttccctttcagagttaagtaagcgtgagcatgttgcaccgccttaagtcgttgccgacttaagtcgattgctccgtttgtagggcatagtggtcaccccgagttaagtaagaatgcaagtcaatcataaatgagccgagtatctttgaaatctctctttattgatgacgtatttccattatacagaatacatggtcgccccggctgttttgagatacagctaggggtaaaattttcggaggtgctctatgttccaggagttcccaacttctgtgccatccatctgggtgaggcgatatgatccgggacgagtgacctctgctactatgaaaggtccttcccataagggtgataacttgtgccgtccctcccctttagaattcggcggaggacgaggtctcccatcgaaaagaaacatcgccgcacaactttgtcgtggtagcgccttagagtctgctggtatcgtgctgattgaatcactgcattcagtcgttcttcctcaagtacgtcaatatcctccagcctagtggcttcggcttctgctatgctttcgaagatcaatcttggcgccccaaacttgagatcagcaggtagcactgcctccgacccatagaccatgaagaaaggagtgtttccatgcagggcccggctaggttgggttctcaagctccaaacaacataaggcaactctcttatccattttcctgcgaacttttcgtttttatcaaagatcctttttctaagtgcctccaatatcattccgttggctcgctcaacctgcccgttggctctcggatgggctacagatgcatacttgatctgaatgcttttttgctcgcagaagtcaaagaattctgaactggtgaagttggatcccaagtcggtgatgatactgtttggtatcccaaatctgaatattatgctttgtatgaattccacggctttagcagaggttaaagaggcaatgggctggaactctatccatttagtgaatttgtcaattgccaccaatacatgggtgtatcctccttgagctttcttgaaaggtccaatcatatccaatccccagcatgcgaaaggccaagttactggtatggtctgcagctgctgtgctggcatgtgctgttgctttgacaggtattggcaagcttcgcatctctgaactaactcggctgcgtcgttcttcgccgtcggccaatagaatcctgacctgaaaaccttcccgactaatgttctggatgctgcatgtactccacactgccctgcatggacttcctccagaagttgcttcccggtggacgagagaacgcacttcatgaggacgcctgacgcgcccctcctgtataatacctccccaatgagtgtatagtgagctgattgtctggcaatgcgctctgccgagttcttgtcatctggttcttcttcattctttatatacttaataatcggttgcctccagtcatcagagtctgactcaggttgatctatgatgttgcactcttctatttgatccgtcgagatgctcggctggagaattccttgcacaaagattccgggcgggacctgagtccgaccggatccgagcttggacagtacatcggccgccgtgttccgatctctttctatatgatgaaactccagaccctcgaatttatcttctagcttccggacaacggcgcagtattttcccattgaatcacttgaacaatcccattccttgtttatctgactgatgactaccagagaatctccatacaccatcagtctcttgactcccagtgatatggcgatgtttaatccgtgtatcaaagcttcatactcggctgcgttgttagaggccgggaatagcagctggagagcatacttgaggtgctcgcctccaggtgcagtgaagagaattcctgctcctgctccctgcagtttcagcgagccatcaaaatacattcgccatacttctgcggtttctggattatccggtacttgctgttctgtccactctgatacgaaatcaaccagtgcttgagttttgatggctgtgcgaggtcggaactcgatatcatgggatcccaactcgcaagcccacttggctattcggccaatggcttccttgttgtgaagaatgtcccctattggaaaaccagtaactactatgactttgtggtcgtcaaagtagtggcgcagcttgcgggcagttagaagtactgcatataatagcttctgaacttgaggatactttttcttcgatggacctagaacctcactgatgaagtagacaggatgttgtaccggataggcatgcccttcttccactcgctcgactaccaacgcagtgcttaccacgtgagtcgtgcaagagatatatagcaacaaatcttcagctggttgagttggcgtagctcgccggggcggctttagtactggtggtgttgtcaggaatttcttcagtgcgtctagagcttcttgtgcttctgacgtccattgaaacttctccaccttcttgagcagtttgtaaaatggcagacctttttctcctagcctggatatgaatctgctcagggctgccatacatccagtgagtcgctgaaccttcttttgcgactgaggggcttccatcttcatgatagcttcaatcttatctggattagcttcaattccccggtggctgacaataaatccgagtaactttcctgctggtaccccgaagacgcatttctcaggattgagcttccatctatatcttctcaggctgttgaaaaccagctgtaagtcttcgatgaagttttccggattctccgttttaatcaccacgtcgtctacgtaagcctccacacgcttgccccagtgatcggctaagcatgtttgaatggctctctgataagtcgctccagcgtttttgaggccgaacggcatggaggtataacagaaagcaccaaacggggtgatgaacgccgttttttcctcgtcttcttttgccaaactaatctgatgatacccggaatagcaatctaagaaagatagcacagaacatccagcggtggaatccaccacctgatctatcctcgggagcccgaagggatccttcggacagtgtttgttgagatcagtatagtcgacgcacatgcgccaatccactttattctttttgagtacaagaacagggttggctaaccactcggggtgtaatacttctctaataaatccggccgcgaccaagcgagctaactcggcacgaatggcctctctcttgtcgggcgtgaaacgacgcagcttttgccggatcggcctcgcctgaggatagactttcaatttgtgctcggccaactccctcgggactcccggcatatccgcaggttgccatgcgaatacgtctcggttatcttgcaggaactggacgagcgcgctttcctatttgtcattcaaactggagctgatgatggccgccttgcgctcatcggcaaaccccaggttgatccgcttggtttcttcaatcggccgcatagaggtcgcggcctgagcttcgtttgccggcacggcgaggtcttcctcaggcttagagttcgccggtgtagaaggaaccgttgacggcttggtggtgagggctgcttggatggccattcggaaacattctgcggcgccttggaagtcggcgcgcacagttatgattccttgcggtcctggcatcttcagtatcatgtaggtatagtgcgggatggccatgaatttggctagccccggccttccgatgatggcgttgtaaccgcagtcgaagttcgccacctcgaacctcaggaactcggttctgtagttatccggagtcccgaaggtgaccggcatgtagatgtggcccagcgggtattccccttccgtcggcacgatgccgaagaagggagtgtctgactcgtggagctctttgaggtgaactcccaagccttggagcgtacgggggaaggtgacgttgatgctgctccccccgtccactagcaccttctttacccggctctctcggatcaccggatcgacgaggagcgggtatttgcctggatggtcaaagttgagccattgatcctcccgagtgaaagtgattgggtgctccgaccaccggtacggggcgggagggccggtggtcgccaccagtatctggcggtcgttgagcttttgttgtcttttgttctcctgcgacccatgtccgccgaagatgacgttgacctccctgtcaacgcgcgggaaagctcctcctcccccctcctccggctgatggggctgtcgtggttcacctggccctcccctcggcggaggaggcggtaggggttggaagggtcgaccatgtccaacggagtgcttgaagtcccggcagttacgtagagtatggcgcatgtccttgtggtacgggcactgggcgtcgaggatgtcgtccagcgtgcgctcgcctccgcgtggtcctcctcgggcgcgagaggcaggcggtccggcggcgtgtacttcttcgcgaggcctcttctcccagcgtttgtcgggtggctggttcgcgtcgcgtcgtggtgctgtcgctgcgggttttgctcctccgatgaggtcccgggcccgctcgtcggcggtgatgtagaggtcggcttcccggaacagctcctcggaggtagtcggcgccttttgtagtatggctcggacgaaagccgagtcgtcagatcctctgtagaagtcctcgatcacggccgcctctgtgacctcggggatgcgatttctcatggtctggaacctcttaaggtatgaccggagagtctcgtctccccggcgcttgatggatttgaggtcccatggttgcgcgggcttgtcggagagagactggaagttggcggtgaagcgccgactgaagtctccccagtcgtcaatgcagtgtcggggtagatgtcgtagccactgcagcgcatcttgcccaaggacgatgggcaggtacgtggtcataacgtcttcagatgctccggcagcccgagcagcggtggtgtaaacggctaaccagccccctggatcctgcttaggttcatatttgtcgacattggataccttgaagttgggaggccattggatggccctaaggcgcggagtaagggcggatactccgcacgtgtcctcctgtcgtcggggatgacgtctgtcccggggaggggagtggcggtggtggttcctcgaccgtccccgggtggtaccaccagttgaagctgttgccgactcagtccgggtggcctggctttgagtcgggaagccatgatctcggtcatactcctcccgacggcgaatttcgttctcgtgccgccgttcgcgcgaagcattgatagagcttcgcgcgtctcggcgactgttgatggcgtgtcgcaaatcgttcggcgggtgagcgagcggtagaagatggttggctgcctgagtgaacaggcgtcggtatccctcggcgtcgggagtccgaggaagtccgtcagctatccgagctagaacgcctccgacttcgctcggcgtgttcatagctcgggcgaagtcggggttcaagttgcgcccgaagagcggattctcgcgtcgttgccttgcatcttgctcggcttgctcctgagtccgacggcgatcacgtcgtcgggagttccttcgttccctgaagacacgttcttccggagtttctcctatctctgagacctcgtctcgcgagacaggctgctccggatccctttctccagctgcgtgatgtcgtcgaacgttcctgcgtcggttccttcgtcggcgggattctcgctgaggcggttcttccccaggcgcgatcggttcatcgtcggagatggcgggcgactctgctctcccgatgaagaggacgtcggggtagaacggtattcctgccgtggcgactttctttccgttctcctttgaggtcggaggaacgggaagaacgacttgcctctccctggtctccttctttctcacgacccgtgtccattctttcgtcggggaagtagacagcggagtcttctgggtcagcgagcttctagctccagcctccccggagacgatctttttccgaagagccggaggtagcgtctttccagcatttttggagtttgttggaggagacttctgttccggcagatctgcgaggcggtgtagaattccttcttcgtccgctacagatgagattgtcccgaagcagaatataaatccgggacgcacggcgatcttgctgtggaaggtgacggccattgagctagcttggatcgtcgacacaccccctacctggcgcgccagctgtcggtgttttgggtccgaccgcacacccggggttgcccctcaaggtgtttttaggagtaggacggtgccaacgactgtagcaaaatggttcgtgccagtcgcacgagggacaatggacaagatttgcaggttcgggccgcttagaggtgcgtaacaccctacgtcctggtgagtatatgagcgtggttacaagagggttctctggatagaggacgcagagagtttatgtgggtggctaagtagaacagggtcgatcgttctgaagtggtgccccctaggccttatatactcgaccgtggggcagtacacgtgagtatgataacaacaagtagctaaaagatagtgaacctcttgagtttatccctacgtaacccttgccgatttatcctcgcatggctccgttgcatgggggcttcagcgcgggaaagtcgggtctctgttgcgattcattcgttcgacgttgtgggccgtctgggtttgcactaatcagtctcacgtcttcttttctttgttggttgtctttccctaggcccacgaaagaatgaccttacgaattattgggcccttgggcctttcgtgaggccttttacttctttagtggacccaggggatatctatcccccacagtatccataaatccagtaccagttactgttcttcatcagatgaacaacacaaggcagttcatgaggttgtggaagttgtgttgcgttcgatgcagcaggatgcaggtgcagaaggagattggtttgacaattggggctatgaagtgatgatgcaccttcacggcacatggttgctgatactcaattttgagtggcagtgttcatgttaagattaatttctttccttctctgtaagtgttagtttatcgcaaagttatcttgacttcttgaggcatatatctattttaggaaccaaaaacaataatactaacctcatccg

SEQ ID NO: 985 - DNA, 16443 bp, Zea mays
  Intron number 6 from transcript GRMZM2G007681_T02 (locus G RMZM2G007681) derived from phytozome v7.0 (chr-ID 1; pos 1 88722797 to 188739239)
gacgcctaacatttgtaagtactatgttttttggtgattcttgttatccattcattgtttttccagccattcataattagtaaccttcttatcttttagttaaccctatggaatgctagccttatagagtaaatctttcaatttttttttggaaagtcatttaattaagcaaatccactatacctttggtgaagtttgtgacctgatttgccatctattaagtttgcttcactccatgccatttggattttatttttttccactccatgccattgacagattgcatggattcacaacgtttgaaattaggatttgaagtttcttttcactccattagtgaagaaatccggttaggattgtggccgaaggagctgtctggtgctctggtattggtatgcccctaatgccggggatctcttggggctagtccaagtctctccctggttatagttgccaatatactgtactgtcaatagtgttaaggcccattaggcctaggtctactgcctacatcaacatcaacataaccttttagtcccaagcaagttggggtaggctagagttaaaactcaacaagatgtcaccaaaaggggaaagagagagaaaggggggaagcttttgagagcactaaaaggaaaaagtcctaatcacgggcctaatcacggttcgggcacgtggatagcttctttccaagtacttttttttctcgaacgcgcaagagacatgcacatcttttcattaagaaggaagagaaaaggatccaaaatggatcagtacaagaagacccccattacggtggtcgaaaacaaagaaacaaaaatacatccataaataaaaggaaccagaaactactttgatctaaagacctgggattggggatgttaggagatctaagcttgtagcccctcctaacacccacagatccctctcctcctcggtcctcttgatggcttcattaaggcagagagaaagaccgtcaaaaacacaggcgtttcgatggttccacaatatccagaggccgagactgataactgataagcgagtttagtccttttctggcaattccatgcaactggtcactatatcttttccaccaaagcatggtactctcttcatagacataggagtgaaattctggaggttaacctttgtcagcagcttgaaccagtaatttcttgcaaacacagctcacgaggagatggtcaatggtttccatttcctggtcacaaagagggcactgatcagggtgatcaagccccctcctctgaagtctgtcagctgtccaacacctttgcagcgccacaagccataggaaaaatttgcatttggggggggggacatgagtgccaaaccctgtcacaatgctcaaaatatgttgacccaataaataaactctcgtaggctactttggcagagtatttgccgttatgagcaagcctaaaaatgtgtttgtcctctctatgcggatttatgtttactgtgagaatagcatcccaaagatcaagataatcagcaaggacctccacattgagagctccttggatgtcatttagccaacttctatttgctagagctgtatgaacagttctactattttgaattcgccttggcacaactagtagtaatctgggagcaatatccatcacatttcgtccatgaatccatctatcttcccaaaaaagtgtcgagtatccattgccaatttccgtgtgagtggcagcatgaaagaaggatttcacctttgaaggaaaatgcatagggagtcctgcccaaggtttatcaggttccactttagccagccacaaccatctcattctcaaagcccaaccaagttctttaaggctgaaatgcccaatcctcccaactcaactggcctgcacactctaccccaagccaccaggcagtgtccccctctgacttctttttttccacggcacaggaatcctttcctaattttatcaatatccttgaaaactcttggaggtaagtccaccgccattgcaaggtaaatgatcattactgtcataacatattgaacttgcacttttcttccagctctggtcatcaagtcagctttccacccagggagctggtcagcgatcttgtcgattatgtattgagtttgatttctggaaagcttgctcaaagacagaggcaggccaaggtatttacaggggaaagaagagatctcacaagggagacactcctatctaaacacaactctattgggatattccattccttcaagtcccttttgattgcctcctcccatgtcaagttttgtcgacctctacctctcttcacattattgtcccatcttatgatgcctctatgcaccggtgactctgggggtctccggtggacatgcccaaaccatctcaaccggtgttgaataagcttttcttcaattggcgctacttctagccgatcgcgtatgtcatcgtttctcactcggtccaatcttatgcgcccacatatccaacgcaacatacgcatctctgcgacacttagttgttggatatgtcgtctcttagtaggccaacactcagccccatataacatagcaggcctaatcgctgtcttgtagaacttgcctttcaacttctgtggcactctcttgtcgcataggactcccgatgcttgacgccatttcatccaccccgctttgattccatggctaacatcttcaatatcaccatctctctgtagcatcgatcccaaataacagaagatttctttctttggtactacatggcctcccaaacttacatctccatcctcactaattgtagtaccaaagtcacatctcatatactcggttttggtcctgctaattctaaatccttttgactctagggtctgacgccataactctagctttctatttactccttcccggctttcatctactagaactacatcgtcagcgaaaagaatacaccaagggatatctccttgtatatccctcgtgacctcatctatcactaaggcaaatagataagggctcaaagctgaaccttgatgtagtcctatgttaatcggaaaaacatctgtatcaccatcagttgttcggacactagtcacaaccttgtcatacatgtccttgatgagcgtaatatactttgttgttactttatgcttatccaatgcttaccacatgagattcctaggtattttatcataggccttttccaagtcgataaaaaccatttgcaagtccttctgttccttatatcgctctatgacccgccttattaagaaaattgcttccatggttgaccttctaggcatgaatccaaattggttaatggtgatatgcgtcatccctctcaggcgatgctcaataactctctcccatagcttcatagtgtggctcatgagcttaatccctcgatagttggtacaactttgaatatctcccttgttcttgaagaccggtactaatgtactcctccactcctcgggcatcctgtttgatcgaaaaaaatggttgaacaacttggttagccaaacgatagcaatatcccaaggcatttccacacctctattgggataccattcgggcccatcgccttgccccctttcatcctctttaaagcttctttcacatctgattcttgaatcctgtgtacaaagcatctatttagatcatcaaaggagtcatccaattggatgtccatggtctcattctcaccattgaaaagattgtcaaaatacctctgccacctctgtttgatgtcttgtcctttcaccaagagttgatccatctcatccttaatgcatttaacttggttgaggtccctcgttttcctttctcgaatcctagatatcttataaacatctttctcctcttcctttgtacttagtcttcggtaaagatcatcataggctcggccctttgcctcactcatagctcgctttgcagtcttctttgccaccttatacctctctataggtctactgcctatatatatatatatatatatatatatatatatatatatatatatatatatatatatatatatatatatatatatgttctatagtccatagggactggtcatctctggttaatcccaaggttagtaacatgaagttatttttggtacacctccgcgatatgattatcttcgagtgtttggatgtacgtgttatgtcttgttaccaccacgtgagaggactaaattgaatgctcaatctgttgagtgtgcttttcttagatacagtcctgaacacaagggctatcgttgttatgatccatctactcgcatagttgttaaagcggtaaggcgacaggccccccctttaaacttttaagcagtaaagcgtaaggcgaggtgacaccttaattgtttagataaatataaaaaattagaccaaatattatatatgtatcactaattcatacttaataacccatttcagtcttgtagaatagaaaaacagagtaaaagaaaaagaaaaagcccacaaattgagaactagagaaaaagaaaaagaaaaaggcccacaaacaacccaacaacacctaggttaaaccaactcctcctctctcttaggctctcagccgccgctgccctcctctcttcctctctggacgccttcctctttccctctccctagcgccgcgcgctgcgcctctcctaggctctcagtcaccgccgccctcctctcttcctcccccgttgctctcctatctccctcaccccgcacgccgcgtctctttcggcgacgcgaaggcgccaccgcgtgcgtcctgcgtgccgccgttgtgcctctcccgaccccctgcatgccgttgccgtgcctcgcattgcccgagagtaaggcgacaagacaccttatgggtcccaacccgccttagcgtttaagcaagcgatgctttagtgacgccttaataactgtgtctactcgtcgtattcgtatttctagagatgtgagttttaatgaaaattgccccttctttcacaaccagcccactcactcatattatcccacagagtccacctctttcatgtgacttccttccattcccgatttttcatctgaaccatcttctatatccacacctgatgtcctcattcccataacaccaccttctccttcattttactcttccaaacctcctgtcatccaaacctacatttgtcgttcacgctctattcccactgctagtcctgatactgatcctgttccagattcttgtactaataatactgagtctcaagatgtttttaattagggatatcaacttcatgatcgtggcaccgttgaacctctagatcgtatggttttccgcgagctggtgtggcaattgttgaaccatccacttatcaggaggcttttgggattcctgagtggcaacttgctatgatcgatgaattgtctgctcttgaacgcacttgtacttgggatatagttcctttaccttcgcatgttgttcccatcacatgtaaatgagtgttcaaagttaagacaaaatctgatggtttcgttgagagatataaagctcgtcttgtggctcgtggttttcaacagactcaaggacttgattatgatgagacctttgcacctgttgcacatatgactactattcgtaccttgattgcagttgtcgcctcgtattcttggactatctctcaaatggatgtcaaaattgcttttcttaattgtgatctgcatgaaaaagtctatatgcatcctcctcctggggctgatgctcccccaggacatgtttgtcgtcttcgtcgcgccttatatggtctgaaataagctcctcgtgcttggtttgagagatttatttctatcatcatggctgctagtttttcttctaatgatcatgattctgcattatttgtccatatctctccaaaaggtcgcactttacttctattatgtggatgatatgataatcacaggtgacgattcagagcatatttctcgcgttcatattctgagccaatttgtatccacacctaactcagttcattatggtcatttgcttcgtgtgctgagatatttacgtgggactgtgtgtgtagcggtggaagtggtgtggataattatccgatccgattcgaatcctaattatacgtatatggtggagttattatggataatcataatccgatctacgtgtggatgcggagtaggatatggtatcaccaagatccgacggatatggagtattcgatatttgaacatgaattatctgatgcttaaaattgaataatatccgattagcttgtcaagtacaagatagggagtcagtcaacaatgattgtttactgtccaaataaaactgaaatttctatacggtagaacatgaaatgaaacactatccacgacagaaatcaatcgccacccgcaacccaacaggcaacaagccaacaagaatcaatcactgatctgccgatcacaccgtatagtgtgtgacgtaatgatatttattatttacctacttagtcatttattatagctatattcaagttatgttttcaattattaaactttaatttatgaattattgatcgctataaaaaatagatgtatacatgtattatccgacctttgaaatccgcttctgccacgcttgcgatccgactctgcaccattttcgacatcctaatatatccatatcactatccgcaaccgcataatatccgctccgatctgaatccaacaataaaaataggattaggatatggaaaatgcgttatccgctccgatccgtttgcacccctatgtgtgtgtgtgtgggccggcacctttgttgggttgacgacccattagagttagggttctgagtctatatatgcaaccaccacctctatgcaatataatcaaagggtttcctacaagttatcaaattaggttttcacctctccctacccaacaaccgccggctctctcccaaaactagcagctgctgcttgctcctcctacctctagccgccagcaccctcctcgtgaggctcatccttctctcccgggggcggccaccatcccaaccgtcggtcacctcctccccggcgtgaccatccaccggggaccctgcggaggtggatctgcgcgcccctgccctcccccggctccggaggcacggccgcggtccccttccccggccacggtgcggtgccccctctccagctccttgtgtgagccccctggtgtcacgcgaccctccttgcgctccgtcgtggctctcttcacctctggcggcgcgcgtgcggccaacccctcttctcctttcctgagtgctgtcgtctccttcccatggccactgcagcttcctccctcttcccgtgtctactacagctgcccccgactcccttatcgctcacccctgtgccggtgtctccactcgtgcaaccccccgtcatcgcgccggctacttcctccctgcccgcgctgatgccatgcaacgctgtaacaccccgtcgactcttggaccggcggtacttactcctggtggctctaggaccatagactatccccacaaaccaacacgagtcttttgtgcgcactttgtcctcactcgtgcgcacctggggaaacttcctggttggtcacccatcgcaagatttctgtaggccaagcacgcttaacctggaggttcttttgaggtaggcttctgaaaaagaagatgcaccttgtggtatgaatactctattaattctattaagcgttgggctaggatatcaccatccacgagggctaggatatcacaattcacccccttagaagaccgacgtcctcgtcggtcaaccccaagccaggaacctcctctcttggccacatatgtctgccaagtgtcgtcatatgccatgccatgttgccactccgacccacatgcgccatgcgccatatgtccgaacccctagcctagacacactcgtgaaaccacgagggttggctctgataccatttgtaacaccccgtccacagccggaccaatggtacttactcctgtcagccctctaggaccatatgtcgtcctcacaggccaacacgagtcttttgtgctcactttgccctcactgatgcacacccgagaggacttcccggtcggtcacccaccccaagattgctctgggccaagcacgcttaaaccagaggttcttttgaggtaggcttatgaaaagaagatgcaacttgttggtatgaatactctattaattctattaaaccttgggctaggatatcaccatccactagggctaggatatcacaggcgccaacctttaggcctctccctcaagcttctcctgtcgttggcgtcaaactccttcctgccaggcccggtgcaggcccttgcttggctggacacgccccgtcacactcccccttcatcattgcctccgtcggatctatcgctgatgggccttctcggccggatccatgttgctgcgaccttcccggcttgatccgctgcccctttgtccggatcgtcgtcttcatggctggatccgtcgctgccgtggccttcccggctggatctgctgatactcctattctgccgcaggcgtgaccaccatgactggcgggtatcctcgacgtccagacgatcgaagaagcaagaaggtcggcctgctggtgcccttttgttgtgttgtcctgctgaccgttgaccctcgtcccgaagaacaggctactgttgcgtctcccgaccacgaccacctcgacttcggctaccttgacatccaagggctatcgtcttcttggagtccacaccggtctctactcgaaccacaacattcgcaccctcacgacgctgcgactgcggggggataccaacccgtcgcctcctaccttcggcttctactccagtctcatcgtgtgtggggcccccgttgcgactgcgttgggatgttagactgtgtgtgtatgtgtgtgtgacgacaccactattgggctgccggcccattagggttagcgttctgagtctatatatatataaccaccacctctatgcaatataatcaaatggtttcctacagggacaagatccagatgtttactctatgcttctgatagcccacttcagtttcatcctttgatgcaacttgggcaagtgacccgattgaacgttgctctattacaggttatcgattctccttgcatcctcccctattgccagtaaatccaagaagcaagcaacaatatcttgctctagtaccgaggcagaacttcgagctctttctactactgctgctgaaattatttggttgcgatggcttttggctgattttggtgtcacctctgttatgtgataacatgggtgctacacatatttcacatgatctagtgaagcatgaacttactaaacacattggtgttgatgcatcgttcacctggtctcattgtcatcagaagattattgatcttcaatatgtgcccttagaatctcaattcgcggatttattcacgaaagcacaaaccagcgcacaacatcaatttcacttgatcaaacttaatgcttaagatcctccacttccaccttgagttttggggggggggtgtgtgttaaggcccaggtctattgcctatatatatatattatgtagtccatagggactggtcatctctggttaatcccaaggttagtaacaaatagtaccactgttctaattttttagcatgtgtgggtgcatgatgtttgtgcattgtgtttggatgtttatctttgttacagagagaggtagacaagtgatggagcaatatagggagcgaaaggacctaaacatgaatttcatagacctggagaaatcttatgacaaaacactaaggtgtagtgctagttgatgaaagccgagctagagtaaattggaaattggagctgtggcgggaggccctagagtccaaaggtatgtgactttggcactactacatatgaggaaacatatgaggaaggagatgttagtttggaaattcaagtagtggccaagaaggataccttcagtatttaggaattaggatcaatactacatagggatggggatattgatgaagatgtgagccatatgatcaaagttgggtggatgaagttgtgtcaagcatccgacgttctgtgacaaatagagtatcatagaagctaaaaggcaagtttcataggatggcgattagacctgctatgttgtatgctgcagaatgttggcccacaaaatgacatatttagcaaacaggtgtcgaggaaatgcctatgttatgttggatttgcggccatacaagaagggatcatgtacataatgatgataatgatgatatacgtgataggctagaggtagcaccagttaaagaaaagcttgtctaacactgattgagatggttgtcaaatggacatttctgcccagctgtgaattcaataccttggctgtcattctgctgaatctcccaccagcattcttaagcccctcaggcatccgaagacaaggttcagctaggcgctaggcggaatctaggcggtgacccattgcctagcgcctagtcgggagtactcggtcttaggcgcttctaggcgcttttctaggcgttttggcaatatagccataaattatatatatatattatgtatataactatatatacgttaatacgtatataactactatatatgactatatgagtcacagtaagtataaaaagaaggccagtagacatatctgattcctagcttagcttactcttgcatgttcctagctcctgcaaggctgcaacacattttgacagctagtagttagtaaattagtcaatagacagctagctgttcataaaaaaaatagaaaacactaaattgtgacttatctggatgatttcagcagcctcccattcatgagcagttgagcacactgcacaccatatcagcagctggtaattacaacacaagtggataggacagtaatacaagtgcagaacacaatttataaataaaggacagcacaagcacatagttcttagttcaggtctcacacaaaagaagacacacagacacaaagtgacacaactgcagttcataagaccagggcatcacaaaaggcttcactactagatggagatggtccagatcatatttcatcttcactgtagcacaaatcttcatcttcatactcttcttcttcagactcaaactcttctccttcatagagctctctcactcttgcacttctacgaggctcaagctgttcttctgctcccactgcctctccaataacagaccaaggtatccctgtaccttccatctcatcttcctcctcatctctaaagacaacttgtgcacaatcatctccaccctcttggagaaaaccttgagcttcagttgtatcactagacaagagaacatcagtgattttctttgacttaatcttttctctgttattcatcagcctgttattgaactgaatatagaccaacttgttgaggcgggttgtagtcagcctatttctcttcttagtgtgtatctataaattagaaacaaaagcattttcagttctgaaatttaatcatagtactgctgaaatgattaatagataggtactaaccccttcaaacccactccaatttctttcacaaccagaagagcttgatgtcaaagataatatccttgtagccatcttctgtaaagctggtgtttcagttccatataaccgccaccatgatgctgaaataaattagaaacacctctattagtttaaaaaacagcaaacaaccatggtagaaaacagcaaacgaccatataataagtagttaagtacctctacctggattgtaatcatagttttgaaaagttcttgcaagcttcttgctaaatggtccttctctattctgaaattttttcaattcaaagttggcagcctgttcttgttggtcctcatcatgataataaaattgctcgacacaagatatgaaggcttcattcattttgggctcatcaaatattgatgggttagcatagctatagtgtggattcagcaaaaaagctgtcaaatgcaatggagaatcaagtcttccattcatcttcttctcaattacagccataacatctttgaatcgagactcaacattgccaaaggcctctttgatctctctttttgcctttagtagctctccataaaggaaacccatggatggcttcacatccccatcaaccaaacggaggactttgaccaatggctcaaaaacagccaacattagcttcacatccttccaaaaggctggactcaatatagtagctgtggcctcttttcctttctttgatttcacatcctttaatgagtcccacctgctatgaactaccatcttccttaactggtccttcttctcttgcatactgttcaaagtgagaaagtatgaagcaaacctagtcactcctggcctcactagctctttcccctctgtgaagtatctcaagcactccaatgttcttgtgtggccatacacaaatatggtaaatgactttgcttggtcaatcactttcctgaaccgaggcaatttgccaattccttggagcatcaagttgattgtgtgagctgcacaagaggtccaaaatatttgtggtctcttctcaagcaatagcttctttgctcccatgttgttagaggcattgtcagtgactacttgcaccacattttcttcaccaatgtcttcaattgctttgtccactaattcaaaaatgacttcgcttgtgtgtgacacatctgacatctcttttgagctgatgaaggaggttccatcagcacaattagtgcatatattcattatgcttctcctcttcctatctgaccaagcatcggtcataatagagcaaccatttttcatcttctcggcttcacgttcctgcagcaaacacttggttctttcatattcttcttccagcaaactacctcgaaaagcatcttgagttggaggtgtaagtcctggtccaaattgtccaattgcttcacacatttgcttgaactcatcattgtcacatgcattgaaaggtattcctgccaatgattaaaaaatgaagtctaattttaaaatgtgttcagttcatgaattttaaaatgtgaaaacagcatcgtatactagcaatttaccatgattataggcccatcttgcaataaacttgtgcacctcatgctctctttctttccatagttccttgttcagctgctgttgtttgaatgaatcagccttggtaggatcaatagcacgtgtccatttgtcaattggccctaatttgtgaggctgtgagcttccaacacaagtgacttcttctgactcctctccaaccctagatacattcacttcctctctaagttctagctcacgaacagtcttctcctccctcttcctttttgcagcctctattgctttcttgcacttctctttagcctctagagcctgcggtgttgcagacgtgcatttcttcacgttctttccaacatgggcaagatgctccttcaacctataaatccctcccctcatctccttgtcacagaacttacacttcaccttgtctttgttgttagcatcaacaagaacaccatattcccatccaacatcatctgaatttctttttaggagattcgctctagctgcttcagtttcagaaggtgcagctgcagtttctgatgacatccttaaaccttaatccttttatttctttcacttgtacactgcacaggggaggaaaacagtttcagcaggggaggaaagcaggggaggaaagcaggaaagcaggggaggaaagcaggggagggggatgagcagggaggggagcagccgacggggaggagaactcaccggcgggggagcagggagcaggcgggggagcagggagccggcgggggagcagtttctgtcaccgtctgggagggagacggctacacagcgggcgctaaaagcctaaaactaccgcgcgctaaacctaccgcgcgcgcgcgctaaaactaccgcgcgatgcgcgcgctaaaaataccgcccgccaacgcgcccgccaacgcgctaaaaatactgcccgcgcgcccgccaacgcgcccgcctaggcgcctgcgcgccgcccactcgccgcctaggcgcggctgcgcgccgcctagtcgccgcgaccgcctagaagccgcacagggccctaggctacgcggcaggctgtcgactagcgcctaggcgcgcctaatcgccgcctaggcggcgcctagccgaacactgtccgaagatagcaattggttccactgggggttatgaaactagtcttcggctcatcttccttcatccagatctgatgataccctgaattgcaatcgagtagactcatgagctccgaagttgcagctgcatccactagtgagtcaattcttggtaatgggaactcatccttcggacttgccttgttgagatctgtgaaatcaatacacatcctccacttgtcgttggatttcttgaccatgactgtatttgccaaccgttccggatatgcaacttctcttatgactccagcactgagtaatcttttaacttcggctttttcaccttcggccttatcttcggacatcttccagagtttttgcttgcgtggcctaacacttgagtccacattcaaggcatgctctattatacttctatccactccacatagatcatttgctgaccaagcaaagatatctttgctgtgaaataggaaccttcgaagattggactcttgctcttaagtttgctgtttgccgaagaatacctttgctctgcgacatcatcacagagaagtattggttttggctgatccgccgaagatgccttttctttcactggcttttcagaatctcggatttgcctttcggcttcatcgatgttgtaaacaattttcggctctggcagggtcccttctgcccttcttgctgtttcttggctaccatacactgatattaccccttgattgctgggtatcttcatgcagatgtaagctgaatgtaaaactgcttcgaagacattgagagttccccttccgatgacaatgttatatgggaattccatatcaacgacatcaaacattgtatcttctgttcttgtgtggttgacatagccgaaggtgacatgcatgattagctttcccaaagccattacttgctgtcctgcgaagccacaaagaggaaaagctgagtcttggagttcatcttcgagctcctgcatttgtctgaaagccttgacaaatctgatatctgcaacactacctgtgtcaaccaaaatattgtgtactacaaaacctttgattacacaagagataaccttggcatctctgtgtgggtaatctttgagacgaagatcatcttgagaaaaagtaacagggatatgggaccatttacgatccttggacacctaaatgcaacgcccttttttgggcttctttcttctgctttttattactgggttcgaagctcgagcgcccagtaatggggagagtaagcttctccatggaagttgacgaagcttgatggcttgccatgctcttcgtcgtgatgaagattgtagtggtcgtgagatctccggaggtgggtgccaatgttggtcacttgttttcaattgctgtatggaatcgaaaacaagacaacacaatgataaaaaagtagaaacctttgtccttatctatagtcaccagtgaggaagattgaagttgacataggaagagatagtaaaaggagatttggaaggatagaatatacctaaagatttagccttgaataaaaatgcattgaaaccaactatctatccacgtgcctgaacttggacttgtggcttctgttgggtttcaattctagcctatcccaacttgcttggaactaaatgctttgctgttcttgtaatgaaataacatgtagctttcctgcatgttcaaaaaaaagaagaaatctgaaacctgaatggcttggataatggaaaatcattactagaagttctctgatgtcaaataattaattacctctttaattgatgggagaacttacatgatcatcttggattcttgagtgcttggactacctgaaagcataatgatccgtttatctttgagtgttttggaggtcgagacagtcttataggcattcttttttttgtagaagttgatctgtggaatgtgtgcttgagccaggggtttagcacaacatttgtcccaacctagcctgcagtatgatctatgtggcatggcatgtttgcttttctctctctcctcatctcttttgttgtttgttttcaaggaggatgatccacccttctaacttagggtgtactcatgcgacatggtgtgaaacgatttcttcattgcactgccagatgcacaatcgtttttgcactcatcaaaactaaacgttgtggtggtctaatccactcatgtgcatgctacagtacatatttgaaccatgttggcatctcaattgtaaacacaatttttgttctttgcatatttgaagtagg

SEQ ID NO: 986 - DNA, 9302 bp, Zea mays
  Intron number 6 from transcript GRMZM2G446625_T03 (locus G RMZM2G446625) derived from phytozome v7.0 (chr-ID 7; pos 1 20546278 to 120555579)
ctgccctaggtgcttctgctttggtagcacatcaagtaagtaaactaatatcccaactttattttcttgtctatgatttcctttggacctgttagtctgttactctatattctatattatattactacatttgttcccaaattcctctcgccatgtttaaggttagctggatgagcttaataaaacatatttcatgattttcttttcagtatttgatttatttagcacacaaaacatggatgatgatctctgttagactgtgtgggccggcaccactgttggactgccggcccattagggttagggttgagtctatatattgtaaccccttctctatgcaatagatcacccacttcactattctacatggtatcaaattagggtttcttcctcccacatccgagccgccatctcccgcctccaacccctacagccgcctgccctaggtccagccgctgccctgagaggctcatccttccctcccggggtggatcccttcccagctgtgctagccacgccagcccacatcccagccgccgctgctcgtgctccccatcgtcggccgctcgggctcacgtcccttgctcctgctcctgcatccggggcgcggcgccttcccctctcgtggtcgagaaggagcggcgggcgttcgcagtggaccgcctcgtgctcgcctcctacccgctccggcgtctcctggagacggcggcgcgcagagccgggggcggcgccatcttcgtggacgtcgacgccatcctcttcgagcacatcctctggctcgcctgcgacgcccgctccgtctcccagatcctgcacctcgacctcaaggaggtcatcaacttctacgcccaggacgcgtgattggtccaccctccggggcgcgacgccttcccctctctcttcctctcccactgctcggcagcctctccatgcggccatcttccccagtgcaggcgctcaagccgccagggtcccgctcgggctcgccctaagcccagccgccatctccggccgcctctccccctacaccccggcgtctgcccagatctggccacgacattgctcgcgggcctagatccgtcgccgggctcgctcctcggccttgctgctgctgcagtgggggcgggcgacctcgtcgccgccacagcaggcgcccctggcagcggcaccctctccttccgccgccgaccggccagcaggccgctcctccgctttgcagccccttttcattgcgctagccacctcctaattgctcgcgctgacgccccagcagcgcctcccacttcgagcttctcccgtcactggtgccgtcaacaccccttgccaggtccggcgcaggcccctgcccggctggacccaccccgccgcccacccctccttcatcgctttcgttggatccgtcgctgccgcggccttcccgaccggatccccgttgctgcgatcctcctggctcgatccgctgtccctttggctggattcgtcgctgtcgtcgacttcccggccggatctaccgtttccccttctattctgccgcgggcgcggacaccatgaccggcgcagacgcgtgcgctgctgtcggcctccctggtggggctccttgacatccgcccgttcgaagaagcaggagggtcggcctgctgctgcccttttgttgtgtcgccctgctgaccgttgatgctcgaacgtcgacccctcccgaagaacaggcttctgctgcgcgcctcccgaccgcgaccacctcaacttcggctacctcggcatctaggggctatcatcttcatggagcacacaccggtctctactccagccgcaacattcacaccatcacggtgctgcaactgcggggggatttcaacccgtcggctcctaccttcggcctctactccagtctcatcgtgtgtggtgcccctgttgtgactgcggggggggggatgttagactgtgtgtgtgagtgtgtgtgggccggcaccactgttgggcacttgggctgccggcccattagggttagggttgagtctatatattgtaaccccttctctatgcaatagatcatccacttcactattctacaatcactgcctagttttttcttgttgaactgaaagtttagtgaagtatcaagtagtggttttcattcttatagacctgcatagctctttttccttgatatactacattagaggagtggtacatttttcattaggcaaattttactgtcgaacaaacatggtattgactacatcacatccagccatttgtcgtaggacaccagaatgattaattcattcttttctaagatttcgggagagacggttcaaaaatgtcctttttgccctcacggtccacatttcaattcttcgtcctctcctgatgttctcagtgccgagtcaacccctattcgtgaagggcaaggtgggtgcggcaagttcgctacctgcacgccatggaccttgccctcgccaccatcatttacactcatgaacccttggtattccagtgcctgcaccgcccattgcacgccctcatccgttgcatcttgtatcatctgtccaacttcatgtcggccacttctgtctactcctggatcctcgtgctccttagcggtgaggctagaatggctccttgttggagagcacaaacactaaccttaatcagggttgggagtgtattgatataggagtattaggtggaccaaggcccattacaaaagaggtacacacggtaacactaaagttacgctgacatcccccgccagtcacaacaccatcctgtacagatgttgagattggaccggaactcggtgaaaatggagggaagcctcttggtgaagatgtcggtgaactgtgaagtggtcgggacgcggagaacgcaagcatcgtcgatagcgacacgctcgcggatgaagtgtaggtcgatctcgacgtgctccgtgcgctgatgctgcaggggattggtggagaggtagaccgtgttgacgttgtcgcaatagacgagagtggagcgcttgagggggctgtgaagctcatgaagaagcttacgaagccaggaagtctaggtcacgccattggccacaccgtgatactcggcctcagcgctggagtgggagacgatggattgccgctttgaggactaggagataaggatggcgcacaggaacacaacatagacggatgtggaccggcgtgtgtcagcgcagccaacccaaatggcatcggtgcagaccaccagctcagaagttgtagagggccgaagaaggaggccgaagtcgagggagccacgatggtagcgaaggatccacttgagagcagtgaggtggggcttccgtggggtgtgcatgtgaaggcacacctgctggcaggggcagagttctcagcatggcaaggtatggcgcttgacataccttaaatttctagcgatgtttacccctaaagcactctatataacaagcatattgaatgaaatgaagttctgcgcaagaaactcagtattgacgattagaggaagaaccagaactcctcttacgaaccattatcagacctctagagctgctacactatatgtatgtgccttttggccctttacttggtacgtggtctacaacctacttgctatctagctggagtgttggactaaaagccttccacgtgagtagggtcggtcatctatgagacaatactagcagtggcgggcctaggattttgacgatgggtattcggaattttagtacgcacatttttttacagcataaatttgttatccatgggaaacagataattatccaccgaacacaatataatataatttattatccacgggtatgaatatgaatataataaagtatctatggtaaatttttcgtgggtatggatatacagtatccatacctgttacctgatgtgtatctgacattagtacagatctatacctacaaacgtatatgggtacaagtatggatttaattttatctcgtagttatgaatttgtaaaccatatactcgtgtccttttttttctcgaacgcgcaggagaactgcacatcattatattaagagaggaaaaaggtccaagaggaccaaagtacaatgccagagggcaagccaaaacactagatcagattggaacctagcctagaccctactaatagcagcaggaagaccaatacccgtgtcctaaccgcacaattgttatccctagtcgcacggtagggaaatgaaaaaggcgaactgaaagtcgcctagagggggggtggataggcggaatctgaaatttataaacttaagcacacactacaagccggattaacgttagaaatgaatccgagtccgaaagagaggggaaacaaatcaaccaagaaaataaagcggatgaacatggtgatttgttttaccgaggttcggttctaaagaacctattccccgttgaggtggtcacaaagaccgggtctttttcaaccctttccctctctcaaacggtcacctagaccaagtgagctttctccttaatcaaacaggtcacttagaccccgcaaagaccaccacacacttggtgtctcttgccttgattacaagtcacttgagaacaagaatgaggaaggaagaaagcgatccaagaaacaagagcgtaaagaacacgaacaaaacactctctcaagttactaagtggttggagtggatttggcacttgcagaggctttgattcttttgatttgtgtctaggagtgaatgcactagctcttgtattgaatgtgaagtgctggaaacttggatgcttggagtggtggtggttgggggggtatttatagccctcaaccaccaaaggaccgttggggcaggttgctgtcgatgggcgcaccggacagtccggtgcgccagccacgacacccaaccgttagggttcgggagcttctgaccgttggaggctttgtcctctagtggcaccagacagtccggtgccgcaccggacaggcactgttcagtgtccggtgcgcctctgacgggtggctctgctctgccgcgcattgttcctctaaatcttcagcttttgcaggcgaccgttgcgcgaagcagccgttgctccgctggtgcaccggacagtccggtggcacaccggacggtctggtgaattatagcggagcgcgctctgagaaacccgagagtggctagttcactctggtacgaacctggtgcaccggacagtccggtgcgccagaccagggcacactcggtttttttgctcctttgtttttgaaccctttcttcaatcttttattggtttgtgttgaacctttatgcacctgttgaacatatattctagagcaaactagttagtcccattatttgtgttgggctatcaaccaccaaaattatttatgggaaaaggttaaaccctatttccctctcaccaacgaaaagcgaagtttggacaaatatctgtaagcccgtaaaaccgtgttattttatatttttacaatatttgagtgtataaacataatatgtatacatatacataaattttgttgccagaaaataatgggtattcgattgaataccctaacttctatatgggcccgcccctgaatactaggacgttttgacttttgaattttgacttcaccgaatcgctgttttgtgttccattccattgggttcagtgtctcgctcagttgtcttcccatctctcacggaactgtgaccacaaatgcctagcatgcgtgactaccgagcacgagtcgtagcgtcatcgtcaagtccatgtcaatggcagccgggcagcagtgtctcctatatccctgaacggttcttgacctgagtgtcaattgctataacccgagtgtctacaaaagaagccaaagttaattactttttcctagtcatttgatacttggatactaattaatttcttagtttgtttgattaatttaagatgaatcatagtgaccatagattgtttaaggatcaaggatgtatccaaacggataagacaatgtcagtaccaaaacaagaggtgcacattgtaattttgtagatgcaaattttgttataaatcaattagcatgtgtgctttggtagtttaatatactctggtaaataaatggtggtggttgattgcagatttacgaactttttggtctgataggatggtcacacctctaatctttttgctggcaatggtggagctgcaaacttttactcccctaggcacaattgaagtgtgttatcaaccgcttagctgattggctttactagtatctttatatttattttaaatgcttttatttatacaataggtgatgattataatatgctatacatgtagaagctaatttggttagaaatctttggtagtctttgccataccttaaatcgtttctgtcctccgccactgatggccgaggtggccaagaggctggagatgacatcgtggtcggggtggccaagacaacggtgccaagtggaggcagaggcagcggaggcgagggcgtagggtgtgtcaacatgggcggaggaaggtggggcaaggaagcgaatgggatataggcggtcggagctgtcgcatcgagcgaccacaacacgagtggtaagatcctgtatggtgagttccggtgagttcctaaggatcgaactccatagaacaatggttgtcagtggtgaagcgacggaccgagagaagaatctggatgatattgggggcaacaagaatgttgttgaggttcaaaggaccaggaaagaccgtgtcacctactgagatgacaagcagagtcgatccattaccaacaatgatggaagaagggaaggtggagctatgggaatggggtaaagaaacaacactcgggtcaggagtgatgtgatacgagacgccggagttagcaagtcagtcgattttagtaggagtaggtggcgatgacatggggaacaaggagagagccaccagagggatgctggggcctccagtggcaagcatgctgacatcgcgcatgggtggtggagacgatgggacctcgagcgtcatggagacaatctcagaaccgcggaacagaaatggtccagtagcgtggcggccctcttgagggtggatggagttcggagagtggtagagcgcgacgcagtgacagagaacagggttcatgacctgattaaaggccacgaatgtgcctcagagaagctgaccgtcgtgaagggagacacgcacatgatagggaggcacatggagcatgacatggcaaaggacgagcgtcaaggaagcaggcgcgagggtgtcgggcgcactggtggctagggcccccgagcaaccgagcgcgctggtagggcaaagagcccgggcactggacacagagaagaggcggcgtgtggctgtgcgggcgagccaatgatgcttagctggtctttttggatgatcagccacactgggactgagacacgacctggactcccacggggggggcagcagttgtttggtcatgggtccaatacaactgatagccaagtcttcaatggcactggcactttatgagctagatagatcccatgacttgaccttgcccgaagtcaacatccacgccggacgcgaagagttggcagcggcgaatgtttgcgcgcgtagtggattccgaggcccagtacacacgggggccgtgctgtttgtagaggaagtagatgtccgttggagggctaggggccgcgcacagtgcagttgccagggcggacgcagtggctgcgcccgtgctgggcgaggctggggtgtcaaggtcgagtgcgtttgcgatgccagcgttgtgcaaggtagtgcccatgttagggagtggagtggcggagaggagggtggcggctaggcctggtaatgggtcataatcgggccctaaccccactccgatcctaaagattaaggagtcgattcagccctacttgaatccaacctgaattgatgcagctcaatccgatccattctttaaagcctcgacatcctaatctgctccgatcctttcaaaatccgtgggccaatccaagggccctcacaagcaagcaaacgaccaccactagctaattgaatctgtacaaatccatgggcttgctctcaaacaaatataacatgtactgctatacactgcatgacgactaaaaacagctcgctggatgtagctcgtaatgtaacctgtacaaacaaacaggtgttggatgcaactcgtaataaaattcaagaaatccttttttattcagctgttgcagttcataaaaaatatagaaaacatagaaaccagcttaatgtgcttacaatgaaccactaagttcaagaaaaatatagaaaacatttagggttgttgcagtccataaaaagcccagcttcttctttagcctaatctgaagaaaagagaacatgttaacagaaattcagcacaacatttatgagtgggcggtggacggcgcgacggcggcggcagcggcgcttgtggctagggccatggcagtggagccgtcggggtgctgggctaggtcggcggctagctcgagggagagggggagggtcgcgccaggccgggagcccgcgccgacgccgagagcctgcgccgacggccagcgcgagggagagggggagggaggtagcgccggagggagtggggagagagaaatatatatatactgagtaattgggccaagcccattacactgagcgtatgcaagtaattacatagggactagccccgaaaccctaacagtggctagatcaaaaacctagatcttcgataccatgttacgaatagagactcaactggatgatctattgaggcccaataaggagtatatatagagtacacaaggggcacaggaggaaaacctcagacaaggagataatactaatacccttgactattataccaacacacagatggattgtgcgagcagtggcgcccctactctttggggtttggtacatgtggcagcagcgcgacattgagcaggagaggtgagcaaatggggcgcaggtgctcatggtcatggtggtcctcaatttagttgatttttcccctttttctggggggggtgaaggtgacaagtcaagcggcagctgcgtgtgaaaagagagagaaagatggttcataaaaaaaagacaaaacaatcattgcggtgtgccagggaaatgaccatgatttgataatgatacaaggaaaattttagcatttgcagtgggaactagcaaataccatgttgtttgatattcatagcaaaatttgccttaaatctttttatttcttcctatcaggacattcttttataaaacatttaactttcatatttcagcaaaataagg

SEQ ID NO: 987 - DNA, 2126 bp, Zea mays
  Intron number 2 from transcript GRMZM5G875564_T02 (locus G RMZM5G875564) derived from phytozome v7.0 (chr-ID 9; pos 1 55278632 to 155280757)
taagctttctcagcaggcttccacagcagtttgaggtaacgttcatgcagtacatgcccattagaatattaatagattctcagtttacccctttaagttttatttaagtctgatggattctgtttgttcacaagttaaatttgccaataagctaaaaagaccaatcgtgtgccaagcaaaaaaagagagaaaagaaagaattgtttcgacttctttgcaagttcccttccagaaatgacattgtatctcaagtctatgtatgtagcaagccgtctcaagtctatgcaaatatgttttttttcttcgaacaacgcaggagggcagttgcatgtaattttattaagaagaggaataatacctactcctagtacaagagggactccctaacccaacattcacaccactgcacactaaaacagcactcgtatcttagtagttaactgaagatgcatctccttaagagcagaagctccagccgtgcagcacagaacaccctcattatgctggttccagcgctaatatcctatatctaacgctacatcagctatcgtttggtctgtatctacatcgtcaaactttatctaccgcaacgctccggtgcatagcctttactgtcagcctacagccacctcactctttttatcgactcttattagataaaatacgtcgttttattgatacaaaaattcatttgagtatataaataagcaaataaaaaatatatggttcataaaaacaaatacaaattacatagtttataaaccatagacaaatttgacataattcatcaaacataaaaaatatgtaatatctggaactagaagttacatagttcataaatatattttttggatttttttgaattctttgggtatcaaaataacgtggaccaatataagaggccacgtggcagcaggtggtcagtacagaccggtttagatcggtaccgacccacactgactatctaggcgaaccgacccatgctgacaccgtggcggtcgatagcgacacatggtcagcgagcggtatcgccccgtgctggccctggccttagctacagcttgctgaaccaattggacatttggaggaactccttcaagcacacaagcatcgtgatgtttacatatttcccaagccaccaaggtgattaaaaaatcgagtcattttctcatcttcttatcaaaccccttgtttgcttggcaccaccatttggaaaagcaagtagctctagaccgaggagtaattgtcactttgtcagtaatcctaatggattttgtataatatatctagaggtttgttcttttggccatgttctcattgtagaacatgcattactgacctatcaaccaattggtaactgccttctacggaaatcatttttggtctgtacacagggccggccctgagggtgtgcagggtatgccaccgcttagggcccccaatatcagtagggccccgtatgcctagataatgtccaaatacatatatgttacatgtaaatctctattctcattttttgttgtgtctctctgattttttggcaatcatctattcgaggtcgtgcaacattttgcttatgacgaatactaaatattgattgatgagggaagaccggaaggtgttgtacacatgtgcttgtggcgttgctcaattctagcctaccggagggcccaccctgataacctatgttgcttaatccaagtttagtttactgaaatttattttccagaaaatttgctctaatgtatttaaatttggtttactgtgcattttaaggtttaggctagtttgacaaattaaaaataaaatactcgctctcaaagcaaatatagagttatattacataatctgtataattttataactcataaaacattgtaacagtctccagtcatatcattttgaaaaagaagtgtaaatcatcaacttctttttatttttcagatatcatttaaagttgaaaaatagcagaatcaaactttagtatagggcctctatatagattttcgcttagggcccccaaaatgtcaggaccggccctgtctgtacattcaacttcttgactgttgcagttccttttcatggtttcatgatgatataatgtgtttttcaggtacttagcgcag

SEQ ID NO: 988 - DNA, 5643 bp, Zea mays
  Intron number 5 from transcript GRMZM2G146041_T03 (locus G RMZM2G146041) derived from phytozome v7.0 (chr-ID 5; pos 2 1039373 to 21045015)
gaaaaatagagaggcgttactttgaaggtgtgcaggtattttcttagccatagaagtgaaagaaacgcaacaccaggatattaaattgcttgtcttgacctctagtatcaatgggttgtatatttatataggaagaaacctctaataacaagaggaatcctactcggttataacatcctaaccaactttgactctaaatgaactggacgcatgcagtcctgttctgttttatctttaacctctaatctgagtcggtttctaatctagcccaagaggatcgtggacaactaaggttgtagcctatgtataacatattctaacgtcccccttaatcataacttgcataagttaagattgtctttgaatgaagctaacttcaacatagccagtgccttagtaaagccatttgcaacttagttctttgtagatataactctgacctccaaaattcctttaactactctttctctcacaaaatgaaaatcaatcttaacatgtctcagaggaccatgaatccttggatttgatataagataggtagctccaatattatcacacccgatccttgcaccaagaggacaaggaatctttattttctttaaaataaccggattcgcatgagctctgacgtggcattagttatggctttatattcagctttagtgaggctgtgggctcttgcgagcactccaagatacccgatttctaccaagatatacttcaaagcctcgtattgagtgtctatgtcatctacccaatcggcatcagagaactagagaagacactcacaagcatggagggagactttacagttttgagaccatatccaagagttaacctgacatttgtgagaatcctcgtcactatagtccaattatcattagtgggcgcatgcaagaattggcacaccttaatgattgaaaaactcaagctggatcgtgtcaaagtctaaggcaccaaaaatgcttctgtaccttattgcatcctctaactctattagttcaccttctacaatccttaacttcttctgaagtattgagcggagtcgtaggcttgtaattcatcattccaactctaccaaacaaataggaagcctatttagtccgagacaagtgaataccatcaccgattttttgtatctcaattccaagaatgtaatgcaacctcccctaggtccttcaatgaaaattctgaactcaaatcttgaaaagtagcatcactagcatccgatgaatagctagcaactataatgtcattaacatagaccaagagatatattgagacatttcccttcctataaaagaataaagaacaaagaggtgtccacctttgaatcttgaaaacctagatgcaacaatttatcactaggtactcggctctcagagcttgcttcataccataaatagcttacacacatgattgagctgtgacgtgctctcaaatccaccaggtggctgcttcatgtagacttcctcctccagaatgccatgaagaaacgtattatgaacattaaattgcctcaatatctatcctctagaaaccgctaaggatagaacaattctaatagtagctactttgaccacaagactgaaagtcttctcataacctatgtcatatcgtttcttaaaaccctccgctactctggttccatgcacagaaggaggctggggtactgtgcgcagcaggagtttggtggtctggtgttatgccttttaggcattgtactttggtccattttggactcttttcttctcttaatttaatgatgtgcagctctcctgcgtgttcaagaaaaaaaaaccctttgccactagcctgactttatatatatatatatatatatatatatatatatatatatatacttgcagtcaataacattcttggcctcatcagcaggaactagatcccaagtgttattttttcatcagcgcatcaaattcagcattgatggcgttcttccaaagttccaattgtcgtcacctagagcttcagacatgtcttgaggttcaccggtggtggtaaaacaaccatatttaatgagtaatttttccatcttgtgatcttgtccgaggacgctggtctatgtaaatagtgagaacgggaggtcggtggggtgatggagttgttggtcctgatgaaaccgtgcactgatgtcgagtcatctgaaggttctgttgcactactttctgctacttaagggaccggtagagctcgatgatgttgctgcattgtgatcaggcgcatcagagacatgatctgtaagactttgatgtgttgtttgatctgtacaagatttagcttcatttgtcctccttttggttccttgctggtaaaacaggtgaggtgagacaacttgtttttgtgcagacacgcagtgctggtctggttgctgtatctacgcaccaccctcctgaacttgggtagagcttgtacaacatcttctagcctatcaccaataacacttcatgattttcattagtagtattgtcatatgaatcattagacaacgagttcccatgttgtcaaagttcgatgaaggtaaaagggtgcaagacaacatattgatttggcccttagtctagcatcaacattagggtgaagcccaacaaatggaaaaacttcttcatcatatcctaccaaaatgtacgagacaagttattcatcatgtccttccagaatgtatgagacaagttcttcatcatcattagtcttctttgcagatgtcatatgatctacaagaaatttcatcttggcaatatatttagccactgttatgttaccttttcttgtggttgctagggtaatctgtgtgttcatggttcgagctcttgactgctacgtgtaggacttctgtagttctgaccctatctcatgaggtgtttcgtagatgtaggttgtgtgatatcctggctccagtggatggtgacatcctggccaaggcttaatagaattaatagagtactcataccaacaaggtgcatcttcttttttggaagcctatctcgaaagaacctctgggttaagcgtgcttgacacagagcaatcttggtatgggtgaccgaccgggaagtcttctcgtgtgcgcatgagtgaggacaaagtgcataaaagacttgtgttggtctgtgaggatggtttgtggtcctagagggctgccaggagtaagtaccgctggtacgggagtagacagggtgttacaagatggcaacctgacccatggcttcccgagtcatgaatgtcatgaggaagccaaagacctgttgttggagcgtgacccatcggatatacaccgggttgacgtcgtaggtcatcttgccatcctgcttgacgacgaggatattctcatcgggcggccgggcgctacagccatgccatctaggtagccttgtagctttttttttttagataatggaaaaatcatccgaccttggcctcaaatgaggttacggccatttattacaagggacggaagcatattgccaaaactcctcctatgaccacttcagagaaccccaactagccaaattaaagaacttcagctatcgaaccacagctactacataattaaacgcaacgcagacccccatccaaaattgctaaagaactgtagtagcaccctcttcacattacgacatgaagactttattaactcttggtcctcccttctaggctgaagctgagaccagaagcggcaccaatatgttgccctgaaggttacctgcacacatgatttaggagatgaattattgaacaccacatcatttctacttaaccaaatagcccaacaaattgccgatgcaacggttaatagtaggtttcgaactctgggaagcctcccgctcgcccaaaccccaaacaaatcattaacatcccgaggaggtctcaaccccgtgcttatctgaatcaaccgccaaatgaatgacgcatacaaacaactgaaaaataggtgctttattgtctccggtctactacaaaagcaacatatcttattcccattccaatgcctcctagccaagttatcctttgttaatgttacccctcttttgaggtaccacataaaaatcttaattttcagaggaagcctaagtttccaaaggtccttattatgcacccccaacccattgttaagagatgccagatacagagacttaaccgtaaacatattctcatcgggcggccgggcgctacagccatgccatctaggtagccttgtagctgcgcgcctctaaggatgggtttgcactttccttgccctaggagagacgtcggtactgtggaattggatgtcgtcgtgggatcttattgctggtgaggtttatgtcatcttcctcttgatcaggacatcaactaatagatgtaggaggtggatctgattgtcatataagaaacacgacactgagatattatattgcttgccttgacctctaggtctatagggttgtataacccgcctattacaaggctttgtcccccttcttagttgcaagggggcagccaagaaggagactggaactaggctttggccccctaaaagctaaaagccaaaccaaaggactggaactaggaagcaacttttttcaaaagctgactttctcgcagtgtaaaactgaaagcacctctagacctgcttttagcggctttcggatggaactatgaaaatatatatggaaaaacttttagcggcttttagtgggttctaccaaacaattttatgatttttaacagctcatagcttacaacaacttttttcacagctcacagcccacaacaacttttttcacggccgcagctcaaccaaacagaccctatgtatagcatattctaacaagaagtatcttgatagttgataccattaaatggaggacataaattgctttccagggcatttgcattggtacaattttgagctggcttggaacaaaagatgatgaggatggggtttatttactcaatattcttggatagacgtagtcatgaattaatttttttgtccattctatgtggcacgtaactttacagctacaccaaaaaggatcatgttatgttctttttgtgttctgctacgactgtgtttgcccaagttaatcattgcatttggttcagttccataaacattttccatgttttccaaaaaaaaagctctaacagtgtaagaaatatgtgtttttcattttcttcttatcttcagagatgtgttaggattgagacatttgataaggacttcatacgtttagaaatgtttcaaatttctgactgttatacacctgctttttggttccaaggcccaatcaggatgttaagtgtttgaaattcatacattgatgcttcatacctcggtgtattgttacaagtgacactgtaatccacagaataacattacgcataattgttgttagatgacatttgagcaaaaccaagcatgtcaccaccaaacgaacttcctatgcagttttttttctcacatcagcatatgttagtttgagattttaagtttgggctgttttagctgttgtgggtgtggcagaccaggtgcaatctcgactgcacaatagtttaattcggattggccttttggtagttgtaagttaacagcttactgactagatatctggtgtccattttggataattctgatttagg

SEQ ID NO: 989 - DNA, 8105 bp, Zea mays
  Intron number 1 from transcript GRMZM2G081538_T09 (locus G RMZM2G081538) derived from phytozome v7.0 (chr-ID 4; pos 9 0845016 to 90853120 reverse strand)
atctaaaggagtgtggaaggcggctgccttgtccgccgagagattctgatatttgccatcagcaagaaacaggtttgtaaaattaccatcaggcctacattttatagacccagtttaactcacaatttatagacacagtggtaatctctactactacataagacgctattgtagacgtccacaactatttggtgcacggttctgccaatccgtcatcaacgcgcacgccaaggttgtcgcggatcccccaccctcctccccatctgctccccgccatcaacgcgcacgcgccgcgccgcgccgcggatcccccaccctcctccccctctgcacgccgccatcaacgcctacagtcgcgtcacgccgcggatcccccactctccgttcctcgactgcggtccccgttgcaagtccaacccgttcccccaattcaacaccagcctttgcgcatcgcaacatcgatatcgggaagaggaaactcgaaagcccggcgagcggtatggcaaccggcgaggagcacgtggcggcgccggtggtcaaggagacgtcggagaagaagcaggccagcacaaccgcccgcaccctcaggctagacgaagaaggtttgatcttactgcctgcttggtcgtccccttccaatttcctcgcacgctcccagcacgccgtttgcttctgtcccgagggctgcgggggcctactagcgttcggatctgaggggttcggactccgtcgctgcgaattccgctgctgttttccgtaaccgagcagtcggggggatgtggcgtcgggttctagggtttctaaccgattgagtcgtgtcgttcgtgagggcgtttgtaattttgcttggttctacggccatgcgagcatggctataaggtttaggagcttgatttgagctcactgttcgtgctcgcgattgacttgcaacatacgacgccgccccactgtatccacggacaccgggaaagacgatcaactcggaacctcctcaaggctccgtccctctacgccacgcgtgggatcccccactgtcacactaaccgctcacttatttggtggattttaatttttctattttggctgcgatttgcgacgaaatttttgaaggattttggtgatagaacatgtgaggagactttttaatatttagttgatttaatcccctcaagcgccttcggttttggtttccccaaaatttcccatttcaaatggttcctgaatctcttttaaaaaatagtttgtttatggtgtttatgagtacgtggtgagggccttgtgcctataagatttgattcgtttagagtagttaaggcttatagagtagtaaagattttcctatccaagggaggctctgaaagcctatattcagcgtctgtgctcgtcgagcttgatgccccacagtccaagcgtatctggccaaagccggtggcattgctgccagccaaagcggcaaatgagaatatgcagagcagtgtgaggcatccgaggatgcctgacgaggctgggtgtgccatctggttgttggtgtctcaaaagggcctctaattcacagtagctttgctacgagataagatggcagcctggttctacgaatatctccggcttagcagaacattgggtcttttctgttttctctctggagttttggggcaagaaagaatccggcaaattgctaggtggttgggacaacgatcttttcagtcttggttcttcactgaaaaaggcatatacagatcctgccgtaagaacagaaaagaaatccaagttagttcctatcctccagagaaaaggatcaaactaaagatggacagctatagactgactcagggcggatatgtaaacccggacacctcaaagggaaatataacacatgtactggaatgactttttcaacgggaaatataacacatgttgcaacagaaccgtataataacacgataacctatccgagggaggctctgaaagcctatattcagacaatcaaggaagcgaagaacagaatattttcctccacaagctaccacaggtgcaaagccaagcagtgagcaacgtcggctagagagtgaatttcagtagctagaagcatgaattttgtgtgttcattagacaagctcttttctttctatttgaagctgatgtgtcttatgttttattacatcattgttttgggtcattgaattaacttgccaccttttaaagcagacatataatgtattcctcaattgtgtttgtgtttggagacatggaaaggtgataagaatttccattaactcttctgagcttttgtcaggaggatgggcttctgcatactgcctgtggaacaaacaagattatgccacatgaccatacatctgcatgtgctcgctgataaaggctatgatggtatggtcctgtggcataatcttgtttgttcttatggccggatacttaccctttgaggatgccaatctgatgagactgtacaaactggtaaattcggttaatacacttatatcttggtttccctatgaaatgcaaggataattttgatgaacttttctttgacttccttttgtagatctgccatgcaactttttcttgcccaccatggttttcttctggagcaaggaagtttattaagcacattctcgatcctaaccctggtaccataagttcgaattaagacgtaccttttcattatcggactcatctctttcatttatctgttgtattcttcgttcaaaaaaattatctgttgtattgttgtcagcagattacaaccagtgtcactgttatcactgttggataaatgggtgttgtattcttgcagaggataaaaattgcagaaattttggaagatgaatggttcaaaaaagactataaaccaccacatgatgacagaaatgagtaaaacttttcattcaatctagaggataatttcaataaacttataagtacaaatgtatgatttatataaccttggctagagaatacctccagttacataaatttccctgtgcgttctttttgcagggattttccgagatgaacggattcaatcgatgttcctggagcaaggtttagtgcgagatggtagcgttcctctcttctgcagatcatgtccacatgagattctctcttagaaaatatgttctttttaaggtgcaaaatcgcacaaattcttgcagtagaaaataaaagggaaagaagatagctgctaaccttcatggtctccagctgaagtctaagtagctgaccccaccctataaagcttgtgaaatggtatgtatcgtctaccttatatttgtgatgctagagagattgtatatgtagatggatgagctcagttagaataatataccagtagacttcaagatagctgtattagagtcaaggcaatggtgtctaaagtctaaactgggtcgacttggatgccagcaatgggctatattattagaggcagggatgggctgattgaacaaacattttttggatttaccagaatcatggtttgatgttgttgagcggacctcaaaggacaataacaagacactacagtaagtatttattctattagctaccacaagggaaataaatccagttactgtgtgacatcataatgcaatctttcaggaagctgaagtatgaggaaatagttgccaacatatgaccagattttggaactaatggaaaggagataataaaggtaccatatactatctcattggctacttcctaaatcctaacaatagttcttctgtcctaacaatagactatctgatgaaaacaaaccaagggtctgtcgccttttcttatctgggctgttcctttttttccatttaaccttggggaaacgcgtgtgggggatcttaggggataagtggcaaaaaaaatcaaaatgccatctcttcgcgaaaaacttgtctcatatatggcttttcaagtgtaaaagactctggtatgtgtaccctcaattatactcgtcccttgaactatctttaaaggtaatatatttataatttagggaaattttgttgtatagatgcagtttcttagctgtgttttctgcttggaaaaccaatcaaaagccacagcgcggatacactcaagtccacctccatcaacgggcaaccgtctgcctggggtcgagtgcctcccacccatcaaatccaagcatcaggaggcgctcacctttgacagcggccatccctcaaccctctgtagcatgtggcgcccccgctgcgaatctgcctttacgacagttgccatcctcgcatcccaaaccgtcgatgcccacccctaacacggttcctgacctccctgacaggggactcctctgaaggatataacaagtagtatgtgctctgctttccattttatcccatttttccattttggcatgtaatagtgtggctatgggaacataattgatgaatctatatgttttagattctatttcctaaacataactaagaagcttatccagggaaatcattttagctttttgctgctccttagtgttagtaaactgttgccaccaatggctgtagaaatctgcatcagagtcctagagcagtttccaggctgaatccaccaaacagtttgttttgcagagaagtgattgcttgcttatttcgtgaagggatttctgaaatgaactagaaggctaggagttgaaaaaaaaagtagcttctctttcacttccgtcacataatcactttctacatataatttatcctattgaaacgctttcaaccatcgaattacttctcttattgaatcacttcccacagataacatgcctaaagctacaaagagcaacataattttgataagacattttttagtcgacacttttatgatttatgtggtcaaattacattttctcttatattttctgatgcaaggttctatgatttttcaggcatttgcaaggattgaaaaccactactttgtgaataagggatttttaccctaggactcattcctattggacaatgttgataagatccgacatattaaaggttttattgtactggtatgcttgtcaatgagtgttgctgttttcacaatgtccatgtgtgtctgctagaagacaaaacagcttataatttggaacggatggcatagttttgcctattttggcattgtactttggtccattttggactgttttcttctcttaatttaatgatccgcagctctcctgcgcgtttaagaaaaaaaattggaacagatggagtagatattatattttacaaatcaagttgtgcattgcctttagctcttcatgcctgtctacctttagttgtcattgaacttctggccaagcatgttttctttgttattgtcttgcatgatggcctggataatctggaactcaaatcagtggcagatatcaaatcgataaatataagtgtgcttgtgcctgaacactttgtggtgcagggacgttatgatgtttgttgccctatgatgtctgcttgggatcttcataaggcttggcctgaatcagaattcaaggtaaatggtcctccagtcatttctccaattaccatatatgatattcatgctggaattgcgatttaataggattgttatattgaagcaccaaaatagtttttccagtgtcggaaatcggtgtcgtactgtcatcaattgttttcctttcatcaaacaatgacaatacatgcttggctgcctttgacaagagacagcatgttattaggaatgcagttggttggtcgttgaacccagatataggccacatgatattttgcttagatggttgcaaacaatcaccttttggtagactaagtagctggtatctttcttctatgaaactcatggttcaacttatgaaacacttaggcaaatattcggaaaggaatcttggtaaattcacctgtttttttagaattatgcctgagcatcgataacttgatcgcctatgactccactcgatgcaggtggtagcagatgcagggcactcggccaatgaagttggcatcgctgccgaactgaggtcagccaccgataaactgagagacttgctgcgcaaataagccggcgaaaggcaacctgcacctttatctgatgatggaactcagaggctcagaataccatttaaagttatgcttggacctatattgatgtcttttttggctactaagttttataatatcatgttttagggcatcaaacaattctttgttgttgttgacaaagaggagtggaagattgatacgctttgtgatctttatgatacactcaccatcactcaaatattaattaggattttgtattgtattatctctgcccactaacatggtatctgattgctagcacaacatggtatatttacttgtgtatcttttgtagtattaaaggtgtctacaatgcacacccaacagctgatgtatttatcaactttgcatccttccgaaggttagccattatttccattttgcttttgtgaaagagcacattatcttggataactagaagataactatattggaggattatctaaataggacttgatcgaatctgttgtgtagttttgtttacatagacctatacattttgtcatactcatgatttattctgaaaaagaaaaacttcctctagatttagatgtgttgttgtttgtttttaacatattataagcatgttctttacagatttttaattattattctctgtatcgtatggtttacactgggttgctttacgcaccccctgagattaacagtgaaagtaacttttttgaagacgcaagtcttaagagtactattgaagaaaaaggaagaaatagaggtttaaagagatatgcaagttatgaagagtttcaagtgtatctctaaacactgatgactgcaaggtcagcagcttagtgcctgctttacctttgagattgatttgtgtatcgactgaaattgatttgtttgtatcaccattcttggaaggaagaggttgcaacatcttgatttgattgtctctgcaggggtcttctccttaatggttctgaagcattgttgcttttagtgaaatactaatctgctttctgtttcagggaacttagaggatttgggttcatccaatactttgatcctgaggatgcttctgatgcaaagtaccatatggatgggaagatgctgcttggaagggaaattgttgttgtttttgcagaggaaaacaggaagaagccttgctgaccagtgcgcaggtgcctatgtgatgtgatagttgtttcgttcggttagcagaaactgataggagttatagctcagttggttgtagaagtctggtagccttgctattgatgatatcatataattgtccatgttttacacaatgtttagaagaacctataataatgagcagatgaaagtttccctatccttgatgttttgactataggaacatatagagcaggtgacagtttcgtgagaacttgtgtcatactaaaccagctgcgagctcgagtgagaatacatgcattgcttaggaccactacgttgaatttctatagtacgttgaatttctatagtcaaaacatatacaggcattctatattaacaaaattatagaataacaattagtgtattgctacctgctacatgccaatgtgttaactgttcctaattgttcttgtgcggtgcatatcatagtgttatttgttgttctatatctatattttatactaatttttaactcacgtggcaatgcataggcacatacatagtgctactataaggcaacatttgttagtcatgctatttttcatctcactgggcctaacgcttttctcttccatctaaccccacaatttctcatctcactgggcaaacgcgtataatattcatcatatttgtttgagattaatatcatgcttcgtgtttgtgcaaagaggcaagcttgtagtcgaagataatatatgtgttgttcgttttatgtaattattatgcactaacatttgatcaaataatttgttaatttgtttaccgtcgcaacgcacggacactcacctagttataacaagaagacaacattgggagtggcaaaaatccaattatctcttgtccgcccggcctcttccgtctcggagcgagaaatcagcg

SEQ ID NO: 990 - DNA, 1265 bp, Zea mays
  Intron number 1 from transcript GRMZM2G032528_T03 (locus G RMZM2G032528) derived from phytozome v7.0 (chr-ID 7; pos 2 2681592 to 22682856)
actacggcgcgcggctcgcgcttgcttcgtccacagtaagcttcacgtgtgctataccatctcggattccgtgtgttcgttctttgctgatagttttccgtcatgcatctccttcgtactgtttcatcagtatccagaactccgaagtgagatatatatatttcatatttggtctgcgacttccgctctgcttgtcacagcgctgtcaatagtatgctacatatgcacgcgttaaggctagcagcgttgtttggctttttgtttctctgattaattgtcgcttttctattgttgtggtttgactctcccatggcccatggcgaaggacagatctccggttcctgtcgttttgttgtccatggcatattggcatagaaggaaaacaagtgagatgagatggtggagtctcgagcttgtgctttttttcgtcgtccttttgcctttcacgtacgtatgtacatgttcactttggcagagtgcagaaaaggatgccggggatttctcgcttggatgcatttttctgttcgttcggcacttttctctccttgaagaagtttctaagtattcttaccaatcgagttgctgctttgtttttctctctcgacaagctaggttcatcaccatcgatcacacagtcctatagaggtcaatcaaggctgcttgattgtttctgtttcagagttctctttcgtttgttagtacgcactttgggttttaaacgcggcttattgccgcaaattataatagagcgataccgagtttcttttctggtcgtcttcagtttgttgctcgctcgttactgatcaagctccgatcgcgcccctcaagcgttggtcttgcatggatcttcaatttcatgcccagtttctcttggatgcatctatatgtatatattatatgcccagttcctttggagtttctgctgtactactctatcctaccgatttgtttttttttatgtttcgttttctcttcttatgagcaggcttctcacaaagagttcaagatcgcctgccttactgtcgatgacagcagtttgggcccgggggatgaatatgtatgcctcattatcatttagatttggtttttaatttttccttcatataatgactgtagtaacgatggtgtttgtagtttggcctctatactcctaagctgcttgcagttactgaagatgattatgtatgtatcattgttttcgttcgatttagttttacttttactgaataccatggtgttaatttctgcaggagtctgacccccgc

SEQ ID NO: 991 - DNA, 12076 bp, Zea mays
  Intron number 1 from transcript GRMZM2G378340_T01 (locus G RMZM2G378340) derived from phytozome v7.0 (chr-ID 5; pos 1 55296728 to 155308803 reverse strand)
aaggagggaagagaaggggaagtgtagatgctcggataagggagcgtggatgcgtacgtcgggttcctcagcgtcgtggacgagatcgtggcgtcggttccgtcttccacgcgcgcacgaagagcgggggcgtggcggcggctgagcgtgcgcgacgcgcaactgggcgagcgacggcgcgagacagcggctgcacgcgctcggcgaggcgctgggcgagcggctgcgtgcggggccacggcggggtgggccagctgggcgtggcggctgcgggcgcgagcggcggcgcgctgggcgagcgcgcacactagggttgtggcgcggggctgtggcgcgcgcgaggccgtcgcgtggctgggccgccgaagcaggccggggagagtgcgcgcgctagggcaggggcatgggctgcgcgctggggaagctgggccgcgagaggagggcgctgctaggtgggccagcgaggaaaaaggagggggctggctaggatttttcctattttttctgtttcttgctcttgttttctattttctgcctttttcttttgaactcaaattcaaacacaaatttgcagactacatgaacgcacaaccagaataagtcaacatacaaaaagaaaagatgatccaacatgttgtgcaataatcatgacccttttgggttttattttactcggcttacaattatataaaacaaaataactctacactatttaggaaaaagaaaagaaaagcaaggaaaagaaaaggtaacacctaaattcgatggataatagggaaaaaatttatacccccaaattcagggtgttacagatctaacccccttaacaggaatcttgcccccgagattcaagaaggagctagcaagaaaacaaggttggttcataggttgttcacagctttcttgagttgattttgactctacaagcttaacttgcggactggttgctttgatcttcagatgcctgagaccaatcgatacaattcttgaggatctcttggacctgtgggttaggacccacacatgctttagctgcgccactccgatcttgttggttgatgttgatcgcattgtcttcatcggggttagcggctaacccccttaacaagagtgttgatatgcacttgatgaagatgctaccaactctgatcttgatcgattaagagaggttggagaatgtcaaccagacaggtgcaagagggaagggtatagatagaaaaggtaagcatagatggactaaagagagaaaagggagggcacccaactacctaactatatgtcactcagctaataaactgatgtcattgcggaccaatggccacaacacatcaacactcatttcaaagaagcaaatcagtcattacacaaagacaaacatcacgagcacacaacaacaaacatctcgttactacacgtaacttttaattaaatggtggtctttccttaccaaggggaaacaattctaaggccatcgaaaggcaaggggaataataagacatacaaaataggggcatgagcactataaaggatggagctaaagcaaggattgtaaccgataggggagagaatgcaaccgaggccaagataggtaacacaccattctcaaatggagatgggaaagatgaattctccaaaggtaggcataggataagcatcatggaaaaatctagatattaggacggtaagggtgatatcgagcaaaagccaagacctgcaccgcgatagaggaaaagggaacgaacaagagcgggatgggtaagacatcactcttgaaataaaatgggagaggcggctttaaaatatgggtacatgataatcatcaaggtaaagatcgagggatgacaagggttaaggggataacgaacaaacacacaataaaggatgtattttagacaatacttgtaaggcgtcgaagaagggggagcaatcgatgatggaatagatgaggcattatcctcgaacagggatggaagagaggaggcttcaaagggtaggttcaaggtaagcaggaaggcaagggcacaaatatcatgatggttttaaaggtaataatagacaaggatgtaggggagaggatgtaggggaggaggtaaataggcataatacaaaggatataagtcccataaaggatggagttaagataggacctgcaaatggaaaaggagagggtgcgtccaagggccagataggtaaattgacactctcaaatggaggtggatgagaggggattttttaaaacagtaggaataaagatgagtatcaaggtaagatcgatggacgacaaggtgagaatgatagcaaataaaaacacagcaaaggatggaattgggacaaaatctataaggcgacaaggagtgaaaaagaaatcaagggagagataggtaactcatggctcccaaactaggttgaaagaaaggggaggcttttaaaggataatttcaaggtaagtgtttaggtagaggaaatcaatatcgtaagggtcaaaggcgataacaggcaaggggatgagagaaaagatgaaggcattgaagagccagtggtatgagtacaacaaagaatggagttgcgcccaggcttacacgcggtaaagaagaggatattgccaagggtgagataagtaaaacacttctctcaaattgggatatgagattggagattttagataacagacataatgtaatcatcaaggtaagatcaagggatgagaaaggtgaagataataacaaacaaaagtaggcaaaggatggagttaaaaactcgcaagcgacaaggaagatgatacgaccaagggaaaataggtaaaatacaactataaaattgagatggaagagaaaaggttttaaaggacaagtataacataagcatcaaggtaagatatagaggtgacaagggtaaagaagataatcgtgaaaagcataaccaaggatagagttaaggcaagactcgcgaagtggcgaagtggagagaataatcaagagtaagataggtatgattccatcagaagggttgtagtaaaaattcattaccgaaggaagttacaaggaattaacgagatcaccaaggatgtgcgaaacaaaatgatggctcatggatcatcaagaaactaaggtggttaagggcatgtaagctaaaatgttttgaacagtcattggggtatgaaaataagcatacataagaatgtaagagtatgcaagattccaaggatacggacatactaaggtaagggaatagaaagagccaaaggataacgacttagcaacggaatagggagggatctcagaagacaagaagttcatggacatataaactgaagtgttcatgtaggcaatacaaatcatgatgtaagcatttgaaacaagagtattgaggaatctaggggtatgggcatgtcaataccaagggaatagagatggtcaaatggtagcaatttaataatggaagagacaagaatcacaaaagacaagaaggttatggtcaggggcatctacaaagatgtcgcaagcacaagggtgagatcagatctaatagattgagagaagtatagaccatattagaattaaatacttttggcaagggggcatatagaagcacaacataaaattagtcgaggtgactaatattttgaagcagatcaagatgagtgaagtaataatcataagtccttaacggccatgctactctagtcagcgatctacagtcagcacggctctgataccacttatgtcacacccggttttgggaaggtaaaccgaatgcgaacccatgtacgtgcctggatcagaactcacgtacatagcgattacataaatgactcatcatagcgcaatgcttcgaataacaataaagagtaagtaataatatgaaagactagagtcatttacataatataatcaaagtacacagaatataaacgtagccaacgtaaataaacccaccacaggcagctgactggggaaggtcgctagcctaaaccacgacccgtcgaagtcctggaactcctggagatctgcctcgacgccttcttctttacctgagcatagattgcaccaaaggcaacctggtgttttgtgaaagcaagggtgagtacacatcaacgtactcagcaaatgtcccgtttggctgaagtggactagctttatgtggggttaaggtcaaagcagttgcttttagttggtcaagtatttattattagtgggagccaagttttatcacataaccaacccatgaaccatttcctcatcgaggaaacatcattatcatcatcgaaccataaaccataaatagaaccattgtgtctcacaccatctgtatctctaatcaaagaggatcccaaggccgttcaccgtgagcacgactgatatatcagtttctaaccctctgcagaggtcgcacactttacccacaagtcgtgattcccattctgtccggagatcatgactctccattgatcactaccaaggtgacctagcagggtctcactacgtagcctttacaaagatttcccagaggtcatagccgcccgttaggtttctccagtttgataaacacagtacatctccccaaaggaagggtgagtaataaaaccaaaccaagaacctctgcaaccagcctcggcagagcaagtactgtgtccggaccccattgatggccctacgacgaagccaactactcctctggttcctctaattaatcagctaagggcgtcccattccacactcatggttgcactgttatcctgggttgtcactccccaaacaggtccttacggagaggtactcaggaaaaaggcctgggcctcctagagtatcacaatatcatcattgggataacatcatcatatcataatattcacatcatgttcattgattaaagtaaagcaatagcataaagctaaccatgataacccaaaaggataaacaaggataagtaaatagaaagctagttaatccttatgtttcaattaagtaatgcaggacaatgaattataagtagataggacataatgggtcagaggacacttgccttcaccaaacagatgctcagggtcttcaacctcgtagaactcggagaacttgatcattggtcgccaatgtcttctcttccattccacgaagctcggaaacagatcgcaatctattcgcgacacacaacgaatacaaataggcacaaaacaagcaaacatatatgcataagaacattacaccattcaaataaaaacataataaaacatgcaaaccgaaatagagcacgttactacggtcacgtgaggaaaatgaaacgtcgaactcgaagctacgattgagaagatatcgcgttaacgctaagcaagtattaactataacttttagttcaacattatcaaatataagtattatacatcagtcagttcgattaatatgctatactaacacttgtcagttaattaaataatttaattagaacgagagattctaagcgagatgaatttattacgcgtgaaacaacacgacagcgtgcaaatgacgcgcggatacgcacgacatagcacgctgatgacacacaaaacagcacgcgcgaccagcgcgaacgagcacgccaccacgtgcggaacagcacgcgcgacaggcgagaacatgctaagtagaggacatgtttacactaaacaaatatcgaataaataaaaagtatttaagttaacattaaccatggtaatgtttattatccaagcgcgagttaaaattatacataatcaaattggaatattaatctaatcaacttttagtcgagcaaacattgaataagttatttaaaatgtgcgacccgacaaattaacgttatcaacacgtaagcgaaaacaaataatatcacgcgacactatacaaaacagcgcgcgcgaacagcgcgaaagacgcgcgaaccagcacgcgactacgagcacatcacgcacgagcaacatgcagacagtgcaacgacgtgtgacaacgcgtgcgaaccgcacgcgtgacacgcgcgaacgacgcgcggcaacacgagaataacgcacgaactacacgacgacgacgagcgccacacgcgcgaacagcgcgcgacatgcgaaacaacacgcgtgaacgaaccacggcgacacgcaaacagcgcatgaatggcacacgacgacgcaacaagtgggagattgactttccgtgtttgtattcaacaaatattaatttaacacatttgagtaggcataatcgcattaacatgaatttgtaaaagagtgaattaaaactataaattagttttaatcgaattgctacctattatccgtgagataaacaaataattattaattacttaactaacatatgtgtcaagacaaagtaatatgattatcacgaacatgacgttattacggggctaacgcaaaggaacgaagtctaacgcaacaggaacaaatttataacgcaactcctattgaataaatcaaacatcgcataacgtattgaataattaacaactcgcgcctaaacacgacgcgacatacgaatattaccagattataattaaatgcacaaaactatatttctaagttgattttagttaatataagttatttgcgtacaacattttagataaattgaattgtcaattagttcatgattatagcgaagtgattaattaatgtacgaggatcgcgcacacgatcgacaacaacggacacgtgaacaatacgaaggtgtgcacgtgcagggggtagacgggggggtgctgctggctggcgacgcatgacgaatgacggcgacatatatttaacgtgcgcacaagatcgctacacagttaatgtataattaattaaccaacctagtcgactttacgcgaggaataataataatgcgcgcaaaacgcgcgacgcggaattagtacgaacgacacgcgtgatgaactataatctagttttaattagaaggtcataagtattgaataaaccactaattaaataattaaaatttgcgacgtgacaatataataattctaatgtgtgcacgatatcgcagacttgtgcataaataaatgcagacttccaagtgtagcaaattatttatgtgaactcataaatctggatgtttattacctatacagtcaaggacattttcgcaaaacaagcttccttcttccttgaaacaacgactctgggcttcctgcgcaggggcggtgctgcgggtcggacgtgcagccgcggctggagagccgccatgagcgcacgcaggagccgggaagccgcggccagggctggacagcggtggggctgttgccggggatggccacaatgccacatcgggccgccaggcttggccgcgccatggacggctaggccgcgggacttgcgtgcgcacaagaggcgactggcctgctagagcatggacgacgacgcgacacaccacggcgtggttgggcgagcgcgctgggctagggtgctggcacggctgggccatgctcgcggccaaggagaaggggaggaggggcgtgccaccatacagtcattgtgcactgtccgttgcgcaccacgtcagcgcaaccgttagtgttcagagctgttgaccgttggagacgtttgtcgtcttgctgcaccggacagtccggtgcctctgacttctgcgctctgacttctgacttgcactcttcatcgtggcaggtgactgttgttgcgcagagagacgttgctccgctggctcaccggacagtccggtgaattatagcggagcgcgtctccaaattcccgagagtgactggttcatttgttgtacggccctagtgcaccggacactatccggtgcgccatttttcagcactctaggtcttactccatttttaattgtgtccctaatttgttttctttcttggtttgtgttgaacctaatgcacctgtaatacatgaattctagacaaactagttagtccacgtgttcgcgttggtcgtcaaccaccaaaattaattataggaaatggttaaccctatttccctttcaagtggggccgatgacgtcgaagcagcagggtcgacgacaagatcgcgagcattcatgtgaggacgcttcccaaaaaccttattcgccctctcccggtgtaggatctcgaaggcaaagggttccagagacctgctctcccgaacgcagatgcacgtcggtggtcgggatgaagagaactacaatggagacgcagttatgagtagaggcgaaaacctaacttgtgttggggatgggtttgacgctggctgccaggcgccttatatatggccgagtccgtgaaccgataacgatccgcgatccgatctgcacgtaatccatgaaccaacaactctaaacttatcagccaagcaaccaaaaaataaaacggcaaaaggaagctgcacccccgcaaggtgaggggccggatttcggtggaccattcacgtgcatgtcgtgcgcccgcgcccttcggcctggcccagccaggcgagcgagcgcacgcgcgtgtggttctccacactctctcctctcatccatgacttggtgagtgagtgtagcctccatatttaaactagttccactccacttggactagcaatatggtactaattgttccaccattccctagccatacccatacatgggcttttgagttttttctaggatttaattgaatttctcaattgggcctagcccataaatccaacaatccctcaccagatcaaatgcccatctgcagttttaccactgttcactactgtttaatatactagtatttcagtggagactgttaagttgaacttccacctagaactccaagctacaccaacccacaacttggacaatggactatgccttgaattgcaagttttgtgtgaatgggtttcacttaaagccataaccagtacctggctaccagtagtcaccttcttgggtggagcatatacgccgtactccaaggtctcttcatgagtttactagagatcacccagatctcatatactgcgatgttagacagtctaactcatataggtgtgttctttcaagaatgttctaaaggacaacatcttcgctaataaaagccaacaaaacacattaaggcacaaagccaacctgccttacagcatttgagagtattgcatctttacttagagagggtcaaaggttactctcctcagttcactaatggcttattcttcccaggacctaattcacgggatctccgatcacatagattgggtttccaccatggcaacttatatgggtctcatacccatctctctcgatgtgatttctatcacattacatggtagttcctttgtaaaaaggatctgccagatttttatctgttgaaatataagtcacacttataactctggagtttctcaactttctaacagacttcaatcgtcttttgacatgtcttgatgacttcccattatccttataacttgtcactttagcaatcattgtctgattgtcacagttcataaggatagccggtattggtttctcaaccaccgacaagtccatcaagagttcacgcaaccattctgcctcaacaattgctgtgtcagtgcagctagctcggcttccatggttgacctcgtcaagatagtctgcttgcatgacctccatgataccgcacctccgccaatagtaaagacataaccactggtggcataaagctcatctacatcagatatccagtttgaatcactatatctttcaagtactacatgctgactagaatagtgaattccatagctcattgtaccgtgcaagtagcgcataacccgctcaagtgcatgccaatgaccagtcctagggtttgacatgaacctactcaatttgctcacaacaaacgaaatattaggccatgttgcactagcaagatacatgagtgaaccgacgatctgagaatatcttaattggtctaaaccaattctcttgttctttcgcagtgtcacactaggatcataaggtgttggagaaggtttgcaatcaaagaagccaaatcgcttcaaaaccttttcaacatagtgagattgcgagagagtaatcccaccatctgccttaatcagcttgatgtttagaatcacatcagcttctctaagatctttcatatcaaaactctttgatagaaaagacttgacttcattgatcacatcaatgtttgtgccaaatatcaatatatcatcaacatataagcacaatataactccttcgcccccaccacatcgataatatacacacttgtctgcctcattaatggcaaagcctgtagacgttagagtcgtgtcaaacttctcatgccactgctttggtgcttgcttcagaccatacaaagatttcaataacttgcacaccttgctttcttgaccctttactaaaaatccatcaggttgttccatatagatttcctcgtccagctctccattaagaaaagttgtctttacatccatctgatggacaaggagaccatacgaggcagccaagaaagtagtacttgaatagtagtcattctagcaacaggtgagtaagtatcaaagaagtcttctccttctttctgagtatagcctttagccacaagcctagccttgtacttctcaattgtaccatcaggcttgagcttctttttaaacacccacttacaacccacatgtttacagccatagggtcgattagtgacttcccacgtaccatttgaaagaatagagtccatctcattatgaactgcttctttccaatcatctgcatctggagatgcaaatgcttccataatggtagtaggagtatcgtccacaaggtacacaatgaaatcatcaccaaaggatttttcaaccctttgtctcttgctccttttaggagcatcattgttatcctcctctaggacaatttcatgtggctgttcagaactctcaacaggtgtactatgtttaggagttatctcagaagagtatctagaatttctatgaatgtctttcattggaaatatgtgttcaaagaaagtagcatcacgtgattccacaatagtatcaacatatacatcaagaacttcagatttaactactaaaaatctatacgctatgctacacgaagcatatcccagaaagacacaatccactgtccttggtccaaacttgcgctttttattaactggtacattgactttcgccatgcaccccaagtgcgcaagtatgaaagtgatggttttctccaaactagcgacgaccctaaggggggggtcgccctgggccccccggaatgatgggccccacccctgacaccaaggagcagagcagtcggaacaaaacgacaaggagcagagcagtcgagcagatcatggaagtacggaaccgccaggagtagaaactagcaaactgcatcacggaaacgcttcgtcctgatccgttcgtcgcttcggccttcgagtccttcctcctgtcttcctgtcgggtcgtacgcccatacctggctacctgtgtctcggtcttgcctcgatgcctcggtgtctcgtagcagcaggtcggggctgccgccaccacctccaagactcacgcctccatccttgatgtcgccagccggcggccggacatgcacggcgccctggcggccctgctgcgtagcctgtgctccaccacactcttcccctacttcatgctcgtggcctgcgagggcggcaacctcctccttctaacgacgtgacattttctaatgttatcccagaagacgacgtggtgacgtgacgttgcttcgaaatttctgtattccataatcggtaataattctttaagtttattcttgtaactaagcgataacttcaattcataattctgtttttaatttcggcatatagtcttgtcatctagaaagtatccatctggttctgagaaaacgaagaggaagaaacgagcaaataagttcatagaaacgcggagaggagctatggacaaattttttttctagtaattcaagaacttcaaggaatcaaaatgagatggctatagttgctatagaggagcaacctgataattagctagaagatcagggctttacaccagaagaaaaaattgatcatgagcctatggttaattcacctcctacagaaa

SEQ ID NO: 992 - DNA, 17855 bp, Zea mays
  Intron number 1 from transcript GRMZM2G047730_T01 (locus G RMZM2G047730) derived from phytozome v7.0 (chr-ID 1; pos 2 79485064 to 279502918)
tcaagcagggtgtgaaagggaaatgtgcccttgggccatttctaagtattttggtgatttagtgtccaacacaagtgcctaagtgttgatctatgcaaagtggtggacaaagtgaaaatcaagtcaaaaggtatgtttctcagacttagtacattgttttagagactaatgtattgtgtctaagtgctggaaacaggagaaatcgaattggagaagagatgaccttgtttagccaaagccagctctgtctgggtgcaccggactgtccggtggtgcaccggacagtgtccggtgcgccagactggctcaggcgaacttgctgctctcgggaagaaattaacggcgtacgactaaaattcaccggactgtccggtgtgcaccggactgtccgatgagccaacggtcggcagcgtgatccacgcgggacacgtggccgagccaacggctagtaggaggcaccggactgtccggtgcaccaacggctccaaggctgccaacggtcggctttgccaaataaggaaggaaatccgcaccggacagtgtccggtggtgcaccggactgtccggtgcgccaggcgacagaaggcaagaattgccttccaggaatgctctcaacggctcctagctgccttggggctataaaagggacccctaggcgcatggaggaggataaccaagcattctctaagcattcctaagcactaagacatcgattccgcgcttttgattccttgcaatagcatttagagctctagttgagttgtgaactcattgagttgtgttgtgagctcttgttgcgacttgtgtgcgtggtgttgctgtgatttcttgtcttgagtgtgttgctcatctctcccttactccgtgcttctttgtgaacttcaagtgtaagggcgagaggctccaaagtgtggagattcctcgcaaacgagatatagtaaagcaagcaaaacaccgtggtattcaagtgggtctttggaccgcttgagagggattgattgcaaccctcgtccgttgggacgctacaacgtggagtaggcaagcgttggtcttggccgaaccacgggataaaccactatgccatctctgtgattgatctcgtgtggttattgtgttttgttgagactcctctctaagccacttggcattattgtgctaacgcctaatcaagtttttgtggattaagtttcaagtttcacaggatcacctattcaccccccctctaggtgctctcaattggtatcagagtcgttctcttcacaaagggactaatcgcccgaagagatggatcctaaggggaagggaattgtgatcaatgataaggagaaggagtccttcgtcaatgagccaaaagatgacaagcctaccgacttaggctcgggccacaaacgaagagatgggaagaagaagaagacgaggcgcatcaaggagatcgtctactacgacgacagcgatgagtcctcttcttcccaaaaggacaacgacgacaacgactacgacaaaagaaagacggttaattcgaatttttctttcgattactctcgtattccgcatagctcaaatgcacatttgctttccatccctcttggaaaacttccacactttgatggggaggactacggattttggagtcacaaaatgcgtagtcacatgttctctctccatccaagtatatgggagattgttgagaatggaatgaaatttgatagctccgatagtcctgtatttattaatgaacagattcataaaaatgcacaagctactactgtgttgttagcctctttgtgcagggacgagtatcataaggtgagcggcttggacaatgccaagcagatctgggacaccctcaagatctctcatgaggggaacgacgtcaccttgctcaccaagatggagttggtagagggcgagctcgggagatttgcaatgataaggggcgaggagccaacccaaacatacaaccggctcaagaccttcatcaacaaaataaggagctacggaagcacgcgatggacggaccacgacgtcgttcgcctaatgctaaggtcctttactgtacttgatccacatctggtgaacaatattcgtgaaaatcctaggtacaccaagatgtcgcccgaagaagttcttgggaagtttgtgagcgggcgaatgatgatcaaggaggcgagatacgtggacgacgcattgaatggtccaatcaatgagcctcaaccctttgctctcaaggcaacaagaagcaagggggcgctacctagcaaggtggcacaagttgaggcggcagggctaaatgatgaagagatggctttcatcatcaagcgcttcaagacagcgctaaagggtcacaaggggcagccaagcaagaccaagacaaaggggaagcgatcatgcttcaagtgtggtaagattggtcattttatcgctaactgccccgataatgatagtgaccaggaacaggggaacaagagggagaagaagaaggcatacaaaaaggctaagggcgaggcacaccttggcaaggagtgggactcggattgttcgtcatccgactccgacaatgaaggactcgcagccaccgccttcaacaagtcatccctcttccccaacgagcgccacacatgcctcatggcgaaggagaagaaggtatgtactcgaaacaatgccacttatgattcttctagtgatgatgagtccagtgatgaagaaatagattactctagtttgttcaagggattggatagaactaaaatagataagattaatgaattgattgatgccttgaatgaaaaggatagacttttagagaaacaagaggaccttttatatgaagagcatgacaaatttttagaggcacaaaaatctcatgctttagaagttaaaagaaatgaaatgctttcttgtgaactatcttcttgccatgagacaatttctagcttaaggagcataaatgatgatttgaatgctaagctagaaatagctagtaaatctaactcttgtgtagaacatgttatgatttgcaataggtgtaaagattttgacattgatgcctgtagtgaacacctagtttcaatttccaaattgaatgatgaattggctagtcttaatgaccaacttaagactagcaagaatgaatttgacaagctaaaatttgcaagggatgcctacacgattggtagacacccctcaattaaggatggacttggcttcaagagggaagccaaggacttaacaagccataaggctcccatctccatcaaggggaaagggaaggcccctatggcaaatagtgtgcaaaagaaccatgctttcttatacaatgataggaaatattctaggaatgttcattgcaataaagttgtttcatatgccatgactgcttctagttcccatgttgtgcatggtagaaatttagcgaggaaaaatgttattaatcacatgcctagaagaaatgttgttcatgtttctaggaaaacaagtagtgaaccttctacaatttatcatgctttaaatgcttcatttgctatttgcagaaaggataggaatgtagttgctataaaattaggggcaaaatgcaagggagacaaaacttgcatttgggtccctaaggatatttgtactaaccttgtaggacccaacatgagttgggtacctaagacccaagcctaaatttgccttgcaggtttatgcatccgggggttcaagctggattatcgacagcggatgcacaaaccatatgacgggagagaagaagatgttcacctcctacgtcaaaaacaaggattcctgagagcacctagaggggggggggggtgaataggtgatcctgtaaaacttcaaaacttaagccacaaaaacttattaagtgttagcacaattatggccaagtggctagagaggagtcaaaacacaataaccacgataaatcaatcacagagatgacacggtggttatcccgtggttcggccaagtacaaaacttgcctactccacgttgtggcgtcccaacggacgagagttgcactcaactcctctcaagtgatccaatgatcaacttgaataccacgatgttcttgcttttcttttctcaatcccgtttgcgaggaatctccacaacttggagcctctcgcccttacacttttaatgttcacagagaatcacggagtaaggaaggggatgagcaacacacacaagacttcaaaagatcagagcaacacgcacacaagcagcaataagagctcgcaacacaactcaaagagtacacaactccacaagagctctatatgctatcacaatgaatcgaatgcgctagatcaatgtcttggtgcttagaaaggttgtaggaatgcttggtgttctcctccatgcgcctaggggtcccttttatagccccaaggcagctaggagccgttgagaacacatctggaaggctatccttgccttctgtcgtcgggcgcaccggacagtccggtgcacaccggacactgtccggtgcccgatttgtttccataaaagctcatccgaccgttgctttctgttgcagatctgggcgccgttggcgcaccggacatgtccgttgcacaccggacagtccggtgccccattccgaccgttggctcggccacgtgtcgcgcgccgatcgcgcggccgaccgttggcctggccaaccgttggctcaccggacagtcctgtgtacaccggacagtccggtgaattttagccgaaatcgccggagaaaaacccgagagcggctggtttgctccgcgctggtctggcgcaccggacactgtccggtgcacaccggacagtccggtgccccagcccgaagcagccctccactcctcttcttcttcctgtttctaacacttagacaagaatattagtacacaaaaccaatgtactaaggcttagaaacataccttaacttgtgatttgcactttgttcatccatgggcatattttcacatttaagcacttgtgtttgcactcaatcaccaaaatacttagaaatggcccaaaggcacatttccctttcaatctccccctttttggtgatttatgccaacacaacataaagcaagtggaacaagtgcaaaactacttcaaataaaaactaactttgagttttattcaattttggcatgtatggatcatcctttgccaccacttggtttgtttttgcaaatcaaactcaaatctctatctctaagtcaaacacacatgttgaggcataaagatagtcattccaaaagaggttgatcaaagatttcaaaaactccccctatttcccataatcaacacttctccccacaagaagccaacttttgacaagagagacaataatagacaataaaagcgtttgacaaaacaaaaactctattctactattttcaaaatctctcaagtggtagctgatccatttatcgctacggcctttattttctccccctttggcatcaagcaccaaaacgggatcaaccttggccctttaaccccattgcctcaccaaaatcttcaataagaatacaaaggcaataagagtcttaaagatgaacttggaataagttaccctctcatcggagtgcagtggaagtctttcatggtccaagtccaccttttccctttcaatcctccttcgagactaaatcatcacactcaaacacatggttagtctcaaggggtcaagttgtaacacatctccccctaaacatgtgcatcactttgcaacggacttgtgaggtccagggagtgtttttacaacttgagcaccataataagcaataaaatgcaaaaaggaacatgatcaaatgcataaatacatgtatgctacaattcaatccaagttccgcgaatctaagacatttagctcactacgcagcctgcaaaaggtcttctcatctagaggcttggtaaagatatcagctagctggttctcggtgctaacatgaaacacttcgatatctcccttttgctggtggtctctcaaaaagtgatgccagatgtctatgtgctttgtgcggctgtgttcaacaggattttccgccatgcggatagcactctcattatcacataggagtgggactttgctcagattgtagccaaagtcccggagggtttgcctcatccaaagtagttgcgcgcagcactgtcctgcggcaacatactcggcctcagcggtggatagggcaacggaggtttgtttcttagagttccatgacaccagggaccttcctaagaattggcacgtccctgttgtactcttcctatcgaccttacatccagcatagtcggagtctgagtatccaaccaagtcaaaggtagacccctttggataccagagcccgaagcaaggcgtagcgactaaatatctaagaattcgcttcaccgccactaagtgacattccttaggatcggattgaaatctagcacacatgcatacactaagcataatatccggtctactagcacataaataaagcaaagaacctatcattgaccggtatgctttttgatcaacagacttacctcctttgttgaggtctgtgtgtccgtcggttcccatcggcgtctttgcgggcttggcgtccttcatcccaaacctctttagcaagtcttgcgtgtacttcgtttgggagatgaaggtgccatccttgagttgcttcacttggaacccaaggaagtaatttaactcgcccatcatcgacatctcgaatttttgcgtcatcaccctgctaaattcttcacaagacttttggttagtagaaccaaatattatgtcatcgacataaatttggcacacaaacaaatcaccattacaagtcttagtaaaaagagttggatcggctttcccaaccttgaaagcgttagtaattaagaaatctctaaggcattcataccatgctcttggggcttgcttaagtccatagagcgccttagagagcttacacacatggtcggggtaccgatcatcctcgaagccagggggttgctccacgtacacctcctccttgattggcccgttgaggaaagcgctcttcacatccatttggtacaacctgaaagaatggtgagcggcatatgctagcaagatacgaatggactctagcctagccacaggagcgaaagtctcctcaaagtccaaacctgcgacttgggcataaccttttgccacaagtcgagccttgttccttgtcaccaccccgtgctcgtcctgtttgttgcggaacacccacttggttcccacaacattttgctttggacgaggcaccagtgtccaaacttcattgtgcttgaagttgttgagttcctcctgcatggccaacactcagtccggatctagcaaggcctcctctaccctgaaaggctcaatagaagagacaaaagagtaatgttcacaaaaattaactaatcgagaccgagtagttactcccttgctaatgtcacccagaatttggtcgacgggatgatccctttgaatcgtcgctcgaacttgggttggaggtgccggttgcgcttcttcctccatcacgtgatcatcttgtgctcccccttgatcacacgcctccttttgatggacctgttcatcgtcttgagtcgggggatgcaccataattgaggaagaaggttgatcttgctccaagcattcctgtggtcgcacatcaccaattgccatggtgcgcatagcggccgttggaacatcttcttcatctacatcatcaagatcaacaacttgctctcttggagagccattagtctcatcaaatacaacgtcgctagagacttcaaccaaacccgatgatttgttgaagactctatacgcctttgtatttgagtcataacctaataaaaacccttctactgctttgggagcaaacttagaatttctacctttcttcactagaatgtagcacttgctcccaaatacacgaaagtaagatacattgggtttgttaccggttagtagctcatacgacgtcttcttgaggaggcgatgaaggtagaccctattgatggcgtggcaagccgtattcacggcttccgtccaaaagtactcgggggtcttgaactctcctagcatcgtcctcgccatgtcgatgagcgtcctgttctttctctctaccacaccattttgttgtggtgtgtagggagcggagaactcgtgcttgatcccctcttcttcaaggaactcctccacttgaaggttcttgaactcggacccgttgtcgctccttatcttcttcactttgagctcaaactcattttgagctctcctgaggaagcgcttgagggtcccttgggtttcagacttatcctgcaaaaagaacacccaagtgaagcgggaaaagtcatcaacaataactaaaccatacttacttcctcctatgctcagataagcgacgggtccgaagaggtccatatgcagcagctccaggggtcttgaagtggtcatcacattcttgctgtgatgcgctcctcccacttgtttacctgcttgacaagctgcacaaggtctatctttttcgaaatatacgttagtcaaacctatcacgtgttctccctttagaagcttgtgaaggttcttcatccccacatgtgctaagcggcgatgccacagccagcccatgctagtcttagctattaagcatgcatctagaccggcctcttcttttgcaaaatcaactaaataaagtttgccgtctaatacacccttaaaagctaatgaaccatcacttcttctaaagacagacacatctacatttgtaaatagacagttataccccatatgacataattgactaacagatagcaaattatatccaagactctctactaaaaatacattagagatagaatgctcattagaaattgcaattttacctaacccttttaccttgccttgattcccatcaccgaatataattgaatcctgggaatccttattcttgacgtaggaagtgaacatcttcttctcccccgtcatatggtttgtgcatccgctgtcgataatccagcttgatcccccggatgcataaacctgcaaggcaaatttaggcttgggacttaggtacccaactcatgttgggtcctacaaggttagcacatatatccttagggacccaaatgcaagttttgtctcccttgcattttgcccctaacttcctagcaattaccttcttaccctttctacaaatagcaaagggagcattgcaagcataataaatggtagaaggtttgttcacaacttttctaggaacatgagcaaaatttctcctgggcatatgcacaacatttctcctacacatatctctatcatgcttataggaagaactagaagcaaacatggcatgagaatcataagcatgtgaatcaaaattattataagcatttctagcatgtctcttatcatggtacaagaaagcatggttccttttagcactactagccataggggccttccctttctccttgacgaggatgggagccttatggcttgttaagttcttggcctctctcttgaagccaagaccatccttaattgagggatgtctaccgaccgtgtaggcatcccttgcaaattttattttatcaacttcactcttgctagtcttaagttgagcattaagactagccacttcatcatttagttttgaaattgagactaagtgttcactacaagcattaacatcaaaatccttacacctagtgcaaattgtaatattttcaacacaggagttacttgctacttctagtttagcagttaaaacatcaatttcaccttttaaagaagaaatagtttcattacaagtagaaagttcaccagaaagtattccatttcttttaacttctaaagcaagtgaattttgtgcactaacaaatttatcatgttcttcatataaaaggtcttcttgtttctctaagattctatccttttcatttaaggcatcaatcaactcattaatcttagctatcttagttctatccaatcccttgaataaactagagtaatcaatttcatcctcactagattcatcatcactagaagaatcataagtattagcattatgagtgattaccttcttttcccttgccatgaggcaagtgtgatgctcgttggggaagagagccgatttgttgaaggcagtggcggcgagtccctcattgtcggagtcggaggaggagcaatccgaatcccactccttgccgagatgtgcctcgcccttggccttcttgtaattcttcttcttttccctcttgtttccctgttcctggtcactatcgttatcggggcagttagcgataaaatgaccaatcttaccgcacttgaagcatgagcgcttcccctttgtcttggtcttgcttggctgccccttgtgaccttttagcaccgtcttgaagcgtttgatgattagagccatctcttcatcattgagtccggccgcctcaatttgtgccaccttgctaggtagcgcctctttgcttcttgttgcctttagagcaatgggttgagactcgtggagtggaccgttcaacgcgtcgtcgacatatctagcctccttgatcatcatccgcccgctcacgaattttccaagtacttcttcgggcgtcatcatcgtgtacctgggattctcacgaatattgttcacgagatgaggatcaagaacagtaaatgacctgagcattaggcggacgacgtcgtgatccgtccaacgcgtgcttccgtagctccttatcttgttgataagggtcttgagccggttgtaagtttgagttggctcttctccccttatcatggcgaatcgtccaagctcgccctccactaactccatcttggtgagcatggtgatgtcgttcccctcgtgagagatcttgagggtgtcccatatctgcttggcattgtccaagccgctcaccttattgtactcttccctgcacaaagatgctaagagaacagtagtagcttgtgcatttttatgaatttgttcattgataaacatagggctatccgagctatcaaatttcattccattctctacaatctcccatatgcttggatggagagagaataaatgactacgcattttgtgactccaaaatccgtagtcctccccatcaaagtgtggaggtttaccaagaggaatggaaagcaaatgcgaattcgaactatgtggaatacgagaataatcaaatgagaagttcgaattgaccgtcttcctgtagtcgttgtcgtcgtccttttgggaagaagaggactcatcgctgtcgtagtagacgatctccttgatgcgtcttgtcttcttcttcttcccatcttttcgcttgtggcccgagcccgagttgttggatttgtcatcccttggctcattgacgaaagactccttctccttgtcgttgatcacaattcccttccccttaggatccatctcttcaggcggttagtccctttcttgaagagaacggctccgataccaattgagagcacctagaggggggggggtgaataggtgatcctgtaaaacttcaaaacttaagccacaaaaacttattaagtgttagcacaattatggccaagtggctagagaggagtcaaaacacaataaccacgataaatcaatcacagagatgacacggtggttatcccgtggttcggccaagtacaaaacttgcctactccacgttgtggcgtcccaacggacgagagttgcactcaactcctctcaagtgatccaatgatcaacttgaataccacggtgttcttgcttttcttttctcaatcccgtttgcgaggaatctccacaacttggagcctctcgcccttacacttttaatgttcacagagaatcacggagtaaggaaggggatgagcaacacacacaagacttcaaaagatcagagcaacacgcacacaagcagcaataagagctcgcaacacaactcaaagagtacacaactccacaagagctctatatgctatcacaatgaatcgaatgcgctagatcaatgtcttggtgcttagaaaggttgtaggaatgcttggtgttctcctccatgcgcctaggggtcccttttatagccccaaggcagctaggagccgttgagaacacatctggaaggctatccttgccttctgtcgtcgggcgcaccggacagtccggtgcacaccggacactgtccggtgcccgatttgtttccataaaaagctcatccgaccgttgctttctgttgcagatctgggcgccgttggcgcaccggacatgtccggtgcacaccggacagtccggtgccccattccgaccgttggctcggccacgtgtcgcgcgccgatcgcgcggccgaccgttggcctggccaaccgttggctcaccggacagtcctgtgtacaccggacagtccggtgaattttagccgaaatcgccggagaaaaacccgagagcggctggtttgctccgcgctggtctggcgcaccggacactgtccggtgcacaccggacagtccggtgccccagcccgaagcagccctccactcctcttcttcttcctgtttctaacacttagacaagaatattagtacacaaaaccaatgtactaaggcttagaaacataccttaacttgtgatttgcactttgttcatccatgggcatattttcacatttaagcacttgtgtttgcactcaatcaccaaaatacttagaaatggcccaaaggcacatttccctttcaattcccaagattcaataatattcggtgatgggaatcaaggcaaggtaaaagggttaggtaaaattgctatttcatccgagcactctatatctaatgtgtttttagttgagtctcttggatataatttgttatctgttagtcaattgtgcaaaatgggatataattgtcttttcacaaatgtagatgtgtctgtctttagaagaagtgatggttcattagcttttaagggtgtattagacgacattcatttagttgattttgcaaaagaggaggccggtctagatgcatgcttaattgctaagactagcatgggctggctgtggcatcgccgcttagcacatgtggggatgaagaaccttcacaagcttctaaatggagaacacgtgataggtctaaccattgttacgttcgaaaaagatagaccttgtgcagcttgtcaagcaggtaaacaagtgggaggagcgcatcacagcaagaatgtgatgaccacatcaagacccctggagctgctacatatggacctcttcggacccgtcgcctatctaagcataggaggaagtaagtatggtctagttattgttgatgacttttcccgcttcatttgggtattctttttgcaggataaatctgaaacccaagggaccctcaagcgcttcctaaggagagctcaaaacgagtttgagctcaaggtgaagaagataaggagcgacaatgggtccgagttcaagaaccttcaagtggaggagtaccttgaggaggaagggatcaagcacgagttctccgctccctacacaccacaacaaaatggtgtggtagagaggaagaacaggacgcttatagacatggcgaggacgatgcttggagagttcaagacccccgagcgcttttggtcggaagccgtgaacacggcttgccacgccatcaacagggtctaccttcatcgcctcctcaagaagacatcgtatgagctactaaccggtaacaaacccaatgtttcgtattttcgggtttttgggagtaaatgctacattctagtgaagaagggtaggaattccaaatttgctcccaaagccgtagaagggtttttgttaggttatgactcaaatacaaaggcgtatagagtcttcaacaaatcatcgggtttagttgaagtctctagcgacgttgtatttgatgagactaatggctctccaagagagcaagttgttgatcttgatgatgtagatgaagaagatgttccgacggccgcaatacgaaccatggcgattggtgatgtgcgaccacaggaacaagaggagcaagatcaaccttcttcctcaacaatggtgcaacccccaactcaagaagatgaacaggttcatcaagaggaggcgtgtgatcaaggaggagcacaagatgaacatgtaatggaggaagaagcacaactggcacctccaactcaagttcgagcaatgattcaaagggatcatcccgtcgaccagattttgggtgacattagcaagggagtaactactcggtctcgattagttaatttttgtgagcattactcttttgtctcttctattgagcctttcagggtagaggaggccttgctagatccggactgggtgttggccatgcaagaggagctcaacaacttcaaaagaaatgaagtttggacactggtgcctcgtcccaagcaaaatgttgtgggaaccaagtgggtgttccgcaacaaacaagacgagcacggcgtggtgacaaggaacaaggcacgacttgtggcaaaaggttatgcccaagtcgcaggtttggactttgaggagacttttgctcctgtggctaggctagagtccattcgtattttgctagcatatgccgctcaccattctttcaggctgttccaaatggatgtgaagagcgctttcctcaacgggccaatcaaggaggaggtgtacgtggagcaaccccctggcttcgaggatgaacggtaccccgaccacgtgtgtaagctctctaaggcgctctatggacttaagcaagccccaagagcatggtatgaatgccttagagactttttaattgctaacactttcaaggttgggaaagccgatccaactctttttaccaagacttgtgatggtgatctttttgtgtgccaaatttatgtcgatgacataattttttgttctactaatcaaaagtcttgtgaagagtttagcagggtgatgactcaaaagtttgagatgtcgatgatgggcgagttaagctatttccttgggttccaagtgaggcaactcaaggatgggaccttcatctcccaaacaaagtacacgcaagacttgatcaagcggtttgggatgaaggacgccaagcccgcaaagactccaatgggaaccgacggacacactgacctcaacaaaggaggtaagtccgttgatcaaaaggcataccggtctatgataggatctctactttatttatgtgctagtagaccggatattatgcttagcgtatgcatgtgtgctagatttcaatctgatccaagggaatgtcacttagtggcggtgaagcgaattcttagatatttagtcgctacgccttgcttcgggatctggtatccaaaggggtctacctttgacttgattggatattcagactctgactatgctggatgtaaggtcgataggaagagtacatcggggacgtgccaattcttaggaaggtccctggtgtcttggagttctaagaaacaaacttccgttgccctatccaccgctgaggccgagtacgttgccgcaggacagtgttgcgcgcaactactttggatgaggcaaaccctcagggactttggctacaatctaagcaaagtcccactcctatgtgataatgagggtgctatccgcatggcagataatcctgttgaacacagccgcacaaagcacatagacatccggcatcactttttgagagaccaccagcacaagggggatatcgaagtgtttcatattagcttcgagaaccagctagccgatatctttaccaagccattagatgagcagaccttttgcaagttgcgtagtgagctaaatgtcttagattcgcgaaacttggattgattgatagcatacatgtgtttatgcctttgatcatgttccttaatgcattttgttgtttatttatggtgctcaagttgtacaaacactccccggacctcacaagtcctttgcaagtgatgcacttatttagggggagatgtgttacaacttgactctttgggactaaccatgtgcttgagtttgcttgatttagtttcaaaggtgaattgaaagggaaacggtggacttggaccatgcaagacttccactgcactccgatgaaagagtaacttattccaagttcatctctatactcttattgcttgtttactcttagttgaagactttggtgaggcaatggggttaaagggccaaaattgatcttgttttggttcttgatgccaaagggggagaaaataaggccaaagcaataaatggatcagctaccacttgtgaattttgaagatagtagagtttttgtttgtcaaaatactcttgtttgcctcttattgtcaaaagttggtctcttgtggggagaaggcttaattatgggaaaaagggggagtttttgaatccttgatcaatttctcgtgaaatatctctctttatgtttcaacatgtgtgtttgacttagagataggaaattgagtttgatttgcaaaaacaaaccaagtggtggcaaagaatgatccatatatgtcaaatttgaatcaaaacaattttgagttcttatttgaagtgattttgcacttgttctatttgctttatgttgtgttggcataaatcaccaaaaaaggggagattgaaagggaaatgtgcccttgggccatttctaagtattttggtgatttagtgtccaacacaagtgcctaagtgttgatctatgcaaagtggtggacaaagtgaaaatcaagtcaaaaggtatgtttctcagacttagtacattgttttagagactaatgtattgtgtctaagtgctggaaacatgagaaatcgaattggagaagagatggccttgtttagccaaagccagctctgtctgggtgcaccggactgtccggtggtgcaccggacagtgttcggtgcgcgagactggctcaggcgaacttgctgctctcgggaagaaattaacggcgtacggctaaaattcaccggactgtccgatgagccaacggtcggccgggccaacggtcggccgcgtgatccacgcgggacacgtggccgagccaacggctagtaggaggcaccggactgtccggtgtgcatcggacagtgtccggtgcaccaacggctccaaggctgccaacggttggcttcgccaaataaggaaggaaatccgcaccggacagtgtccggtggtgcgccaggcgacagaaggcaagaattgccttctaggaatgctctcaacggctcctagctgccttggggctataaaagggaccctaggcgcatggaggaggataaccaagcattctctaagcattcctaagcactaagacatcgattccacgcttttgattccttgcaatagcaattagagctctagttgagttgtgaactcattgagctgtgttgtgagctcttgttgcgacttgtgtgcgtggtgttgctgtgatttcttgtcttgagtgtgttgctcatctctcccttactctgtgcttctttgtgaacttcaagtgtaagggcgagaggctccaaagtgtggagattcctcgcaaacgggatatagtaaagcaagcaaaacaccgtggtattcaagtgggtctttggaccgcttgagagggattgattgcaaccctcgtccattgggacgccacaacgtggagtaggcaagcgttggtcttggccgaaccacgggataaaccactgtgccatctctgtgattgatctcgtgtggttattgtgttttgttgagactcctctctaagccacttggcattattgtgctaacgcctaatcaagtttttgtggattaagtttcaagtttcacaggatcacctattcaccccccctctaggtgctctcatggtggcagatacctcaacaatatctgctgtgtcgac

SEQ ID NO: 993 - DNA, 2656 bp, Zea mays
  Intron number 3 from transcript GRMZM2G409839_T01 (locus G RMZM2G409839) derived from phytozome v7.0 (chr-ID 1; pos 2 92699943 to 292702598 reverse strand)
aagccacagtgtcatccaagtatgttttgttccttgataatatctttatcttgtcatggtaataagttatatgaataagttagctttgtctttcttttgaaatactgttggcttgtggaaatgtcgtctgttgtctatatttatttgttaaactgtaatgactcagtaggttagcctggttcagaaggatcataatgcagattacttttatgagatcatatatttgatgctcttccacatcttaaacaatgtcaagccctaatattcactacaactatattaaatattttatccaattacacacacacacacacacatatatatatatatatatatataattgttgaatttgttttttcataattggcacatgctgtttcagcaaggaaaatgaattttatggagtccacagagtacaatgggcaggcttactatgcaacaaattagagaaacgagcatatagcccgcgctaatgctacgatcccacgaaggggaggggtcaacggcggcggcgtgagggaaggggttgacaacggcggcggcgtgagggaaggggttgacaacggcggcagcgacgcgagtgagggggaggcggcggcggggacatgggaggctgggggcggcagggtcgagggggagggatgatgtatgatccaaatagtagtccattggatttgagtgagtaaggagagggggttatctagcaatctaaatcgtgttttgatgttgtgttgagtctgggtgcaatttgtttggtggatttagtggaggttatgggtgtcggggtaatttggttgggtgggttttgcaaagtttaaattggtggattatatagtggtataaatgtgcaacatagattcagcatcagaacttgctcacatgtatttttgtttttcatcactgagtgaactatgtaacaacaacaacaaagccttacagaaaccacaagtcaagtttcaggcacatggataattgtttccatgcactcctattcaaggctaaatctttggatattctgccctttcaaatcttttttacagtctcttcctatatcaacttcggccttccctgtttctcttcccattgctatcgtaactttggatccaatgcctctggaggtgtccgttggacaagtctaaactatctcaattggtattggacaatctttcttcaattggtgctacccctagcctatcacgcatatcatcattctagactcaatctctttttatatggctacaagtccaacgcaacatatatatttccacaacaattatctgttcaacatgtcgtctttttgtaggtcaacattctgcaccatacaaagctagtctaatcgctgtcctacaaaacttgcctttctgtggtaccctcttgtcacgtagaatacttgatgtttgacaccacttcatccacctttttttgattatatggctaacatcttcaccaatatcccgtctctttgtagcgttgatcttaaataccaaaaggtatccttcctagatattacttgaccttccaaaatccaaactaacatcttcctcatgtgtaatagtgtcgaagtcacatctcatatattcagttttagttccattaagtctaaaatctttgaactctagaatctcccaccacaactccaatttcctatttactcctgtcggaatacattgtccaaaaaaaagcacgaaccaagggatattcccttgtatgtccttttgcggcctcatccatcaccaaggcaaaaagttaagggctcatagctaacccttgatgtagtctattctaattgggaagtcatctgtatctccatcaattgtttgaacactagtcacaacattgttgtacatgtacttaatgtccaacgtacttctttggaattttatgtttgtccaaagcccatcacataacgttacctagcattttgtcataaaccttctcaaagtcaatgaaaaccatgtgtaggtcttctgttccctatagtgttccattacttgtattattaagaaaatgacttccatggttgaccttccgggcatgaaaccaaattggttcgtagagatctgtgttattcctcttagacgatgcttgataactctctctcatagcttcataatgactatcaacttaattccgtgataattagtacaactctgaacatctctcttattcttgtagatcagtaccaatatacttctctgctcggcaggcatcttgttcgaccggatgatatgtttgaacaacttggttaaccatactatagctatgtccccgagcctcgaggcatctccatgcctcaattgggagccatactaccagggcccatcgcctgaaccccctttcatccttttcaaagtctctttaacctcagattcctggatcctacacacaaagtgcctattggtgtcatcaaaagaaagtgaactatatggatataaatctttaattctctataaccagcatttaatctgtcaggtctggaaactggtgcattgtagaaacttgctagcagcctgagtcatagaggaatggctatggaagttgaatgcatctgtagtaggctcaagcctgtaaagaacacctgtacaactgttggaacctgctcttggggcggggtggggggtgatgcagaccatttaaggcactctatttttgggtc

SEQ ID NO: 994 - DNA, 1082 bp, Zea mays
  Intron number 12 from transcript GRMZM2G156748_T02 (locus GRMZM2G156748) derived from phytozome v7.0 (chr-ID 5; pos 20056512 to 20057593 reverse strand)
ggtggaggtgagaatacctttgcatggtattaattaatgtaagctataaaaataatgtctttcatttttttgtattatatattgggaacttttttcaagactactactatatatactagtataaattaggagtttatctatctaaagagaggattgatgagcagtttggaatcaataattcaagaacttcttactaaatagctcttctccgaggtgaaatagtggagataaaaaatctaatttcttttactaatgaaattactaagatgggtaatgtctctattgctcaatatcatcaatgtgttgcaggagttgtactttatttaatgaattgaatgcatatctttttgtagatcgaaacaacaaatcattaaaataaattaattgtagcaacttttaacaatctacaaacaagtgtgtatgtcattattcactagtaaatattacatttaaggaaaagttggaatcatgttggatacattaggaatctaggtatggcgaaactattgtgctaaaatggatgggatctcataatggaactaaaatgtctaatatattctgtcttatttgaagttttaattaaaaaataaacatatttgtcttaagttacatgaaatgacccattcatggttaagatgattcaaggaaaatagaataaataaatgtattgctctttcatcctttagcaaagtagtagctaggaaagcttccaatcatgttgaggggtactattttatcctatggtgccatttccacatggtatgtaaagccaacatgtttatggaaattgaaaatccaactttggatgtagtctagcatccaccacccatttacatgtgtgcatgtgatttcaccacgtccttgttggatttatattttttgaatcttttagttttagaaaatttcacatgttgtgatttgttacttatatattagaaaaacatgtgttttttagcttaaccatgacatactaaagtatttttattttaatgatgtatcaaaatcttagtggcctatgtgaagtaattaactctatccataatgcagtttatcaatccttctgagagttttcgtaatatcat

SEQ ID NO: 995 - DNA, 541 bp, Zea mays
  Intron number 1 from transcript GRMZM2G704403_T01 (locus G RMZM2G704403) derived from phytozome v7.0 (chr-ID 10; pos 16990256 to 16990796)
gcggacaacaaatcctagatcttttgctagctgaggtttgtatattccattctttggatttgcttctctggttgttggtttggtcagttgcttttgaaggtaactcaacttcctattaggttatttgcagatacaaccagcaaagattggcttccttttatgcctagcttagaaatgaataaagtatcctagaataatgccaactttccaagataaatagttctctttgatttctacctatgtgataaatttacagtagatacatatcatcgatttgtatgcctatcatgtagacctatcaagcttacccaagtgtcattcaaatacttttattattaattttagtcgacactggcttagatttcttttttactatgtttttgtagtgttgcaaagttcaacgtggattgtctggtagagtcagaaatctgaattgttgccactatattcattccatgtttacatatgctgatttgttttctactatttacttttaatgttttggagcagcactcaagcaagaggcagcccttccgatctt

SEQ ID NO: 996 - DNA, 16873 bp, Zea mays
  Intron number 3 from transcript GRMZM2G419875_T01 (locus G RMZM2G419875) derived from phytozome v7.0 (chr-ID 5; pos 1 56537216 to 156554088)
agccacctggtttttgttgtcgtggtgggaaggttgagatagccccactggagacccctccccaactcaagaggttgtgggatagtgtagactctgatgctaggcactttcatgataactgtgacggaacctcccaagtaagtaggcccacctacagttgtccttgtccaacagacatcagacaccctgtagatgttcctaagtcacttgacaagctcggtattttttcttacctcaccaggaacgtctcacccgtcttgcagacattacagaacatcggagatacagaaatgcggaagcaattacataatcttacatttatttcaaaaagcaagcttgagttattttattacagaccagactaaaagtgagtgtagagtagtaatattatacaaaccatgggaggcacaaactcctcccgataagctataagcaaaagaacctaagtggaggaccgagtcctcctcccgcacttcagtcttgtttttcttcatttggtaccaccttggcacagaagcagcaaaagtctgctacttcctcacctaaaaacaacaaagggataaaccctgagtatggaatactcagcaagtcttacccgactaaggaaaagactctcaagggtatgctgggtaaataggagtcaaggagaggctttagcaaaaatcaacttatacttttgcagaagtagcttactaaagtgagtccttactttcaatcttttaacgccatgttaagtattaatagactctgtttgcattctagtctaatttcaattcatctcatccatacaaaccatcatttttatccatagtgttcacatcccgactttaggttgtagaaaagtgaccaagtcttcataaccgcgaaggtacggcgatccgaatcgattatactcagctgaggatctccaatcacacgacatatgtagcacttaacccttgcatatgtcaacccgccaccggagttcttaagaccggatcaggttcacgcaaaccgagagcacagatacaccaccgtccagcctcttgccacggagggtacatgctactctcgccaccgctccacgcccatttcgtgttatcttattccggccttagtctgcccgaggtaaggcttacccatgacgaggcatgtgaccagttaaagggtcctcggtcagcacgcctacatacgcgttaatccttaaccaacttgggtagaacatcacctgttcctaacccaagtctcaatttaagtatttccatccttaggattgtgtctgttccttaggatgaaagagcatcacggggaactttgcagtaagatcccactattgctcctaatgaaatattcttgcaggtagaagccatcctctccatggttaaattgaggacaacctctatccacaagatctaagcaaggctaagcatttttgtaaatcatattttgatacttcacagaagtatctataaaggtatggatatcaaggaaagcaatgcatcaaagggtttcaagtaaatcctatgaacctaatgcacatttcactagacttaagtgtgcgaaaagtatttaaaaaaacacaaggaaaggggttgcatgcaccggggcttgccttcgttagtaggtgagtcaggctcggacccgcagatgtcgaagtagagccaagtccttgcccgagattccaaaggtggtggtgtcttcttcaatcacttcactctcttctccgttttctaaatataaccatataggtatatatataagaatgaatgccatgtaatgcttatgagagtgcaaagataatacaaatttattaactaagtcttgagtacaactttccttcacggaactccgagaacctagggtttccggagtcgggaaaggagttcaaagggcagggggtggttttgggttctagttatcaaacatggtccaaatcaactcaaactctacccaaggcttctaaataatgtgaaaagctcacataaaaagtttgggcatttttggacttaccaaatattttctaaaaatccataaccaatacttttaactactttaaataccctaaaatttcttatttccactaaaaatcataaaactatttttactaaattctagggaaaataacaagcctaggaaaattagtttcacaattttagcatttttctacatttttctataattgttttagttctggaataaaaagaaaaagagaaacttgtaacagtcttgggccgattctgaccccggtcggcccaacgacacaggaaaagggtcgcgcccctgtgcacgcccgcgtgctctagctaatttgcacagaagccctggtcttttcagctaaatcgaagcaggttcgtttactattgtactaagtcgctgacaccttgcagaaataccctcgttcttctatttcttctccacaaacgtccctggccacggtgcgctcgtcgttcatcacagacgccgcacgggctggccatgaccggcgacggtcgccttgtctagctacagggaaggcataaccgacccaaggttaccctagaacatgctctaatcggactaatttgggccaggatgtgcctgaccacggtgaccgcggatacagaactcagatcgaggtgttccggttgattaggtgaagtcaagctccaagggctgggcaggtaacgatcacaagcaactgtgggtgctgaaacacaaacaacgagggcgaggacggaccaggaatcatctggccgcgagcaggtgatttacggcggcgcagtcgaccgagttcgggaaaaacggcgttgcgacggttctgggtgaaattgggggtggggattgaggctacacgaccgtaagaaactatagcttcaccgtgcatactcaatttgggagaagatggaaagggcagtacgaattttgggttcttctcaagcttgcggttgaggcggtgagttcctcgccggggttcacgctgctatttaaagccacggcagaccggcgatctctgcacggccacagataacttctttagtgcatgccaagcacgtagaggagtggtacagtgaggtaggatcacgatgcaaaggacaccgcggcgaaaatgactgatgcgatggccgccggtgaataactccggctggggtagggcggtggtgccacgtatgggttgtctcgccccgacgttatccattcccgactgcgcacgaacctggacggcggcggcacgagtttttgcgcagagaggtcgccgtcggcgagatttttctgtcgcggtgatctgatccccaattgagttactgtaccatggcgaagttcagttcagacgcctgacagagccttttgaagcttagttttctctcaattttgaatggcaacttaacccaaaatctgcatcaaagttgtaaagcaacataccctctacaatattgccatatgatgctgccacaaaaactcattggatcatgcttgaatctaggcttgaagttgatgtcagttcattattagtctgaaaattcagaccaaaccagtctgacagccagacttcaggcttaaatatctctggatttttcttaacaagtgagcttacaaccttaagcaaagttgttctccattaattggtctacaaacttgttgtggtgacctagggcaaaaaccctataatttgaaagatgcaaagctccaaagttgagccaattctctgattttcagacttagaatagaactcaaatgaggtccattttgcatttaagtccaaaacttagggtttggctttcaagtccacatatttgtgaaccaaatgactttatatgtttaaacatagtagtttttacactttagtccaaaggttcatcacttttgcacataagcccctagggtttggttttagggttttccagggttccaattagggtttctggtatcccaggggtataaatgtgattcaactttattcttggggtcatcttatgacttttaccctaaagcttttaggttttctcaacttgggttaagttttacccctttaaccactatttagggttaagtcctttaaccagggttctatttgcaaaacattaaaacaatacaacttgtttgaagtttttacctagtgaatgcactctaggtgtatcaaacatatgcaatgccaatgcttatgatgtcatgctcaagttttagttatagtaacaccaggggtgttacatccttccccccataaaagaatctcgtcccgagattaaaaatcctagggtaggtaatggcaaaggaaacacatcacatttttatttccttatttttggtacaaggcaggggtggtgtgggggttcattcctttattacacagctatacaggctttacaatttacatgaggctaaaaagcctgggaaattcttattcaagaagtcttgagtttcccatgtagcctcatcttcagaatgctggttccattgtatcttataaaacttgagagtttttctccgggtaaccctgtccttttgatccagaactcgaataggatgttccgagtatgttaaatctggttccaggacaacatcagttacttcaatggttcgatcggaaacccgaagacacttcttcaattgtgacacgtggaacacattgtgcccagcagacaatgtttcgggtaggtggagtcggtacgtcactggtccacattgctcaatcaccaggaatggaccaatgtacctgggtgcaagcttccctttaatcccgaaacgcgatacaccctttattggtgaaacttttaagtagacataatcgcctaccagaaagcataagggttgtcgtcatcggtctgcataactcttttgtcgagtctgagctttcttcatattatgaataattctctgaaccttttcttcaacctctttcaccatatcaggcctaaagaagtatctttctccaggttcagaccaatttagcggagttcgacaccgtcgtccatataaagcttcaaaaggtgccatcttgatactttcttgatagctattattatatgaaaactctgctaagggcaaatattcatctcatttctgtgggaattccagaacacatgcccgtagcatatcttccagtacttggtttaccctctcagtctgcccactggtttgaagatgataggtcgagctgtggagcaacttagtacccagggatttatgaagttcttcccaaaatttggatacgaattgcgatccatgatccgacactatggtcttcggaacaccatgcagactaagaatatgagcaatgtataattgggcatagacagtagccgggtgatttgtcttgactggcagagaataagtaatttttgtaagccgatcaacaataacccagatagagtcatacccttttgtagtcctgggtaatcccacaatgaagtccatactaatatcttcctatttccatgttgggataggtaaggattgtaatggaccagcagtcttcatgtatatggccttgacacgtttataagtgtcacatctagccacatagcgtgcaatttcaatcttcttctttgcccaccaggagaacacataaggttccatgtgtgcaacttgcttcttctgatgacactgtactatctgagtctgttgggtggcaattatgcaactttacccaaatagaatcagatgcaccatcttgggtaaaacacacaagaagaggtttaccaacaagtggttacagtaagttcatagcacacgagacgggtgtgaatgtcgaataatatcacggtcaactcgtgttagccagggaatccaagtccacgaaaggtgatatagattcaagaaaaatcactagcggagggatctaaaaatgcggactttgcaactagtccattttatccagcactagtcatggatcggcatgatcacacatgcaggaaaagcatgtgtgaggcggtcgaggcacgactagagcgatgattaggtggctattggctgacttaatctcattttggtaagtactttctttagagtgggttgaaccaaagtgagtttagacaactcgattaaaacgatctctaaactcagccttcgttccaggtgcagttacaagttagtcaaaaccaacttgttgaactacttctaacgttaagcaaatcctctcagtatcattggtaagccaaggggttgagagttcacatttgcaagcaaaaggtcatgcatttgggtaaaaatccatttggtcatgttgttcatccgtttcttcatgcaagatggattatccacttggttagggaatacatggattaattaggaaagcgaatgaacaaactcctgcatctcagtagcagagaaacagatctccattttaggggctaatcagttgttttcttacactaaaaagctccaaggctccacctttacacaaaggatgtaaagggaacttgtatgagtagtcactaccaagatcaaaagaaataagaccacacatgaaagtggtatgcccttttgatccaatggaaatgacagatgttgcttgatctcttcaagacaacatagagagtgtttcaaggaaaggtcaatggaagacaacacatcagtgtaattccataatggatcatgactagagacctcgataccgacatgcgccaagcagcaaaatcctgggtgcacattcataggaggctctcagcttcgctgcagtaccatacgttcttaaccatgccatcattacaaaactggcaccaatactgaatcagattaggtaagggtgacaatatacaaaaggatactctaccagtaaaaatggttacaagtagagagccaaatagatcatggcccaaggcatggccataatctaaacttgatgaaagaagtacgatgggagactgttaattcagcccaagcatatttctatgcccatcatatggatcacaaggtcaaggattaagttggtaggccttcgataggtatgaaggaaccaaaggcatcaaattcaaggaaatggtcggacatgtcttttctaggttgggttaatagagcaacacgacgatccgcaaggagaggccaaatacactagagacttcaacctgcatcagctgaccaagagaatggctctaaaaggaggcatgacttgagatccttgtttgtagtctaggtacactttaggttcgacaaagaaattatctaggcatggatttgtacgggtgtggtcataaagtgataacagaaaattcgactttaggctgggtcatggttcactaaatacaaatatagcctaattcttgggcttaggcaatcaagtcatcaactctctattggtcataactcaacctgatggttctcagatcagggttgagaatttctttttgctggactaaccagttcatgcccaaaatgacatttatgtcttggctattcagaacaaccatattagtaggaaagtcctgtctggccaatgttaagggcacctggtaagccacttttttttacttttggtagctttactgtcgggcgtagaaaaccattcgtcaaccaacttcatagagggagggggcctgaaaaggtccagttcaccatcaagtgcttctcccgctacatgagaaggtctggcttctgtcccgacaagattcgcagggacgttcgggtgcagttgtgaatacaacacatgaacttcttcatgtagtgtattataatagacctgcaagttatccatggctaagctaagctcctccacacgggctcgagctttggcttccttagcccagacgagtaaacgagagttaaccacccaatcgagtgctaaatctcgtttcgcgagttggtcttgcaagtagcggatggctacatccgcgatccatagatcattcccgtgacggaattctgattgaagcagttcgacttgtgctttcagatccccgatagaatcattgctaccactgctactttcttcatgtcttggggcaagttaatggcggaatatgccaataggtctagtagatttgcgcgcggtctttctgatgcgcgacaacatttctctaagggggaatttttttaatatagtgcttagcatgatgcatgtgtaagtacagaatcaaccttagtcgattcaaccttctatacattgcactcttcctatctggtcttttaagatagactcttcagaatacttacgtaagaagagaaaagagtttttaggtaagactttggaaaatccttttgaagatgcctcataatatctgcaaagaagggctacgctccgataccagctgtgacgaaacctcccaagtaattaggcccacctatagttgtccttgtccaacagacatcagacaccctgtagatgttcctaagtcacttgacaagctcggtatttttccttacctcaccaggaacgtctcacccgtcttgcagacattacagaacatcggagatacagaaatgcggaagcaattacataatcttacatttatttcaaaagcaagcttgagttattttattacagaccagactaaaagtgagtgcagagtagtaatattatacaaaccatgggaggcacaaactcctcccgataagctataagcaaaagaacctaagtggaggaccgagtcctcccgcacttcagtcttgtttttcttcatttggtaccaccttggcacaaaagcagcaaaagtctgctacttcctcacctaaaaacaacaaagggataaaccctgagtatggaatactcagcaagtcttacccgactaaggaaaagactctcaagggtatgctgggtaaataggagtcaaggagaggctttagcaaaaatcaacttatacttttgcagaagtagcttactaaagtgagtccttactttcaatcttttaacgccatgttaagtattaatagactctgtttgcatctagtctaatttcaatcatctcatcaatacaacatcatttttatccatagtgttcacatcccgactttaggttgtagaaaagtgaccaagtcttcataaccgcgaaggtacggcgatccgaatcgattatactcagctgaggatctccaatcacacgacatatgtagcacttaacccttgcatatgtcaacccgccaccggggttcttaagaccggatcaggttcacgcaaaccgagagcacagatacaccaccgtccagcctcttgccacggagggtacacactactctcgccaccgctccacgcccatttcgtgttatcttatttcggccttagtctgcccgaggtaaggcttacccatgacgaggcatgtgaccagttaaagggtcctcggtcagcacgcctacatacgcgttaatccttaaccaacttgggtagaacatcacctgttcctaacccaagtctcaatttaagtatttccatccttaggattgtgtctgttccttaggatgaaagagcatcacggggaactttgcagtaagatcccactattgctccaaatgaaaatattcttgcaggtagaagccatcctctccatggttaaattgaggacaacctctatccacaagatctaagcaaggctaagcatttttgtaaatcatattttgatacttcacagaagtatctataaaggtatggatatcaaggaaagcaatgcatcaaagggtttcaagtaaatcctatgaacctaatgcacatttcactagacttaagtgtgcggaaagtatttaaaaaaacacaaggaaaggggttgcatgcaccggggcttgccttcgttagtaggtgagtcaggctcggacccgcagatgtcgaagtagagccaagtccttgctcgagattccaaaggtggtggtgtctttttcaatcacttcactctcttctccgttttctaaatataaccatataggtatatatataagaatgattccccattgtaatggctttatgaggaggcgccaaagtataataaaaaattttattaatttatgtcttgaggtcacaaccttttctttccacggattctcccgagacctataggggtttcggggatgtcggagaaggggagttcaaagggcccagggggggggggttttgggtttttagttatcaaccatggttccaatatcaactaaaacttctaccccaggggtttttaaataatggtgaaaagctcacataaaaagtttgggcatttttggacttaccaaatatttttttaaaaatccgtaaccaatacttttaactactttaaataccctaaaatttcttaatttccactaaaaatcaataaaactatttttactaaattctagggaaaataacaagcctaggaaaattagtttcacaattttagcatttttctacatttttctataattgttttagttctggaataaaaagaaaaagagaaacttgtaacagtcttgggccgattctgaccccggtcggcccaacgacacaggaaaagggtcgcgcgcccgcgcgcgcccgcgtgctctagctaatttgcacagaagccctggccttttcagctaaaccgaagcaggttcgtttactattgtactaagtcgctgacaccttgcagaaataccctcgttcttctatttcttctccacaaacgtccctggccacggtgcgctcgtcgttcatcacagacgccgcacaggctggccatgaccggcgacggtcgccttgtctagctacagggaaggcataaccgacccaaggttaccctagaacatgctctaatcggactaatttgggccaggatgtgcctgaccacggtgaccgcggatacagaactcagatcgaggtgttccggttgattaggtgaagtcaagctccaagggctgggcaggtaacgatcacaagcaactgtgggtgctgaaacacgaacaacgagggcgaggacggaccaggaatcatctggccgcgagcaggtgatttatggcggcgcagtcgaccgagttggggaaaaacggcgttgcggcggttctgggtgaaattgggggtggggattgaggctacacgaccgtaagaaactatagcttcaccgtgcatactcaatttgggagaagatggaaagggcagtacgaattttgggttcttctcaagcttgcggttgaggcggtgagttcctcgccggggttcacgctgctatttaaagccacggcagaccggcgatctctgcacggccacagataacttctttagtgcatgccaagcacgtagaggagtggtacagtgaggtaggatcacgatgcaaaggacaccacggcggaaatgactgatgcggtggccgccggtgaataactccggctggggtagggcggtggtgccacgtatgggttgtctcgccccgacgttatccattcccgactgcgcacgaacctggacggcggcggcacgagtttttgcgcagagaggtcgccgtcggcgagatttttctgtcgcggtgatctgatccccaattgagttactgtaccatggcgaagttcagttcagacgcctgacagagccttttgaagcttagttttctctcaattttgaatggcaacttaacccaaaatttgcatcaaagttgtaaagcaacataccctctacaatattgccatatgatgctgccacaaaaactcattggatcatgcttgattctaggcttgaagttgatgtcagttcattattagtctgaaaattcagaccaaaccagtctgacagccagacttcaggcttaaatatctctggatttttcttaacaagtgagcttacaaccttaagcaaagttgttctccattaattgttctacaaacttgttgtggtgacctagggcaaaaaccctataatttgaaagatgcaaagctccaaagttgagccaattctctgattttcagacttagaatagaactcaaatgaggtccattttgcatttaagtccaaaacttagggtttggctttcaagtccacatatttgtgaaccaaatgactttatatgtttaaacatagtagtttttacactttagtccaaaggttcatcacttttgcacataagcccctagggtttggttttagggttttccagggttccaattagggtttctggtatcccaggggtataaatgtgattcaactttattcttggggtcatcttatgacttttaccctaaagcttttaggttttctcaacttgggttaagttttacccctttaaccactatttagggttaagtcctttaaccagggttctatttgcaaaacattaaaacaatacaacttgtttgaagtttttacctagtgaatgcactctaggtgtatcaaacatatgcaatgccaatgcttatgatgtcatgctcaagttttagttatagtaacaccaggggtgttacaataacattaggtttttaatggccatttctctttcacttccctattatgttgcctcgatagtatgacaactaatgtaaggtattctagtatatacacatttcgagcacagggcatgatgtaccacaatatcaattcatttggtagggagggtggggcagagcataaacaccttgagatttacttttatgatgatgatcccactctcgagcatcggtaccgtaagtgtcgcgaagagcatcaacagacagacaaagaggttatttgacagatagtcgacatactatgtggaaacctgtactccgagcaccttaggaccatgggccacgttgagaaccttgatgactatcgtatcgcattgaacttagaccaaacgttgaaccagaagacatataacacacctctcacttcggaggtggccgctgtctggatcgaagggagcgaagggcgaggccaattcagcaagagtgttatgctccatgggaaggacagttcaagccactgcatccgctcataccatggatgctacgatgcactatcatatccattgttattccctagaggcgaacttggatgacatgcaaatatcccaaaggttggagtatccatggacgaagtggatgcataccgtgcgacacatagggcaagcaatgcaaaggatgaagatgcaggttagttgtttctttataatttgatatatttgcgtattattaactatcttttcagcatcactcactttataatacttgcgtatgcagaatctcctagccatttatgtgtgtctgtacgtgactactactgctacaaattccagattcgccccggggtattcaatccaatacttcatggaaagcggcttttccagcagttcgcggtcgacatgtacataaagattgagagctctcgtttagatttcatatgcaagaatcaagatcggttaagggcagacctgtaccagggcttggttgatagcatgctagatggagatattatggcagagaaggttggcaagcgaactgtgctatagacatcgtttattggcggtcctcgtgacatgagacgtcggtatatggatgctatggctctagtgcggaagtttggtaaaccagacatatttcttaccatgacatgtaaccctaactgggatgagataaggagggagcttctccctgggcagacaccgcaagatcgtctagatcttgtagtgcgtgtctttcatgcgaagctacaagagttaaagcataggctgactaaacatgatattcttggtaaggtccgagcctacgtctatgtcgtggagtttcagaagcggggtttgccgcatgcccattttatactcataatgcagaggaagtacaagctcacatgtcctgagcagtacgaccttttgatctcagccaagatcccaagcaacaagtaccctggactacgaaagatggttatcaagcatatgatgcatggcccatgtgggtcgctaaaccctaactacccatgcactaagggtcgtaaatcgtgcaagaatcattaccctcggcctttcagtgacacaaccttgcaagggaaggattcgtaccctatttacagacatcgtgacgatgaccgtaaaggaaaggtctgagggtgcgaactggacaatagatgggttgtcccttataacccatacctccttcgtctcttcaactgtcacatcaatgtcgaggcatgtgggagcatcaaggctgttaaatacctgttcaagtacatatacaaaggccatgatcgtgcgtctgttgttatgagagatgcgagcaaggcagatgatgatgttgatgagatcaagcagtatagagatgcaaggtgggtgactcctccagaagccttgtggaggatatacagctttgagcttagtcagatatctccacctgtgatgcagctgcaactccatcttccaaacatgcacatggtggcgtttcatgagcggcaaatggtcgagcgagtcgtcaactatccaggtgttgataggtcgatgctcacaacatattttgaggtgaataggctacatgaggaggctcgtggcatcctatatcgtgacttccctgagtggtacacttggcagagtggtaagggcaaagtatgacaacggaggaaacgagatacaggtggacaagtcggtagaatagtctctgctcatccgaccgagggggagcgctactatcttcgtgttctcctaaaccacgtgattggtgccacctcctatgtgcatctaaggacagttgatggtgtcaccctactgacttttcatgaggcaacagagagaaggggactgcttgagtcggacaacacactggatgagtgtctcactgaacgtgctcttttccagatgccatcggcgctgcgacggctttttgccacaatactggtgtactgtgagccaagcgatgtggctggactctggaagaaacacaaagattctatgtccgaggactatcaacacaggagtcagaacaaaactcatgttgagtagatggtattgattgacattaggaacatgctgtagtcaatgggaaaggacataaggacattccctctacctcctatcatcgacgcgtatgacgatgctattagtacttctagggaggtttacgaggaggaaagtatccaaccgatagcgggagatgtggctcttaaagactctcttaatgaggaacagagggccgcctatgataagattatgtctgccattaacaccgatcagggcggattgttctttgtggatggacctgctggcaccgggaagacttatctatacagagtgctgctcgcgatgctacataactagggcaagattgcagtggcaacaactacatctggcgttgcagcttccataatgcctggaggaagaaccgcccattcacgcttcaagataccactcactattgacaatggcgatgtatgtagcttcacgaagcagagtggaacaacaaagttgctacggaaagcatctctcattatctaggacgaggcttctatgactaagagacaagccatggaggcactggacaatagcatgcgcgatataatgggtcaccccagactatcatttggtggtaaaaccattgtcttatgtggagatttcagacaggtcttgcctgttgttcgtaaagggtcaagggctcaagtggtcgtgtcttcgctacggatgtcttacctatgggagtccatgtcccacttaaagattgttagcaacatgagagcaaaaaatgacccttggtttgcgaagtttttgctgcgcgtaggcggtggaactgaggacacaaatagtgacagtgacattcgtcttccttacgatgtatgtgtgccttacaatgggagtgacaacgatcttgacaacctaatagacttcgctttctcaaatctcaatgaaagtatgtctgattccacctacatcacttcaagggcgattctgtcaacacgaaacgactgggtggatatgataaatgttaagatgatagatcattttcaaggggagcatatggtgtaccataatttcgatagcgccatggatgatccccataactactacccacccgagttcctaaacacattgacgcctaatgggctgccacctcatgttttgaagctcaagattggatgtcctattatattacttcgtaatatagaccctgcaaatggactttgcaatggcaccaggctggtcgttcgtggcttccaaagaaatagcattgacgcagagattgtactgggtcaacacgttggaaaacggattttcctaccgcgtatacctctgtgtccctccgttgaagagatgttccctttctagttcaaaagaaagcagtttcctgtacggcttagctttgcaatgacggttaacaaagcacagggtccgactattcccaatgttggtgtatacttgcctgagccagtgttctctcatggccaactatatgttgccctatctagagcgacaacacgatcgaacataaagattcttgtcatcccagccgtcgatgggaggaaaaagtcgaggaagggtgtaaagaaaaaccccaccgtagattgtgggacatataccaagaacatcgtctacaaggaggtcctaacaaactagacccatggtaagagttgcatgttcagctaacaaactaataggatgatgttcgtcttctatttgattggtgtgctgtattatcaagtcatgtttgcatgctacaattgtttttattagagccgcacaatttttgataatcagtaaccttcttactgcctgcatactgtcttaaagtattgttgagttttggatcattttttatattagcaatataactttttatgcatctaacaatttgttatgcattcactcgaatgtaggtttttgtcccgcgagaatggaatctctatttgtaggcttgtctcataacaagccaaaaatatcggtggcaaccgcaatagttcgagaaggtattataatttttgtagtactttatggatcaatttgtattttttatgataactaatttcagttttatgttacgactagttgctcctagactatatttgcacgcagggtgatcttaccatcattgattttattaaggaaat

SEQ ID NO: 997 - DNA, 9858 bp, Zea mays
  Intron number 2 from transcript GRMZM2G396494_T01 (locus G RMZM2G396494) derived from phytozome v7.0 (chr-ID 1; pos 1 72840770 to 172850627)
gtgcaacgtgcttgtctttgttgaactactcagaggtatggatttcttcagtttaaattgaccagtggatcatgaaaccttttcttcctatcttaattgccaacaattggtatgttttttttgcagtgttgaaagtcgcctagaggggggtgaatagggcaaaactgaaatttacaaagttaaccacaactacaagccgggttagcgttagaaataataatgagtccgagagagagggcgcaaaacaaatcgcaagcgaataaagagtgtgacacacggatttgttttaccgaggttcggttcttgcgaacctactccccgttgaggtggtcacaaagaccgggtctctttcaaccctttccctctctcaaacggtccctcggaccgagtgagcttcttcttctcaaacaaatggaacacgaagttcccgcaaggaccaccacatgattggtgtctcttgcctcaattacaagtgagtttgatctcaagaaagaatgagaaagaaaagaagcgatccaagcgcaagatctcaaatgaacacgacaaatcactctctctaatcactgacgctttgtgtggagttgggagaggatttgatctctttggtgtgtcttgtattgaatgctagagctcttgtaagtagttggagggtggaaacttggatgacttgaatgtggggtggttgggggtatttataaccccaaccaccaaactagccgtttggtgaaggctgctgtcgacgggcgcaccggactgtccggtgcgccaccggacagtgtccggtgcgccagccacgtcacccggccgttagggttcgaccattggagctctgtcttatgggcccgcctggctgtccggtggcgcaccggacaagtcctgtagactgtccggtgtgccacccgcgcgtgctctgacctctgcgcgcgcaggcgcgcatttaatgcgttgcagtcgaccgttgcgcgcgaagtagtcgttgctccgctggctcaccggatagtctggtgtgcaccggacatgtctggtgaattttagcggagcggaaatccgaagctgacgggttcagagttgctctcccttgaggcagtgaattatagcgaagctcctctgagaattcccgaaggtgcgaagtttagcttggagtcccctggtgcaccagacactgtccggtggtgcaccggacactgtctggtggcacaccggacagtccagtgtgctagactagggtacacttcggttgtcccttgctctctttgtttgaacccttttcttggtctttttattggcttattgtgaacctttggcacctgtagaacttatagactagagcaaacaagttagtccaattatttgtgttgggcaattcaaccaccaaaatcaattaggaaataggtgtaagcctaattccctttcaatctccccctttttggtgattgatgccaacacaaaccaaagcaagtatagaagtgcataattgaactagtttgcataatgtaagtgcaaaggttacttagaattgagccaatataaatacttataagatacgcatggattgttcctttcttatttaacattttggaccacgctttgcaccacttgttttgtttttgcaaattcttgtgtaaatccttttcaaagtccttttgcaaatagtcaaaggtaaatgaataaaattttgcgaagcattttcaagatttgaaattttctccccctgtttcaaatgcttttcctttgacttaacaaaactcccctcaataaattcctcccttagtgttcaagagggttttgatgttaattttgaagagggtataccaatttgaaattacatcacaaataagataccaatttgaaaatcctcctttaaaaccaaattgaaagactaaatttttttgaaattggtggtggtgcggtccttttgctttgggctcgtgctccctccccctttggcataaatcgccaaaaacggaatcattagagcccttggaactactttctcccctttggtaaacaaaataggagtgaagattataccaaagttggagaaatgctcggagcgacggcgaaggatgagttatggagtggagtgaaagcctttgtcttcgccgaagactctaattcattttcaatacacctatgacttggtttgaaattcacttgaaaacacattagccatagcatataaaagagatatgatcaaagatatatttatgagctatgtgtgcaagacatcaaaagaaattcctagaatcaagaatatttagctcatgcctaagtttgttaaaagtttgttcatctagtggcttggtaaagatgtcggctaattgatctttagtgttaatatatgcaatctcgatatctcccttttgttggtgatcccttagaaaatgatactgaatggctatgtgtttagtgcggctgtgctcaacgggattatccgccatgcagattgcactctcattatcacatagaagagggactttggttaatttgtaaccatagtccctaagggtttgcctcatccaaagtaattgcgcgcaacaatgacctgcggtaatatactcggcttcggcggtaaaaagagcgacggaattttgcttctttgaagcccaagacaccaaggatcttcccaagaactggcaagtccccgatgtgctctttctattaatcttacaccccgcccaatcggcatccgaataaccaattaaatcaaaggtggatcccctaggataccaaagcccaaatttaggagtataagccaaatatctcaagatttgttttacggccgtaaggtgagcttccttagggtcggcttggaatcttgcacacatgcatacggaaagcataatgtccggtcgagatgcacataaatagagtagtgaacctatcatcgaccggtataccttttgatctacggatttaccttccgtgtcgaggtcgagatgcccattggttcccatgggtgtcttgatgggcttggcatccttcattccaaacttgcttagaatgtcttgagtatacttcgtttggctaatgaaggtgccctcttggagttgctttacttgaaatcctaataaatacttcaactcccccatcattgaaatctcgaatttctatgtcatgatcctactaaattcttcacatgtagattcgttagtagacccaaatatgatatcatcaacatatatttggcatacaaacaaatcattgtcaagagttttagtaaataaaggatcagcttttccgactttgaagccattagcaataaggaaatctctttggcattcataccatgctcttggggcttgcttgagcccataaagcgccttagagagcctataggcatggttaggatactcactgtcttcaaagtcgggaggttgctcaacatagacctcttccttgattggtccattgcggaaggcactcttcacgtccatttggtaaagcttgaagccatggtaagtagcataggctaataatatacgaattgactcaagcctagctacgggtgcataggtttcaccaaaatccaaaccttcgacttgggagtatcccttggccacaagtcgggctttgttccttgtcaccacaccatgctcatcttgcttgttgcggaagacccacttggttcctacaacattttgattaggacgtcgaactaaatgccatacctcgttcctagtgaagttgttgagctcctcttgcatcgccaccacccaatccgaatcttgtagtgcttcctctaccttgtgtggctcaatagaggaaacaaaagagtaatgctcacaaaaatgtgcaacacgagatctagtggttacccccttatggatgtcgccgaggatggtgtcgacggggtgatctcgttggattgcttggtggactcttgggtgtggcggtcttggttcttcatcctccttgtcttgatcatttgcatctcccccttgatcattgccgtcatcttgaggtagctcatctctttgatcttcttcttcatcaacttgagcctcatcctcattttgagttggtggagatgcttgcgtggaggagggtggttgatcttgtgcatttggaggctcttcggattccttaggacacacatccctaatggacatgttccttagcgcgatgcacggagcctcttcatcacctatctcatcaagatcaacttgctctacttgagggccgttagtctcatcaaacacaacatcacaagaaacttcaacttgtccagaggacttgttaaagactctatatgcccttgtgtttgaatcatatcctagtaaaaagccttctacagtcttaggagcaaatttagattttctacctcttttgacaaggataaagcatttgctaccaaagaccctaaaatatgaaatattgagctttttaccggttaggagttcgtatgatgtctttttgaggattcggtgtagatacaatcggttgatggcgtagcaggcggtgttgaccgcctcagcccaaaactgatccgaagtcttgtactcatcaagcatggttcttgccatgtccaatagagttctattcttcctctccactacaccattttgttgtggggtgtagggagaagagaactcatgcttgatgccctcctcctcaaggaagccttcaatttgtgagttcttgaacttcgtcccgttgtcacttctaattttcttgatccttaagccgaactcattttgagcccatctcaagaatccctttaaggtctcttgggtatgagatttttcctgtaaaagaacacccaagtgaagcgagaataatcatccacaataactagatagtacttactcccgccgatgcttatataagctatcgggccgaataggtccatgtgtaggagctccagtggcctgtcagtcgtcatgatgttcttgtgtggatgatgaacaccaacttgcttccctgcttggcatgcgctacaaatcctgtctttctcaaaatgaacatttgttaatcctaaaatgtgctctccctttagaagtttatgaagattcttcatcccaacatgggctagttggcggtgccagagccaacccatgttagtcttagcaattaagcaagtgtcgagttcagctctatcaaaatctaccaagtatagctgaccctctaacactcccttaaatgctattgaatcatcacttcttctaaagacagtgacacctacatcagtaaaaatatagttgtagcccatttgacataattgtgaaacggaaagcaaattgtaatctaaagaatctacaagaaaaacattagagattgaatggtcaggagatatagcaattttacccaatcctttgaccaaaccttgatttccatccccgaatgtgatcgctctttggggatcttggtttttctcgtaggaggagaacatcttattctcccctgtcatgtggtttgtgcacccgctatcgatgatccaacttgagcccccggatgcataaacctacaaaacaagtttagttcttgagtttaggtacccaaatggttttgggtcctttggcattagacacaagaactttgggtacccaaacacaagtctttgatcccttgtgtttgcccccaacatatttggcaactactttgccggatttgttagttaacacataagaagcatcaaaagttttaaatgaaatactatgatcatttgatgcagtaggagttttcttcttaggcaacttagcacgggttggttgcctagagctagatgtctcacccttatacataaaagcatgattagggccagagtgagacttcctagaatgaattctcctaattttgctctcaggataaccggcagggtataaaatgtaaccctcgttatcctgaggcatgggagccttgcccttaacaaaattagacaatcttttaggaggggcattaattttgaaattgttccccttttggaagccaatgccatccttaatgccagggcgtctcccactataaagcatactacgagcaaatttaaaattttcatttccatgttcatgctcggcaattttagcatctaattttgctatatgatcattttgttgcttaattaataccatatgatcatgaatagcatcaacatcaacatctctacatctagtgcaaatagtggcatgctcagtggtagatgtagagggtttgcaagaattaagttcaacaatcttagcacgcaatatatcatttttatctctaagatcggaaattgtaacattgcaaacatctagttctttagccttagcaagcaatttttcattttcatttctaaggctagcaagagtaacatttaattcttcaatcttagcaagtaaatcaacattatcatttttaagattgggaattgaaatgttacaagcatttgaatcaaccttagcaattaaactagcattttcatttctaaggttgttgataacatcatggcatgtgcttagctcactagttaatttttcacatttttcagcttctagagcataagcatttttaaccttaacatgctttttgttttccttgattaggaagtgttgggggccttcggcttccgaaggtcctcaaaaacgtgatttgacaatgttttctaagtatgcgagcaggtatcttcggaatcaggttgcgggtatacagaagcatggttaagacgaagcttgactgggacggcgatcacgatgaaggataagatgatcacgaagctatgtgcagaagagtttcggcatcacggcgggaaaggggaaaccgacttaaagatgaaaagccaaactagacctcgaagaattactatagagttattgataaatgtaaagggcattaatgtaattttgcatgggctgcgacccgtgcctataaatagatgaacagtattctcgtactgttcacgctgatttggcattcacttttgcgtcacgcctgtattctctttccttcaagccaaaggtacatttgtaatttatcattgtttgcacaagtaatataaatggaaatagattaataataatgtttacagaaattatattactttctgtattttgtttgaatgatctccatcttttatcatgatcatgaaggtaagtccttcatgaccttcgtcctaaattcgttatatccgaagggaaataatgatttgaaagacgaagggctttgatatttaagattttttgttgccttgttcttgattcatagcatttgagaacaagtccacaacaggaagtcctcttgggtatccaagaggtcatccttttcatggatggcactaattaattcatttaacttttctttttgttgcatgtttaggtttgcaaaaagaatgcgcaagttatcctcctcattgctagcatcatcctcatcactagaggtttcatatttagtggaggattttgattttaccttcttctttttgtcgtcctttgccatgaggcacttgtggccgacgttggggaagagaagtcccttggtgacggcgatgttcgcggcatcctcgtcggaggaggagtcggtggagctctcgtcggagtcccactcccggcaaacatgggcatcgccgcccttcttcttgtaatacttcttcttctccttccttctccccttcttgtcgtcgcccctgtcactgtcactagaaataggacattttgcaataaaatgaccgggcttaccacatttgtagcacactttcttggagcggggtttgtagtctttccccctcctttgcttgaggatttggcggaagctcttgatgatgagtgccatttcctcgttgtcgagcttggaggcgtcgataggtgttctattcgatgtagactcctccttcctctcctccgtcgccttaaatgcgaccggttgagcttcggacgtgcagggactgtcaagctcgttgatcttctttgagcctttgatcatcaattcaaagctcacaaaattcccgattacttcctcgggagtcattagtgtatatctaggattgccacgaattaattgaacttgagtagggttaaggaaaacaagtgatctaagaataaccttaaccatttcgtggtcatcccattttttgctcccgaggttgcgcacttggttcaccaaggtcttgagccggttgtacatgtcttgtggctcctccccttggcgaagtcggaaacgaccgagctccccctcgatcgtttcccgcttggtgattttggtcacctcgtctccttcgtgcgtggtctttagcgtgtcccaaatctccttggcacctttcaacccttgcaccttattatactcctctcgacttagagaggcgaggagtatagttgaggcttgggagttgaagtgttgaatttgggtcacttcgtcctcatcataatcttcatcccctacggatggtacctgtacaccaaactcaacaacatcccatatacttttgtggagtgaggttaggtgaaatcgcattaaatcactccacctagcataatcttcaccatcaaaccttggtggtttgcctaatgggacggaaagtaaaggcgtatgtttagtaatgcgaggatagcgtagggggatcttactaaacttcttgcgctcatggcgcttagaagtaatggacggtgcgtcggagccggaggtggaaggcgatgaagtatcggtctcgtagtagaccaccttcctcatcttctttttcttgtcgccactccgatgcgacttgtgggaagaggatttctttttcttccctttccctttgttgcgggactcttccgatgaagccttcccgtggcttgtagtgggcttgtcgccggtctccatctccttcttggcgtgatctcccgacatcacttcgagcggttaagctctaatgaagcaccgggctccgataccaattgaaagtcgcctagaggggggtgaatagggcgaaactgaaatttacaaagttaatcacaactacaagccgagttagcgttagaaataataatgagtccgagagagatggcgcaaaacaaatcgcaagcgaataaagagtgtgacacacggatttgttttaccgaggttcggttcttgcgaacctactccccgttgaggtggtcacaaagacagggtctctttcaaccctttccctctctcaaacggtccctcggaccgagtgagcttcttcttctcaaacaaatggaacacgaagttcccgcaaggaccaccacacgattggtgtctcttgcctcaattacaagtgagtttgatctcaagaaagaatgagaaagaaaagaagcgatccaagcgcaagagctcaaatgaacacgacaaatcactctctctaatcactgacgctttgtgtggagttgggagaggatttgatctctttggtgtgtcttgtattgaatgttagagctcttgtaagtagttgaagggtggaaacttggatgacttgaatgtggggtggttgggggtatttataaccccaaccaccaaactagccgtttggtgaaggctgctgtcgacgggcgcaccggacagtccggtgcgccaccggacagtgtctggtgtgcgagccacgtcacccgaccgttagggttcgaccattggagctctgtcttgtgggcccacctggctgtccggtggcgcaccggacaagtcctgtagactgtccggtgtgccacccgcgcgtgctctgacctctgcgcgtgcaggcgcacatttaatgtgttgcagtcgaccgttgcgcgcgaagtagccattgctccgctggctcaccagacagtccggtgtgcaccggacatgtccggtgaattttagcggagcggaaatccgaagctggcgggttcagagttgctctcccttgaggcaccgaacattgtccggtggtacaccggacagtccggtgaattatagcgaagcgcc

SEQ ID NO: 998 - DNA, 1065 bp, Zea mays
  Intron number 2 from transcript GRMZM2G144742_T05 (locus G RMZM2G144742) derived from phytozome v7.0 (chr-ID 4; pos 1 35909473 to 135910537 reverse strand)
ggagaagccacgttctggcctttgctagtgcagatgtatgcatcaggctttttgagcataccatctatttttttagggttggtcggatatgaaattaataatgtttgttgagcataactttatgtgatttttttacaagtttaagctcaatttcatattcctatatcccaaccaggacaccataattgcttagtactcttcactttatgctttataatatcccaggttctggagaaagttattcaactttatttagtgccagttgctgaatccttattctatataatgcatcctctcttggtagctgaactgggttttttttcaaatgaatcaggcaccacaaggcaaaagaagctcaggtgagaatgttgtgatggttgatccactggaagctaagcgcctagctgctaaacaaatgcaagaaattagggccaaagaaaagctgaaggtgcattgttgctgtattggagtgtatcattccttagactaaatcaaataatcaatcatatatgctaatagatggaaccttcgtagtaaggaaaagtggaaaacatataccttttgtttgggccaattgttggtgctgaatcgttgtttcagaaaactggaaacagaactaggcttttccctgttcatgctgtcctgcaatatgagaacgagaaacaccattgtagtatttgtttggtcgtaattttgtgttccggagctgaatcggaacggttcctaggtgtcaaatgcaccctaaattaaaaaaatctacctgtggtggaaattatagctcataagagagatgctgaaattcatttagtgaaacatatatgtttattttattatttcactaatgtatggtctccactttctgttaacaaatagttatttaatcatccattaattggtgtctgtttgtcctggagaacatcatctgctgcactcccctctgaatcccaatatcagtctatattatatattgatgcttcattgtgttttcttactcttcaaatttgatccgaatcactggtctgttgtgtagaggcgccgtcaagcagaagcgatcaacggggcatt

SEQ ID NO: 999 - DNA, 2065 bp, Zea mays
  Intron number 2 from transcript GRMZM2G125784_T01 (locus G RMZM2G125784) derived from phytozome v7.0 (chr-ID 5; pos 1 579462 to 1581526 reverse strand)
gaactgcaagcccaccgggttccacacccgcaaaggtaccatttcgccctccactggtccagcagtcctccaggtcgcccgtgctttgtcgtctgggctatgttttggtggtgcagttcgtcaattcgtacccgtctcttgcttgcaagattaggcgatcattgagatattggggtgaggattcacaggagtgaactgcgcgatcattgtcgcttgaagagaccatctgctggaaaaacataatgacgttaggtgaaacttagcaatgttttcagccaaacggagtggtgatggtatgcatgagttgaacagcgttaagtgaatcgggcaatccagcggcagttgacgacgtcccaattgtaagtttataatttcagttgacaaaccacctggattaccaccccacattattatccgtttgaatattagggggtagcagtggcacctgacaaaccatctgggttatcaaatgcaagctgctagaaaaattatggctcaatatgcagactaacataatcatcacttctcaagctatgaattagtaggttaaccctataattgctcaaaggagaaacagggaaactatggaataagcaaatctatacattactaaagaagcgttggatctaactacaaatagaagaacatttagaacaggattaatgttcaatgtttctagattctagtatagataatgtcataacaacacatagaaaactgccaaaaatgacagtaaaattaatcattcacaaagcaagactggaataacaagaaatcactgttaaccatgaaggagctcgcaaatgcatgtgattgctatcccaaacaatctttctgctgcaacattgcagttcaggtagatatcatatattatgaatttatgatgacaacaaatgcctttccttccaagtaaatttataaaataatcttctagcgtcgcaagatcaagtatacctatagagttggaaaacatctcacctcattatgacgtatcatatatatgaatgatatacatgttactatactctagatgatttatttcgactgcatcaataattcaatagcataagtagtcaaagctacacagacaaatagtcagaagagtgcagaaaaatagccaatttaagctatgaatgagtccaaaaatagaaaaacaaactcaaaaggctagataaaatcgaagcatgtagtattctataactacagtactgtgttcattgagtgagcaaagcagaccttattgcatagaagcctcccatataacaatatcttgatgcactgattcacccattggcccctgataaatgagtatttagaggtctaacatataaaataatggatgagcaaacaaattagtatgaaactaagacctacttgagcccgtcaaagtccaaattcaaataaattctttgactttccagctacaagtaggtggtgtgtcacatttgtggtaaccagagaagtgtagctgaccagagaagcagaagcagtaacaacaacaacaacagagtgttttagtcccaagcaaattggggccggctagagttgaaatccaatcgaaaccataagtcaaagtttaggcacatgaatagttgttttctttttttttctatttaaggctaaatctttgggtatattccattcttctccatttactgcatcttcccatggcaacaacttcggtcttcctctgcctctctttacattgctatcgcatcttacgatcctattatgcaccggtgcctctagaggagttgcctgagaagcatagtctctttttatatgtagatcagcatatgtggtgtagtggcagggatgttaatgtcttgctggtttgagccccagatcacgcctagtccgtagagcacctgtaggaaactaggaagtcattctttacaccacactctttgtcttacttctcaagtcaacactttcaacactattattaagttgtagttgacataattctagttccattcaaccctttctcattgctgtgagtaaatgtttttacttgttatctttataagctatcttaaaagcttaactgcttttgtaggtggat

SEQ ID NO: 1000 - DNA, 4199 bp, Zea mays
  Intron number 1 from transcript GRMZM2G170326_T01 (locus G RMZM2G170326) derived from phytozome v7.0 (chr-ID 6; pos 9 5611070 to 95615268 reverse strand)
tctgctattgctcaaccgcgcaggccttgaccaaggtatgccattatgctcgactctccaatgaagtatggtattatatgtttgttcatactcagtttgctaggagcaatttttgaattgtagaccatgtatggttttgcttgattctgagcacttaagtctcatgtgaattgcatttaaataagaatctatggaaaaaaactagaaccaccagagggttaatgccacagacttctaatgcctactgccccatccatgcacaaattattatgtcatggcatagtaacaagttgctgcagacacaccttttagtacttgaaataacatgttattgacatgaatgaagaaggcccctttacccaacagaagactgtttggggaatttactaagtttatgagaagatctgctgcatcatctgataactgtaaaaaatgtgcaaattattagcaacccagtttttgtcacgatacaatcataagttgttaaaatacaagtgaaaaaagaaaataaaaactacaaatcatctagagtgagagttcatctacaaaattagcatgtcaatggtaaaaagtctaggaaatacttgtccatggtttgaagactataataggtgtttcgtttttaaaggtaaaaaagggacacaataaaacaaaattctattcggaacttcagcttggtgcctccccttctacttcaacaatagtttgttcattgagaaacctattttccactttgcatggtggccgctattttgatagagcaattgaagccattgtcttcccctactgtcaaatgctgttagtttaagcattttaaaacatatgcgaaaaatattagaatttttcgattgatggtttggatataaagataaaagtgaatagagcttgaagtaaatttttattagtacaaatgatagtgttctttatagtataattaactacctattacagtcactttcgtttacacagttctctatctattgcttcagcctccaaataaataaacaaatagaatggttactaggattttggaagtaccaagtttgaattttaacctacctgctgtcagttgaagtttttggtgtatactctcatgagctaagggtcgtcgatatcttgatgactggtagagttggttcagaaccttttatttcatctataattttgccaagaatgacttcatcgtgttcatcgtcctcttttagtgcagatatttccgaatttggagatggggatgcttctgagctaaccaaaccatcattcagtgccttgtcctcgtcaaatgcaaaccaattggaatttgtaaagagcgaaccactgcaaacgacatcttcaaattagtccattcttattgcaaacatcaaatgtgcttacaaaaaggaagaacagtaatcagattaaatagtaaagaataaacctttcttggtcgtctccaaggcgaagggaggagattacaacctctgcagattcatcatcaaaatatacatcatgtggcagatataataaccagaaaaaacatcaaacatcaggagatacaatctgttcagttcaatgcaagatgatacaatgaatctaaacagtaaatctgaatatacctcatcatcccgctcaagtgatgcttgagcctacatgtataaacaaaagttactaaataaattttaaaactgtttatgtgttggcatgttgcaaatacagaacttggctgtttaggtccatcaaaattaagaatattcttttaatgtaattcagcacgcccctagcagcaaatatgccacttcctgtcatctccttccacttgggagctgagcatggtttcctgaaggggaaaagggaacgggggaacgacttggtgagccacgggtcccttcatctattgaacttgacaaaacatacacaaatcatgagccttgtgatcaacacagattcaccgattgcgtaccaaaactggattagttgtttaaatagtgcaattgaccttggatgaaactatctatgcaaaagtagggagatgttagataaatcaaagagtcagagatggagggagattggagagttgaacttatgtgtagcaaagattgtttgtcagtgactgcagtgcatcagcagtgaattcgttctcatcatagagcacatggtaatggttcgggcgacttgttccctgacaagaaatatttttgacactcaatgtctgataagtgctgttctggaaaagaatgtgcaacgtacctgaatgccaacatgactacacaagtagaaatcaaactcagtagggtggcaaatcttttggtcaaccacagttcgtgcagcacaagtgacgcgcaaaataaggcccagacaacaaatgcttatagaagcagcaactttatgaatcccaataacagtgtgatacaaaaaacactaagcagtctagccttgataaacaataagatatatggtaacctcctttacctgggtttcgtacgaccatgggctgtttttgctgcctcttttatatgatcaaaggtagcagatcttccataagcaatattttcccaaatgctcaaactcaataaggctggttcttgtgtcaccagaccaatttgacttcttaaccattctactttcagtttttttatgttttccccatccaaaagaacttcacctgaaaaataatagtagtcttttgagtggaaatagaagtgaatagatggtgagagactatgcacgatgatgcaaattagcaagactcatacaagcgcggaacaatatgctgatgggacataagggtaacacatgctcaggtgttaatatatttggcttctgaggaaactttctccagacctccaaaaaaatataagattcgatcagatatgtgtactctcgttgtaacgtacgggcacacctagtagactatagagtttgcaaactttaaaagtgcaaaaaaaagatgggcggcagtcccgtgaggcctgagtctcacgtttcaccaacaacaggccgactccatccctcgactctactctacgcggcacgcgagcgcaggggcccgtccgcgaaaaagaccccacaccgcccactacaccggccaatcacccgccggcgcgccatggccgccgccaccgctaccggggactccgtcaaggagccgctcctccaccgcgcgtacccgtcccaggtcgcgtcggcctcctcgcccgcgctcccgtccgcgcccccggggtccgccggccgtcgcttcccgggggtgctcgacgtccccaacctcaagaagcgcggcggcggcacgcgcagctggatccgcgtcgaggccgtcacggcctccgtgcagacgttggagatcgacaaggccaccatgatgcggcgctgcgaactccccgcgcgggacctgcgcttgctcgacccgctcttcgtgtacccgtccacggtcctgggccgcgagcgcgccatcgtcgtcaacctcgagcagatccgatgcgtcattacagccgacgaggtcctcctgctcaactccctcgacagctacgtcctccagtacgccgccgagctccagcgccgcctcctccagcgcgctgagggcgaccagctaccattcgaattccgggcgctcgagctcgccctcgaggccgcatgctccttcctcgatgcacaggtgatcatcaaaactcctcgattccatgtctgtgtctgaactacataaatgccctagtgcaaaaaacacaagaaacggtatcttggcgaaggaacgtctttagcacggttctctaagtctagatacggttccactcatataaccgagcctctatataacccacataaatgagttgtatcttgagagtttctagcgaataagatacaagacttcaatacgttgggttgtatgaagggtttttttaggtgtatttagtgcttagagaaccgtaatatagtatctagattgtacatacccttagtttggttattcgaatcagagtgggttcagttcccatgattggactatgacgggacgcgataatgatgatgttctaacatggtttgcaactgtgcaattggctggcttaatggtccagtaattgtgtttttgcagccaatgagaggttgatggtattctgtgagtatcatgctgcacgtgctagaatcaaattttttgctggatgaatgggattccccaacttcccaattgttgctgatcatcgagtaaaaatgttgcagctaactctctg

SEQ ID NO: 1001 - DNA, 15375 bp, Zea mays
  Intron number 8 from transcript GRMZM2G064933_T01 (locus G RMZM2G064933) derived from phytozome v7.0 (chr-ID 8; pos 1 61109465 to 161124839 reverse strand)
gtgctagggctttgacgactcctgctaaggtaagctgtgttatgacatgttaaaacccccaaaaaaagttcgactgaaagctgggccaacacatcaagaaatatattctccagaaccttgtgtcctcgtttttgtgggaaaccctaaccctaacaaggggttgggtgttgtattaatagagtgtgttaggtgggcctggcccattacatgggtgagatggtaaatacacggggtgaaccccaaaccctaatcgcgtactctaacatctccctgtatagtcacaactctatcatgtacagatgttgagactggatcgaaagtctataaatacactcgacggaagcccattggtgaagatgtcggtgaactgtagcgtggtggggacgctgagaacccgaacgtcaccgacggcgaccctttcgcagacaaagtgcaggtcgatttacacgtgcttcgtgcgctgatgctgcacgaggttggtggagaggtagaccgcgctgacattgtcgcagtagacgaggctggcacgctggagggggctgtggaactcgtggagctcgtggacaagctgtcgaagccaggagacctttgccacgacgttggctacgacgcagtactcggcctccgtgctggagtgagagacgacgggctaccgcttggcggcctaggagacgaggttggcgcccaggaacacttcatagcctgaagtggagcggcgcgtgtcgggacagccgacccattgtagcatcccaaaaattcaaatcctgaaattttctcaaacttgctctaaatgaatttcatttaaaaatgtttgtttgcgagttgatatcaacaaataaagtatagtggtctatattctctctaaaatcctcctcagaatatcctacaaatattttcccagtgatccccttcaaattctttccagaaatactgcccagatatttccctagtgatccccttcaagttctttccagaaatactgtccaaatattccaccgatatatctccaagtattttcctcttgagaaataccttcagaatcatttttcaagtccctataaatattttcttcataactttcctcatgctcatacatatacgtatgcctccagtgtcatacggtgagctctacaagctaatctcacttatacaagacaaatacatgctaatctcccactaatcctctcatcctcccactaatcctctcatccctccccctaatccccccaccatggctataaatagaggggcaagggcctcctctcatcccaccccaagccatttcatggcaactctcttcccccccacacacacacccactccatgttccacacaagcacacactagcacaaggatcgttcaatcgttcttcgatcggtcgtcccctgttcttagtttgttcgttcgttcgttcgatcgttcgtccgatcgttcatggttcgttcgtccgttcgtccgatcgttcgatcgttcgtccgttcgttcgtccaaataatctttttcctaccgttatgctgccgaaattccgatcgttcgttcgttcgatcattcgatcgttcatcattcgttcatagttcctattcatcgttcatcgttcgttcgtagtccctattcatcgttcttccagataatctttgtcctgtcgttatgctgccgaaattccgatcgttcattcgtccgatcattcgatcgttcgtccgttcgttcatcaaaataatctttttcctaccgttatgctgccgaaattccgatcattcgttcgttcgatcattcgatcgttcatcgttcgttcatagttcctattcatcgttcatcgttcgtcatggtcctattcatcgttcttccagataatctttgtcctgccgttatgctgtcgaaattccgatcgttcgttcgtccgatcattcgatcattcgtccgttcattcatagttcctattcatcgttcatcgttcctatacatcgtttatcgttcgttcatacgactattcaccatcactattcaccgttactattcatcattactattcactgacactattcaccatcgttactattcagtgttacaattcatcatcgttactattcattatcgttactactcatcgatgatatctagtaactttttcgtcgtcactattcatcgttactattcatcgttactattcatcgattagccgatcaccctaaattttaactactcatacatcatgctgtccagtccacctaagaccagccagacccatattccagtcatacgaactccggtgactgtgattttccttccagtagggaacttcccatctggtcacccatcctgggtttctccaagttgagcatgcttaactttgagattcctttgaaccaggcttccaaactcagattccaaaaattcttgtttctaaattcttatcaaactattccctatccaaccatgtcatcccttaagcctggtccatattccagaaaactcccaaaataaacttgtcctatattctgcctataactctcctgttcatactaagtcagacgattcattcgtcactattctcaccaacagtgaacttcactgtgctacaccacctacacttagctataaatacacccagctaccctctccctctccacacacactcaacaccctcagccaaggcaaacaccccacccactcagttactccgctctgccggctacacgcatagtgtcgcttcgcctccagtccacccttctggtaagcacctccgctccaccaccagtaatatcacaacaccacatgacacagattctactcaagactctacccatccatatatcactattctgaccactatactaaatatttgttggtatacttgcttgtttgtatgtttgcttattcatgttgcatagttatcggagcgttcgtgccgtctcgtggaggccagatctgcaagtctacgccaggcggtggagccagaaaccagtttcgcgagcttccctccccccttcgccgaataagcacgacaagctcactggatccctttgatgcataaattacctatgatttttcaaccacaaccctcagcctgttattttatgcatgatatgattttgagacaagttattatggccacccagccgcttgccgcaatcaataatccctgatatatatgttccaaatgatttgagaacaggtgtgagttttcaaaagaaaatgtttttcaaaatgtgtgtgatgaagggttttcacccttatcaccttgtgagtgggataatcagggactccctggtttaggggagggcctaaggtgttggctcatctggtttaggcgtgagcagaaggattgtcccctcatataaggaccggtttgtcatcttcactacatgtactctttaatagtacaaccactcgagactgtgtgggcagtcactcaatctgaactcgtacggtccaaccccagggttatgaaggctggggagcaccgggaggataaggaggggtaaagttttgtccggtttggacatggtggtggcctgactccttccggataaccgttaaggttaggacgtgcggggaaagaaagagagtcggattcgggtctcattggccatgggatcgcagagccgaactagtgggtaaagtgtacccctctgcgcagagttcaaacctattcgaatagtctgtgtccacaggaatggacgagtctggtgtggtatgacaattaatgttttgttttccaaaaaaagagatgcttttgaaaagtggtttttaaaaaggttcggcggttgagccgtgagctatggtggacggaaagtccagtagctgtttttgaaaatgaaaaccagtgggaactgatgagatacctggatggtttagtccaggggattttgttataatactgaaaaacttcctgctccttttggagaggatgcgctttgcaaaaatacaaaatgtttttcaaaacaactctgcataaaatattgttgcttctgcaaaatatcctgagctccacatattccatacattatatctgatttccccattccacgggtgaaggtgggctgctgagtacgtttgtactcacccttgcttatttgttgtttttctggaaaaaggagatcgggtaagagttacgactgttctcaaccttgcctgtggctgttggaccgctaaatttcttcactgcgtatatcgggctgcttcagccccactctgatgatatgtcccgagttgttgaccaactcttaaagttgttcgccacctttataggtttgtctcgtttaagcagatctggaatcatctgatgtataaatgtgtttactagcctcctgggactagtaattgtatcacatttgagtcccagaggattgggacgcttcaggtggtatcgaagctgttaggttcagcagtgatgctgaggaagtggtggagggcccccaggtccttcaccgcgaactcccgcttgagggcaatgatcgtgcaccggaggagatcagcggtggatgtcatgagcacaatgtcgtcaacgtagagcagcaggtgcggtgtcgttgccgcaccggtagatgaagagtgatgtatcatacttggcctcgacgaagccaatggaggccaagtaggaggtaaagcgactctaccaagcccgcggcgcctgcttgaggctgtagagggagcggttcagccggcagaccagatccgggcgagcgacgttgacgaagccggtgggctggctacagtagacagtctctattagagtgccatggaagaaggcattcttgacgtcgagctgatggatcgcctagtcccgggagagggcaagagagaggacgatgcgaacggtggtgtcgtggcgaacttgacgacggggctgaaggtctcgtcgtaatctaccccggggcgctgggtgaagccccgaaggaccgaacgggccttgtagtggtcgaaggagccgttcgaggtcagcttgtggcgaaagagccacttgtcggtgaccacattggtgcttggaggacacggcaccaggtcccaggtgtggttggccagtagggccgtgtactcctccatagcacgacgccagtgtgggtcagcgagggcggtgcgaacaaaggaggggaccggggaggcctctggaggagcggcggtcgtatcagcgaccaaaatcagctggttgacggggcgaagaacgccgacggcacgccgagtcaccatcggatggatgtgtctgaggtcacggtggatggcgaccgaatgatacacaggcggctcagagcaggccgccgggaggtcggggatcgcgggtgtggccggctcgcggtggtgatagacgatggcggggtcaacaaagcgagccaagctcgtcgtcgggctcagatccgtgcttaccgagggagtggcgcgctcacagtggtggttgacaagggcagaatcggcgaagcgagtcgcgctcgtcgacgggctcagatctgtgggtgccgagggagtggcgcgctcacggtggtggttgacgagggcagaatcggtgaaacgagtcgcgctcgtcgacggggccacacgtggcgctggcatggtcaacggggccgcgcgaggtgcgggaagaggcgcgagcagaggcgtcgaagctgcacgtggtgcgggcaacggcgcgaggcggggtgcctggggtgcaggggtaatcggatcaaacttaagaagggagtcgagatcggtaggtgggggaggagcagcaaggggaaacacatcttcgtcaaagacgacgtgacgagagatgatgttgtgtgaggcgagttcaagacaacgataccctttgtggtcaggggagtagccaaggaagaggcagcgagtggagcgaggagataacttataaggagaggtggtgggcaggggccagcgatggggggtgcagcagcagctgttgggcagggagggaggggagagaaatggaactaacctatctttgataccatgtgggaacctgaaagtcgcctagaggggggtgaataggcaaatctgaaatttataaactttaagcacaactacaagccggggttagcgttagaaataaagtcgagtccgaaagagagggcgaaaacaaatcaaccaaataaatagagcggatgacacggtgatttgttttaccgaggttcggttcttgcaaacctactccccgttgaggtggtcacaaagaccgggtctcttttaaccctttccctctctcaaacggtcacctagaccgagtgagattttctccttaatcaacgggtcacttagacaccttataaggaccaccacaacttggtgtctcttgcttgattacaagttgcttgagaacaagaatggaggaagaagaaaagcgatccaagcgacaataactcaaatgaacacaaatatctctctcactagtcactaattgtttggagtgatcttggacttgggagaggatttgatctcttgtttgtgtcttggagtgaagtctagagctcttgtattgaatgcaatggctgaaaacttggatgccttgaagtgtggtggttgagggtatttatagccccaaccaccaaaattgtcgttggggaggctgtctgtcgatgggcgcaccggacagtccggtgcgccagccacgtcacccaaccgttagggttcgactgttggagctctaacagattggggcaccggacagtccagtgccgcaccggagagtcactgttcactgtccggtgcgccttctagcgctgctctgactctgcgcgtgctgtccgcgcactgttcactgttcactgttcacttttgcagacgaccgttggcgcaatagtcgttgctccgcatggcacaccggacagtccggtgctacaccggacagtccggtgaaatatagcggagtggctctcccaaaacccgaagctgagcagttcagagttgatctccctggtgcaccggacagtccggtggcacaccggacggtccagtgcgccagaccagggcaggcttcggttagttttgctcctttatttttgaatcctatcttggactttttattggtttgtgttgaacttttggcacctgtagaacttatcatctagagcaaactagttagtccaattatttgtgttgggcaattcaaccaccaaaatcatttaggaaaaggtttgaccctatttccctctcaatctccccctttttggtgattgatgccaacacaaaccaaagcaaatatataagtgcataattgaactagtttgcataaggcaagtgcaaaggttgcttggaattaaaccaattaatacttttataagatatgcatggattgctttcttttaacattttggaccacgcttgcaccacttgtttttgcaaatttttggaaattctttttcaaagcctttttgcaaatagtcaaaggtatatgaataagatttcgagaagcatttttaagatttgaaattttctccccctgtttcaaatgcttttcctttgactaaacaaaactccccctggatgaaattctcctcttagtgttgaagagggtttttcaaattgaaagaatgtcaaatatttgagataccaaattttgaaaaactcctccttaaaatatagatgtagtttgagatagaatttcttagaggaatactaattttaaagataccaattgaagaacatttaaaaaacttaaacttgttttgaaaatttttgaaattggcgtggtggtgcgatccttttgctttgggctaatactctctccccctttggcattaatcgccaaaaatggagtctttagagccctttttaaattctctcccccttcggcaaacaatatatgagtgaagcattataccaatgtggagagcgatgcgaagtgacggcgaagggtggagtggaagccttgtcttcgctgaagactccatttccctttcaatctatgacttagcataagaatacacttgaaaacacattagtcatagcacatgaaagagatatgatcagaggtatataaatgagatatgtgtgcaaagtatcaatcaaaattccgataatcaagaatgtttagttcattcctaagtttggtaaaggttttctcatctaatggtttggtaaatatatcggctaattgttctttggtgctaacataagcaatctcgatatccccctttgttggtgatccctcaaaaagtgataccgaatggctatgtgtttagtgcggctgtgttcaacgggattatctgccatgcggattgcactctcattatcacataggagagggactttggttaatttgtagccatagtctctaagggtttgcctcatctaaagcaattgcgcgcaacaatggcctgcggcaatgtactcggcttcggcggtagaaagagctactgatttttgtttctttgaagcccaagacaccagagatcttcccaaaaactgacaagtcactgatgtgatctttctatcaattttacaccctgcccaatcagcatctgagtaacctattagatcaaaagtggatcccttggggtaccaaagaccaaacttaggtgtatgaactaaatatctcaatattcgttttacggccctaaggtgaacttccttagaatcggcttggaatcttgcacacatgcatacggaaagcataatatcctgtcgagatgcacataaatagagtaaagatcctatcatcgaccggtataccttttgatctacggatttacctcccgtgtcgaggtcgagatgcccattggttcccatgggtgtcttgatgggcttggcatccttcattccaaacttggtaagtatatcttgaatgtacttggtttgggatgaaggtgccctcttggagttgcttcacttgaaatcctaagaaatatttcaactcccccatcatagacatctcgaatttttgaatcataaacctattaaactcttcacaagtagatttgttagtagacccaaatatgatatcatcaacataaatttggcatacaaacaaatcatttgcaatagttttagtaaagagagtaggatcagctttgccgactttgaagccattagtgataaggaaatctcttaggcattcatatcatgctcttggggcttgcttgagcccataaagcgccttagagagtttatacatatggttagggtactcactatcttcaaagccgggaggttgctcaacatagacctcttccttgattggtccaaagaggaaggcacttttcacgtccatttgatagagcttgaagccatggtaagtagcatatgcaagtaatatacgaattaactctagcctagctacgggtgcataggtttcaccgaaatccaaaccttcgacttgtgaatatcccttggccacaagtcgggctttgttccttgtcaccacaccatgctcatcttgcttgttgcggaagacccacttggttcctacaacattttggttaggacgtggaacaagatgccataccttatttctcgtgaagttgttgagttcctcttgcattgccaacaccgaatccgaatcccttaatgcgtcttccaccctatatggctcaatagaagacacaaaggagtaatgttcacaaaaatgagcgacacgagatcgagtggttacccccttatgaatgtcgtcgaggatggagttcactgggtgatctctttgtatcgcttggtggactcttaggtgaggcggtctttgactttgatcatcttccttgtcttgatcaacttcatctcccccttgatcgttgtcctcctcttgaggtggcgcttcttgatcttcattttcatcatcttgagcttggtcctcatcttgagttggtggagatgcttgcatggaagatgacggttgatcttgtgcttttgtgagctcttcggattccttaggacacacatctccaatggacatgttctttagtgcgacgcatggagcctcttcatcatctagctcatcaagatcaacttgctctacttgagagccattagtctcatcaaacacaatgtcacaagaaacttcatctagtcccgtggacttgttgaagactctatatgcccttgtgtttgagtcataaccaagtaaaaagccttctatagccttagttgcatatttagattttctacctcttttaacaagaataaaacatttgctaccaaagactctaaattatgaaacattgggctttttaccggttaggagttcatatgatgtcttcttgaggattcggtgaaggtagagtcggatgatggcgtagcaagcggtgttgattgcttccgcccaaaaccgatccgaagtcttgtattcatcaagcatggtcctcgccatgtcaagtagagttctattctttctctccactacatcattttgttgaggtgtgtagggagaagagaactcatgcttgatgccctcattctcgagaaagccttcaatttgagagttctttaacttcgtcccattgtcgcttctaatctttttgatccttaagtcgaactcattttgagcccgtctcaagaatccctttaaggtttcttgggtttgagatttatactgcaaaaagaacacccaagtgaagcgagaataatcatccacaattacaagacaatacttactcccgtcgatgcttatgtaagcgatcgggccgaatagatccatgtggagtagctcaagtggcctatcggtcgtcatgatgttcttgtgtggatgatgaacaccaacttgcttccctgcttgacatgcgctacaaaccatgtccttctcaaaatgaacatttgttagtcccaagatgtgctctccctttagaagcttgtgaagattcttcatcccaacatgggctagtcgatgatgccagagccaacccatattagtcttagcaattaagcaagtatcaagttcagctctattaaaatcaactaagtataactgaccctctaatactcccttaaatgctactgaatcatcacttcttctaaagacagtaacacctatatctgtaaaaagacaattgtagcctattttgcataattgagaaacagaaagcaaattgtaatctaaagaatctacaagaaaaacattggaaatagaatggtcaggtgatatagcaattttaccaagtcctttgaccaaaccttgatttccatccccgaatgcgatagctctttgaggatcattgtttttctcataggaggagaacatccttttctctccagtcatgtagtttgtgcacccgctatcaatgatctaacttgagcccccggatgcataaacctacaaaacaagttcagaccttgttcttacgtatatccaaacggtcttgggtcctttcacattagaaacaagcaccttgggtatccaaacacaagtcttggagcccttgtgtttgcccccaacatatttggcaactactttgcctgatttgttagttaaaacataagaagcatcaaaagtcttaaatgaaacattaggttcatttgatgcaataggagatttctttttaggcaatttaacatgagtggattgacaagaactagatgcttcactcttatacataaaagcatgatgagagacagagtgagacttcctataatgaattctcctaatcttatgctcgggataaccagcaggatataaaatatagccctcgttatcctgaaccatgggagctttgcccttaacaaagttagacaattttttaggggcattaagtttaacattgcctccctgttggaagccaatgccatccttaatgccagggcgtctcccactatagagcatgcttctagcaaatttgaatttttcattttctatctcatgctcattaattttagcactaagttgagatatgtgatcattttgttgtttaattaaagctaggtgatcatggatagcatcaacattaatgtctctacatctaatacaaatggaaacatgatcaacagtagatgtagagggtttgcaaacatttaattcatcaatcttagcatgtaaaatagcattctcatttctaatattggaaatagaattattgcaaacatttaaatccttagccttagcaattaaattaccattttcaatcttaaagctagaaagtgattcattcaacttgtcaatttgagaaatcaaactaacattatcatttttgaggttgacaagagaatcatcacaaacatttaatttctcaaccttagcaattaattttgcattctcagttctaaggttggagatagtatcatggcaaatgctaagctcactagtcaattttcacatttttctatctcctgagcataagcattttaaccttaacatgcttcttgttttccttaataagaaagtcctcttggctatccaaaagtttatccttctcatgaatagcactaattaattcattcaattttttttttgttgcatgtttaggttgacaaaaagagtgagcaagtcatcctcatcatcactagagctagcctcatcactagatgttgcatatttagtggaagctctagattttaccttcttctttttgccatcctttgccatgaggcacttgtggccgatgttggggaagaggaggcctttggtgacggcgatgttggtggcgtcctcatcggaggaggagtcagtggagctttcaatctctcatcggagtcccattcccgacacacttggcatcatcgcccttcttcttgtagtacttcttcttttcattcctccttcccttcttgtcgtcgctcttgtcactatcacttgataatgtacatttagcaataaaatgatcgggcttaccacacttgtagcaaactttcttggagcggggcttgtaatctttccccctcctttgcttgaggatttggcggaagctcttgattatgagcgccatctcctcgttgtcgagcttggaggcgtcgatggggagcctacttgacgtagactcttctttcttttcctccgtcgctttgaatgcgacgggttgcacctcgggtgtggaggtggcgcctcgctcgatgatttgtttggagcctttgatcatcaattcaaagctcacaaactttcctataacctcctcgggagatattagcttgtatctaggatcaccacgaattaattgaacttgtgtagggttaagaaaaacgagtgatcttataataaccttgaccatttcatggtcatcccattttgtgctcctgaggttgcgcacttgattcaccaaggtcttgagacggttgtacatagcttgtggctcctcaccttggttgagcatgaatcgatcgagctccccctcgatcgtctcccgcttggtgatcttggtcacctcatctccttcgtgcgcggtcttgagcacgttccaaatctctttggcactcttcaatccttgcaccttattatactcttctcgacttagagaggcgaggagtatagtagtggcttgggagttgaagtgtcggatttggtcaacctcctccgaatcatagtccttgtccccttccttcagtacctgcgctccacactcaacaatatcccatatgcttttgtggactgaggttaggtgatgcctcattttatcactccacatagaataatcttcaccgtaaaaaaccggtggtttgtctaatgggacagaagtaatggagtgcgtttggaaatgcgaggatagcagaggggcatcttactatacttcttgcgctcatggcgcttagaagtggcggatgtcgattcgaagcgggaggtggaaggtgacgaagagtcggtctcgtagtagaccactttcttcatcttcttctttctgtcacctttccgttgtgtcttgatggaggaagaggattcctcctttagcttgtggccggactcccttgagtgggttctccccgagcttgcgaacttgtcgccgtcggtcccaatctccctcttggcggatgctcccgacatcacttcgagtggttagactctaatgaagtaccgggctctgataccaattgaaagtcgcctagagggggggtgaataggtaaatctgaaatttataaactttaagcacaactacaagccggggttagcgttagaaataaagtcgagtccgaaagagagggcgaaaacaaatcaaccaaagaaatagagcggatgacacgatgatttgttttaccgaggttcggttcttgcaaacctactccctgttgaggtggtcacaaagaccgggtctctttcaaccctttccctctctcaaacggtcacctagaccgagtgagcttttttccttaatcaacgggtcacttagaccccttataaggaccaccacaacttggtgtctcttgcttgattacaagttgcttgagaataagaatggaggaagaagaaaagtgatccaagcgacaagaactcaaattaacacaaatatctctctctcactagtcactaattgtttggagtgatcttggacttgggagaggatttgatctcttgtttgtgtcttggagtgaagtctagagctcttgtattgaatgcaatggctgaaaacttggatgccttgaagtgtggtggttgagggtatttatagccccaaccaccaaaatggccgttggggaggctgtctgtcgatgggcgcaccggacagtccggtgcgccagccacgtcacccaaccgttagggttcgaccattggagctctgacagattggggcaccggagagtcactgttcactgtctggtgcgccttctggcgctgctctgactctgcgcgcgctgtccgcgcactgttcacgttcactgttcacttttgcagacgaccgttggcgcagtagccgttgctccgcatggcacaccggacagtccgctgaattatagcggagtggctctccaaaagcctgaagctgagcagtttagagttgatctccctggtgcaccggacactgtccggtggtgcaccggacagcggacagtccggtgcgccagaccaggacagccttcggttggttttgctcctttctttttgaaccatatcttggactttttattagtttgtgttgaacttttggcacatgtagaacttatcatctagagcaaactagttagtccaaatatttgtgttgggcaattcaaccaccaaaatcatttaggaaaaggtttgaccctatttccctctcagaaccctaaccctaacaagggcttggtgttgtactaatagactgtgttaggtgggtttgacccattacaggggtgagatggtaaatacatggggtgaacccaaatcctagtcgggtactctaacagttttggattgtttgctaaagtatccttaggcaaatactccttttgttgcagtaggtttgtattttatattgctctagaagtactccactaaggaacatgttttgacttgatgttttgctttttttctagacatacaatcccgcagctgatctggtgctcggaca

SEQ ID NO: 1002 - DNA, 21025 bp, Zea mays
  Intron number 1 from transcript GRMZM2G068639_T01 (locus G RMZM2G068639) derived from phytozome v7.0 (chr-ID 1; pos 2 22305027 to 222326051 reverse strand)
aggtctctctcggcgtcctcggcgccatctctcaggtaactaacgtatatctatctggcccgtcctctacatcagattaataatctactcgatcgtagttggatttcgcatttcgatgctttacttgccgagtgtttgtactgcgatttcttttcttcagatttcaggaaaaaaaaaatgtcaattcttataaatacaaccgcgcttgcaactgtttactttttcttatttttcaactatacgttttctttattaagccggcacaaagctattttttatccactcaatcaccagtgatctgacctctacagtgctagaagtgacttcgtttattgttctttattgccattagacgacatgtatatacacacacaactacttccaacaataggtgtcatctttgccattagttaggtgctctacatgacatttttgctgacataggtaaaaaaatcatacttatcttaatggagatactgctcactccttctcaaagtcaaattatctttaagtttgctcaaatatataaaaaaacaatattaatatttttagtatataattagtatgaatcattaaatagatcactgaatatattttcatagtaaaaccatttgaagagacaaatattactaatattttgttatcaatatagtcaaacatgaatctcctagcaaatctcttttataaaaatataagaaatctaatttttggaatagaactatacacttgttttaggcccattatcttatagataaatcatacaacaattatttggataaattatcaccgcactaccggaatccggccctttgccgagtgctcggcgttttgccgagtgcaatttatcgggctttgccgagtgccactcttggtgaactgagactctcggtacagacctcgtttgccgagggcaaaacactcgacatagaaattgtccatctagttaatcaagtttttcatacctactgtattggacaaatggagatagaaataatacaagtgatgtaataaaataagagccatgagaacacccccgatcaaatattatggattgataaatagatggataattcacttaggtctcgtttgtttcgttggaattgaattctattttaataattataatttagacaaaactaattaagttcatatatttatatatgtaatatatttgtatattatcctaaatcatatgagagagatagttatatactacatttatgttatagcgaagcaagtagaagagtgtgttataagttgtatatcggaaaaataacatgtaaatctatagaatcaatttccatctttcaccctatgaatttgagatagacttatatgataactttgaaaagtggtgaaaagtcacattctaaaaattagcctattccattagtaagattccaattcctcaaaatgaaaggaaacaaacgacaccttatattatatatatatatgggataggagcgagctataattattttattttaactgcggtaactaggattcgaactttgatatcatgttaagttgcatgcaccaaccagttcagcacaaaacttgattattcgcttgggattaaagccagctattcggactgctgcagctgcaatctatagagacaaaacactatagaaatagtagaagttgtttcggattaaagccaagcgaacaacttgttaagctggtaggatgagattggcaattcacttatattttattccaacatagccgtcctaacaataatagagagataataaaaaaagtaaaactgaatatgagtttgttgagcaataactttagcactacaataaattgatttttaactaattctcacaagcttttcatttaggcgttgccactacatttttcttcttatattcgattacatcaataactcaaccagagattatgtattacaactcaaaagggtttgtctagtcatgcattggttaccccaagagctctagctacaagtaacacaaagaaaagcattagacacttgtactaagatctagatacatcaatcacccaaacacttgacattgactttatgcaaaagtaacatggatggacaaaacttttatgctattccatttgtttatatgattttgatcaagtatattaattgaaactacagttggcaatgcctttgtgcaggaactccaaattgaacatatagatgtgaaccaaaatgcatgaatgcgcacgtacaaagaatatatgattaatcaatgcaagtttgtaggaagtacaattggcatcaaaaccactctcaatgtaagcaaaattaacaccgagctaagctcactaatctcaactaaacaaatttcattgtcaaacattaggtttagcagtctaaagtagtgagtctagcactctagggttgttctgaagatcacagtaagtgtatctagattaaaatttaaacagtgaaattacaatttatcactagaactactatgatctatggcaaactaagttaaacttaaaaaacaggcagtgccgaagttgctagtgttataaacaattgatattctatacagacgcttatcctctcaagattactagatgcgaagtagatgctacatttttgcctaacacgacttgtgatgcatgtacttatatagttatatagcacaccgagtttggacatcatacagagcgaaaaattttgcatgcaagttaaaaaagacatcataaataggataagaccaccatctttagactacatatccttatacgccaacctagaataaatacaaattaattaaagaccctctctaattagagtcatctaacatctacttcctccgttcttttttatttgtcgtggtttagttcaaaaatgaactagtggacgacaaatattcgagagcggatgtagtacataactaaaaaaataaaaactagacattatagatatataaacatgtgacaccataaactcacatcggacgaaaagttcaataattaaaggcaaacatatattaaataaaccatgaccgatcgaaaagagaataacttttatatataggtgtgtcagggaattattttgattacatggcgacaacaatgcaaattgatatgcaacatacaggctacatcaagccaactaagggaatcacaaggttaaagtttcacagcacatggcgccgcagtactacaaactacagataaaatatgcaatttggcacattgaactataaaaaaaaaatataacaattatccttgagctgttccgcatttatatataacagttttctttcttaaaaaaatgaaaaaacgaaaagaagtgttcagctaaaacgattcttcaaatccactatgaatagaaatctgcacaggcctgaaacgtccagaaatccgtgctctggttcattgaaaaaaaccaaactgtacatgactcggaattaactatctccacatgttctactctctatcacactctatttcatactccactctataaacggtatattctacagtgcaaatacagtatcttacacagtcatttacactgtttatagtgtgaagtttaaaataaaaagtgaaataatgaataaaatatgaagtctgttagagatagtccggaaaaaaccgataaacaaaactgtgtttctaagcaaatcaatctgtttcgtaaaagctacccatgatgatgtctgagcatgtgtgcctgcctacttgcgcacactcaaaaacagtgcgtcgtaccacaacatttgctggtggactgcatgcagcattttggcgattcttggagtggaaaacatgatacatctgagtacaaagcaaggcccatgtgttttggcttttccggaaaagcacatccattcacttagagtttaaggtatgtacaatctaaagacctagaatggttttctaaaggcctagaatggttttctaaagacaaaaaaatagttaaaagactgtatgatacatccctaaagttttaaattataaatacagttaagatacaataagtatagaaagtcatgaagatacaaactcttcgtgtttgtttttactttaccctcaagagacccctcaattagggcttgtttggttattcctatcgcatatgggttgaatgagattggaaaaaatatataaaagattttgagttgtttgaaatttaaacccactcaatttaaatggattgagatcaaaacgaacaaacccttaagagcttgtttgagtgctctagtattcatcccaatacatatgggttgaggaggaatggggtgtaaattaaactaatttacacttttaatttacaccccaatctccctcaacccatatgtattgagagtgaatattagagtatcgaaacatagtctaacggggttgtacatgccctaaaacatgagtgttggggaccataattaggggtacccccaagactcctaatctcagctggtaaaccccatcagcacaaagctgcaaaggcctgatgggcgcgattcaggtcaaggctccgtccactcaagttacacgatctcgcctcacccgagcccagcctcgggcaaaggcagccgacccaggaggattcacgtctcgcccgagggtcccctcaagcaacggacgcaccttcaactcgcccgaggcccagctcgggcaggcttcgcggagaagcaaccttggccggatcgccacgccaaccgaccgtatcgcaggagcatttaatgcaaggatcgtctgacaccttatcctgacgcacgctcctcggtcgacagggccaaagtgaccgcagtcacttagccgctccactggctgacctgacaggaaaacagcgccgcctgcgctgctccgactgctgtgccacccgtcagggtgaggctgacagccgccaagaccagcctcaggcgccataggaagctccgcctcgcccgaccccagggctcggactccacctcgacctcggaagacggactccgcctcgcccggccccagggctcggactcaacctcgacctcggacgacgatctcctcctcgcctgacccccgggctcggactcaacctcgaccccggacgacggtctccgcctcgcccgacccccgggcccggactcagcctcgacctcagaggagcccccacctcgcccgatctcaggctcggaccgaccacgtcacagggggggcatcattaccctacctctagctggctcaggctacggggaacaagaccggcgtcccatccggctcaccccggtaaacaagtaatgatggcacctcgcgtgctccatgacgacggtggctctcagccccttacggaagcaaggagacgtcagcaaggatccgacagccccgacagttgtacttccatggggctcaagcgctcctccgacggccacgacatcacatgaacagggcgccaaaacctctccgacagccacgacggcacgtacatagggctctggctcccctttgctagacatgttagcacattgctacaccccccattgtacacctgggccctctccttacgcctataaaaggaaggtccagggctctcgtacgagagggttggccgcgcgggagaacggaccgacgcacaaggctctctctctctcccacgcgaacgcttgtaaccccctactacaagcgcatccgccctgggcgcaggacaacacgaaggccacagtttccccttactatttctcccccctttgtgttccgtcttgcgccaacccatctgggctgggacacgcagcgacaatttactcgtcggtccagggaccccccggggtcgaaacgccgacagttggcgcgcctggtaggggtctgctgcgtgttgacgaacagcttcccgtcaagctccagatgggtagtctccagcaacccctccaacccgggacggtgctccatttcgggagtcttgagttcatgtccctcaacggcagctacgacatgatactccttcctccgccacgcgacaatgacaatggcggccgtcagcccgcccgccgacggcggaatcgacgacgtcttccccacgtggcggaagagcaacatccgggtctgtcccgtcaccttccccgccgacggaggaggaggcggggcaggcatggccaagcaggaggcggcacctcgtcggctgtcgagcgagtcgacggtgccggcgccccaacgggggacacgtcgggcgttgacctcgcgtctgagacgaagacgagcgtcgtttccccgcaacacgccaaccccaagcagacggacgacgccagcacgctcgcaaaggacttgctgggcgttagcctcgtacctgagacgacggtgcagtccatccctgacgcgacttcgtcaccacccgttgatcaagaggtaccgtctgtttcccatcccatgccttttagattcagctgcgacccaccaagcgaccccgcttcggtgggcgctttcataaaggcatgtccaaaccctccggggtatcatatgcggtcaacctgggaccgactgatggcggtctcaacctacgggtccctgggttccgaggaagatgacgagcccgactctggttgggatttctccgggctcaataaccccagtgccatgcgggacttcatgaccgcatgtgactactgcctctccgattgctccgatagtagccacaacctcggcgacgaggactatggcccaagtcgcgaatgcttccacgtcgatctagggggtctcgacgaaggcaaccatcttggtatgccggaggacggtgatccccctaggcctacgcctcgcgttgacatccttcgggagctagctgtggtcccagtccctgcggggggtcaggacgcacagctcgagcaaatccgcgagatgcaggccaggctcgacgaggaagcaggacaacttgtgcagcttcggcaaaatatcggcaggagtgggcaggccgggcaccggccggagaagcgcgtcatctggcccaggacgtccagcaccgcattgccgatgatgccagggcaaggctgcccccagcttccagtggggtcggccagaacctggctgcagcaacgatactactccgagtgatgccggaaccatccaccaccgaagggcggcgtatccagggagagctcaagaatctcctggaagatgtcgcggtccgacgggccgagagctctgcctcccaaaggcaggggtacccccggagcatcgcgccgcgacttcccgattcatgcgggaagcctcggtccacaccgggcgcacgcggaacacagcgcctgcggccccgggacgcctcggcaacgagcaccgccacgaccgtcgagcccacctcgacgagaaggtgcgccgaggctaccaccccaggcgtgggggacgctacgacagcggggaggatcagagcccctcgcccgaaccacccggtctgcaagtttcagccgggccatacgagggcgtcgttcctgacccggttccgaaccccgactaccatcaccaagtactcgggggagtcaaagccggaactatgactcgcggactaccgactggcctgccagctgggtgggacggacgatgacaacctcatcatccgcaaccttcccctgttcctctccgacgccgcccgagcatggctggagcatctgcctcctgcgcagatctccaactgggacgacctggtcaaagccttcaccggcaacttccagggcacgtacgtgcgccctgggaactcctgggatctccgaagctgccgccagcagccgggagagtccctgcgggacttcatccggcgatttttgaagcagcgcaccgagctgcccaacatcaccgactcggatgtcatcggcgcgttcctcgccggcaccacttgtcgcgacctggtgagcaagctgggtcgcaagactcccaccagggcgagcgagctgatggacatcgccaccaagttcgcctctggtcaggaggcggtcgaggccatcttccggaaggacaaacagcctcaggggcgccagccggaagacgtctccgaggcatccgctcagcgcggcaccaagaagaagggcaagaagaagtcgcaagcgaaacgcgatgccgccgacgcagaccttgtcgccgccgccgagcacaggaaccctcgaaagcctcccggaggcgccaacctgttcgataagatgctcaaggagtcgtgcccctatcatcagggtcccgtcaagcacacccttgaggagtgcgtcatgcttcgacgctacttccacaaggccgggccaccggcggaaggtggcagagcccacaacaacgacaagaaggaggatcacaaggcagaggagttctccaaggtccacgactgcttcatgatctacggtgggcaagtggcgaacgcctaggctcggcaccgcaagcaagagcgtcgggaggtctgctcggtaaaggtggcggcgctagtctacctagactggtccgacaagcccatcaccttcgaccagggcgaccaccccgaccgcgtgccgagcccaggaaagtacccgctcgttgtcgatcccgtcatcggcaacatcaggcttaccaaggtcctcatggacggaggcagcagcctcaacatcatctacgctgagaccctcgggctcctgcaaatcgatcagtcctcgatccgggtcggcgcgacgccctttcacgggatcatccccgagaaacgcgtccaaccccttgggcaactcgatctgctcgtctgcttcgggactccctccaacttccgaaaggaaaccctcacgttcgaggtggtcgggttccgaggaacctaccacgcagtactggggagaccatgctacgccaagttcatggccgtccccaactacacctacctcaagctcaagatgtcgggccccaacggggtcatcaccgtcggctccacgtaccgacacgcgtacgaatgcgacgtggagtgcgtggagtacgccgaggccctcgccgaatccgaggccctcatcgccgacctggagagcctctccaaggaggcgccagatgcgaagcgccacgccggcaacttcgagccagctgagacggttaagtctgtccctttcgaccccagcaacgacgcctccaagcaaatccggatcggttccgagctcgaccccaaataggaagcagtgctcgtcgactttcttcgcgcgaacgtcgaggtttttgcgtggagtccctcggacatgcctggcataccgagggatgtcgccgagcactcgctggatatccaagctggagcctgtcccgtgaaacagcccctgcgccgattcgacgaagaaaagcgcagagccataggcaaggagatccacaagctgatggctgcaaggttcatcaaagaggtattccatcccaatggcttgccaaccctgtgcttgtgagaaaaaaaggagggaaatgacagatgtgtgtagactacactggtctaaacaaagcatgtccgaaagttccctaccctcttcctcgcatcgatcaaatcatggattccactgctgggtgtgaaaccctgtctttcctcgatgcctactcagggtatcaccaaatcaggatgaaagagtccgaccagctcgcgacttctttcatcacaccctttggcatgtactgctacgttactatgtcattcggtttgaggaatgcgggtgcgacataccaaaggtgcatgaaccacgtgttcggagaacacattggccgaacggtcgaggcttacgtcgatgacatcgtagtcaagacgaggaaaacctccgacctcctctccgaccttgaaacgacattcaagtgtctcaaggcgaaaggcgtaaaactcaatcccgagaagtgtgtcttcggagtcccccgaggcatgctcctggggttcgtcgtctccgagcggggcatcgaggccaacccgtagaaaatcgtggccatcaccaacatggggcccatcaaggacttgaaaggagtacagagggttatgggatgccttgcggccctgagccgtttcatctcgcgcctcggcgaaagaggcctacctctgtaccgcctcttaaggaagaccgagcgcttcacttggacctccgaggccgaggaagccctcgggaacctaaaggcgctccttacaagcgcgcccatcttggtgccacccgctgccggagaagccctcctgatctacgtcgccgctaccactcaggtggtcagcgccgcgatcgtggtcgagagacgagaagaggggcatgcattgcccgtccagaggccggtctacttcatcagtgaagtactgtccgagaccaaaatccgctacccgcaaatccagaagctactgtacgcggtaattctgacgcgacgaaagttgcgacactacttcgagtctcatccagtgactgtggtgtcatccttccctctgggagagatcatccagtgccgagaggcctcgggtaggattgcaaagtgggcggtggagatcatgggcgagacaatctcgttcgcctctcggaaggccatcaagtcccaagtcttggcagactttttggctgaatgggtcgacacccagcttccagcagctccgatccaaccggaactctggaccatgtttttcgacgggtcgttgatgaaaataggagcgggcgcgggcctgctcttcatctcacccctcgggaagcacctctgatacgtgttgcgcctccatttcccggcgtccaacaacgtggccgagtacgaggctctggttaacgggttgcgcatcgccatcgagctaggggtccgacgcctcgacgctcgcggcgactcgcagcttgtcatcgaccaagtcatgaagaactcccattgccgcgacccgaagatggaagcctactgtgatgaggttcggcgcctggaggacaagttcttcggcctcgagcttaaccacatcgcccgacgatacaacgagactgcggacgaactggctaagatagcctcggggcggacaacggttcccccggacgtcttctcccgagacctacatcaaccctcagtcaagaccaacgacacgcccgagcccgagaaggtctcggccctgcccgaggcaccctcggcccccgagggtgaggctctgcgcgtcgaggaagagcggaatggggtcccgcctaatcaaaactggcagacctcgtacctgcaatatctccaccaaggagagctacccctcgacagagccgaagctcggtgactggcgcggcgcgccaagtcgttcgtcttgctgggtgacgggaaggagctctaccaccgaagcccctcaggcatcctccagcgatgcatatccatcaccgaaggtcaggagctattacaagaaatacactcgggggcttgcggtcatcacgcagcgcctcgagcccttgttggaaacgccttccgacaaggtttctactgaccaaccgcggtggccgacgccactaggattgtacgcacctgccaagggtgtcaattctacgcaaggcagacccacctgcccgctcaggctctgcagacaatacccatcacctggttgttcgctgtgtggggtctggacctcgtcgatcccttgcagaaggcacctgggggctacacgcacctgctggtcgccatcgacaaattctccaagtggatcgaagtcagacccctaaacagcatcaggtccgaacaggcggtggcgttcttcaccaacatcatccatcactttggggtcccgaactccatcatcaccgacaacggcacccagttcaccggcagaaagttcctggacttctgcgaggatcaccacatccgggtggactgggccgccgtagctcaccccatgacgaatgggcaagtagagcgtgccaacggcatgattttgcaaggactcaagccacggatctacaacgacctcaacaaattcgacaggcgatggatgaaggaactcgcctcggtggtctggagtctgagaacgacgccaagccgagccacaggtttcacgccgttttttctagtctatggggccgaggctatcctgcccacagacttagaatacggatccccgaggacgagggcgtacgacaaccgaagcaaccggaccaaccgagaagactcactggaccagctggaagaggctcgggacatggccttactacactcagcgcggtatcagcagtccctgcgacgctaccacgcccgaggggttcggtcccgagacctccaggtgggcgacttggtgcttcggctacgacaagacgcccgagggctccacaagctcacgcctccctgggaagggccattcatcatcgccaagattttgaagcccggaacatacaagctggccaacaggcaaggcgaggtctacagcaacgcttggaacatccgacagctacgtcgcttctacccttaagatgttttcaagtcgttcatatacctcgtctacatacgccaacaaaatctaaccatcaaggaagggtcagccttgcctcggcaaagcctgaccctccctcgggggctagaaggggggaacccactctgcgtcaaaattttcctcggaaaaagtttttctgccagagcatcttccgtgcttttcgactactttgaaagtgggatcctgaaaacgacggagtacacgtaagcaggcaaggccgaccgagccgagggactcctacgtctccgggatacggatacctcactcatcaccttctgcgataactaactcacgctcggataagcgattccgctggccgaacaagtcttgacgttcgaaagctgttctgccgaaacaatttttcgtgccttctcgactatatcgataacagaatccaacggacgagtaagagtacacgtaagcggcaaggccgaccgagctgagggactcctacgcctccgggatacggatacctcactcatcaccttccgtgaaaagtaactctcgctcggacgaacaattctgttaccgactaataagtcctgatactcgaaacaaggggaaaagaaacgcatctctacaacacgacgacggtatatttgggcctcgacggccgccaaaaaacatacgcacactacagataaattgattcctgcaggatcagacatcagtgggggagcagcagcaccctcggcgacgactccaccttcggtagaatccgacccggcctcagacggcaacacggtcgaaggatctccaccccgaagaaagacgtcggcaccgcgccggggccatcgccgccagggctcctccaggaacccgcccgagcagacgcctcaaccggccgctctgtagcctcagccagctgtcccccgaggacaccagcccggctcatggcctcggcaacccgactccggcgctggtccagccagtggacggcccggctaggctccggtcgacgaagcttcttttcgagccaactctgcctctgtccgtgctggcaccactgcctccggctccggctcatcgtagagcggccgagggtttctttaactaagcaagagaagcctcgggcggcaaggccgaccaagccgagggactcctacgcctccgggatacggatacctcactcgtcaccttccgcacgaggcaactcacacttggttaagcggttcagttagctgacaggcgagtcctagtgctcgaaacgaggaaaaaacatggtattacatccaaaatacctatatgttcaggccccgacagccgcaatgaacaagacaccggcactcaaggtgccattacaaacgaaactccagttccactcccgcaggtacgaacaaccccccacattggagggcctacgggacaacgaaacgccgacaggtggctcaccgctgcctgctccggcagcagcgacaacgacctccgctccgggcggccaaacagcagcagcgatgacctcagggcagacgctgttgcgacaaggccctcgcccacgaccccactcgaggggcgaggacgagctaccaaggccgtggagccggaggtcagtccgcgggaggcaccgactatctcgtcggcagagaaacctcttccggctgcctcggtgggagatggcaccggaagcagcgccgaaggcgctcgggccggagagccaggcacgcggtagctaccagcgccacgaacgacgaacgcccttccccccgatcactgagggaaggagcgggctgctgcccgtgtggatacaagccccaactcggcgcactctccgccccagccaggatgatgaagatccttgaagctgagggcggggcagaggtcgcagcccggctcgcttctccccaccatcaaactggtggtcaccgtcttgggtgaccaccggcgaggggatgcagccgggctgcctgatgaaaatccttgaagccgagtgatggctgaaaggtaccaacttccgcgaagttgcgttcctccaacaacgacaagacaaaagcgacgcgggcgctccccatccgggggctcggaaggtggaaggacgtgatgcatgaggaaagtgcgaggacatggttgccatccaagggggtcgccctccttttaaaggcgactctccccacttgcgtcctcagccgtcacggactgagtcttcaccaacgcgctccaaggtcttccccctacgacacgggggctgggtcccacgcgtcatgcaagctggcccagggcagaagaagccaaaccgccgcgcacggtgcgcgtaactgcccagcggttacaagcgctcctccactttcgcccagaccggcgggtgaaagggcggaccgccatgcaggcggcacgcaaccgcaccaagggggcacaccctttcgactccgacgcgtccagcatgggggcccaggcccacacgtcatgtaaccggcgcgcccgttactacgtgcgggaaactgcaccgccacttacgccagtaccgcgccttctcgactgcggaaccggtgccgtgactcgaggcaaccctgcgcatggcccaacagtgccaaccgagcacatcgatcacgggtcagtcagccgcgggagaaggcgcgacgatcgatatggccaaaagtgggccgacagtaatggcggcggcaggcgggcggaagcagcggtcaagtcgactgcaggctcacgtcccctcctgggacagcgagagagccctctcccacggcgtgaagacgacgcgcccgtgttccgttcctcgaacggctcgcgcacgcacaacggctgccccgcgaaccactcgtcccgtcgcattaactctgcggcaggacaggcggcacctttggcaggcgaaggaggcgacgcttcacctccgccataatgaccgcgtcaaaaaggtgtgccatgtcgttcaatttcgtatccttttcatcttcctctttctctctcttgctatagggaccgggaaaggggatactccgaaagggatccttcttcgcgaaggaagcgggccctgagccctcctactaatcagaggttcgaaggctagcccctcggaagggttcaacagccgcctcagagcactcaggctccacgcccactactggtcagaggttcgaaggctggcccctcggaagggttcgacagccgcctcaggccactcgggctccgcgcccactactgatcaggggttcgtaggctggcccccgaagggttcaacagtcgcctcagagcacacagagcgagggatgactctgggtacgtccgatacatggccgaggctcgagctacgctcccgaggtaccctaggacatttccgagaccagcaggagcgattctgtaacgaaatcccatcagagggaggcatcgagccctcggaccctatcaaacgggaccggttccggcaaatcacctgcaggtacttttggagcgtgcctctgggccactagctgacccttatcgaacggggcacgggcgtccactcagatcacccgttagcaactcactggagacaccatgttcggcgccctctgagggcaacatggcgcttcccccccccccaccctcctccttgcggaaaggcgacacaggggcgtatgaaaaaagtcgagtcagtccttgaccgtcctctcgccctgcgcggaggctcgggggctgctctcgcaaacccggctccggccaaaccgttgacagcgtcaacataccggcccgagaacttggaacctgactatgcacccgggctacggccagttcgcatgagggaacaaccagaccggccgaggcatcacgaaacggctaagacctcggaggagtcaaaccactcctctgaggcctcgggggctacacccggtgggtgcgctcgcgcgcacccaccggaacgaaacgcaaccgagaaaggccggtccccttgcaaaaaagtgcgacacaagcctccaagcgagtaccaacattcccttcgaggctcgggggctactgttggggaccataattaggggtacccccaagactcctaatctaagctggtaaaccccatcagcacaaagctgcaaaggcctgatgggcgcgattcaggtcaaggctccgtccactcaagggacacgatctcgcctcactcgagcccagccccgggcaaaggcagccgacccaggaggattcacgtctcgcccgagggtcccctcaagtaacggacgcaccttcaactcgcccgaggcccagctcgggcaggcttcgcggagaagcaaccttggccggatcgccacgccaaccgaccgtatcgcaggagcatttaatgcaaggatcgtctgacaccttatcctgacgcacgctcctcggtcgacagggccaaagtgactgcagtcacttcgccgctccactggctgacctgacaggaaaacagcgccgcctgcgctgctccgactgctgtgccacccatcagggtgaggctgacagccgccaagaccggccttaggaatcataggaagctccgcctcgcccgaccccagggctcggactccacctcgacctcggaagacggactccgcctcgcccgaccccagggctcggactcaacctcgactccggaaggcggtctccgcctcgcccgaccctagggctcggactcaacctcgacctcgaacgacgatatccgcctcgcccgacccccgggctcgaactcaacctcgaccccggacgacggtctccgcctcgcccgacccccgggcccggactcagcctcgacctcggaggagcccccgcctcgcccgacctcgggctcggaccgaccacgtcacaggggggggccatcattaccctacctctagctagctcaggctacggggaacaagaccggcgtcccatccggctcgccccggtaaacaagtaatgatggcacctcgcgtgctccatgacggcggcggctctcagccccttacggaagcaaggagacgtcagcaaggatccgacagacccgacagttgtacttccatggggctcaagcgctcctccgacggccacgacatcacatgaacagggcgccaaaacctctccgacagccacgacggcacgtacatagggctctggctcccctttgctagacacgttagcacattgctacaccccccattgtacacctgggccctctctttacgcctataaaaggaaggtccagggccctcgtacgagagggttggccgcgcgggagaacgggccgacgcacaaggctctctctctcccacgcgaacccttgtaaccccctactgcaatcgcatccaccctgggcgcaggacaacacgaaggccacggtttccccttactgtttctcccccctttgtgttccgtctcacgccgacccatctaggctgggacacgcagcgacaatttactcgccggtccaaggaccccccggggtcgaaacgccgacaatgaggttcttttcttcacatacctgcgcgcgtggtgcgaacctacttggctattccttatgtaaactagctatatccaccgggtgtaagactgtcttaagcaacgtcctctatatgtatcatttacagtcacctctaaaaggttcatcctttatatctcctttctctccaacaatgtcctctaaatcacgtcttctatacgtaaatacatatattagatacatttttatcatactctcaaatgtattgtacatattttagttttgataaaccggttgtttaaagtatccaaatggatagaagaacgtttaaataaactttgtatatagatgatctagtaacatccttgagttgatttggtgacaaggggaccccgggaggattggaggggattgagcgggaaataaactaatttccaactcaattccctccaatcctctcgagatcccgggtcaccaaatcagtcaggactattcaaaggatgctacttggggagtagagggatagggtagaggaggttttacgggtctattggaaccctaccagtttggcgtgcgacatgcggtgggccatccgctcatgtgcagtcacccgcaagtatagatggccaatagtgtcgggctaatcgggccggcccggagcacggcacggcccgtagtgcctaggcacggcatggctggagccgggcccgtgccggcacggcccgatgggtagtatcgtgcctgggccgagcaccgggcacgctgtgccggcacgggcacggtccgattagcccctaggcacagttaggcacgattatgcatgattagatccaagcacgactagttagctgtgtgatgtactctttttttctatctagggttttctcgcaagggtgagtttttatctagataggtttttaatgagtcagccattgcactaaagtactaaacagctcaatattagctattttagtatgttttaactgtgtttgtgaatgtctgactaaaattctgtggtgtagtgctaaacaggctaaataggctaagcaggctaaacgggtctaccgtgccggcacggcacggctaattaagcaggcttagtgtcgtgcttgggcctggtcttaggcactagtgccgtgcccggccaaacgggtcgtgccctaacctgtccgtgtccgggccgtgccgggtcgggccgcccatttgaccatgtataactgcaagccattcgtttggaataaattaaacgtgccacggccaggttctcttcttcttctttttctttttatccttgcgacattgtctctgcgacccatctgctcatgtatttttttcatcacgtatactcacgaatttattatataaaaatgtataaaaattaccataaattatgttgccaagttttgtttcgcagaatgttacgcatagaagttatatgtgtaattttgcaattttctataaaattacgtttataagttacgtatgtaaaatgttatatataaaaataatgtacataattttgcaacattcaaataaaatatatgataagttttattcttaaaaggttatacgtaaaagttatgagtgtgactttataactttccaaaaaacttatgaaaatatcgtttttcagaagaaaaaaaaaagttgcgaagctgttattgattgtcagttctagcatagcggtcgttcgctaattagctcgatcacgtgtttccttctctgccattattatctcttcgtcagcgtcttgaaagcagttcctcttacgtaagttgagtcaatgcacgtgtgccttatcatatgcgagggtcgcgcgtcagtgacactaacgttagaggatctcgttctgtgtaaattagtaggttactataatagcagacgtatttagttttattacctatctatatgtgagtagttttagactattttgagtaatgactaaatcggctatttttaagaaaactagatagatgtcacaactcacaaatgctagtgagaggtatttgtatgcactaaagctaataataattaattaaagatatccaaaaagtctagctaatagttcagctaatacctacttttagcaaaatatctaatagttggctagatatttgttaactagctaattttattagcaaatttttagccaactaactattagttttagtgcattcaatcaccttcttagactgcactagtaaatgtcactggtactagaattattttgagaaggcacttgtttctagttaggatatatttattttcatcttaatttatatggattgaagaggtttagatgagtttaaatttatagcaaattaaatcctctattaatttttggacgcaaacacgagatatatggctcatgagtccaggtttcctcttttggcaataaagcaaattatccatgcatttctccgagccgactgccacgctccttggggctggggctgcgcggcatgcgccctcccttctagaccacacgctcctcagtgcccttgcgcacgatttcgttgcgaggaagaagacatgcgccctcacttctatgccatatgctttaattaatgtttgtttcaaattaatgctaactgtttagactgttatagttataatctatatagacaaaatactgcagtagaaatcgttatagattaaagctaaagaaataggtggatctacggtgtatttgatttagcttttagttttagcttttgcattctaaaaatcaaaattcaaaccgatctaaaaattaatttttttctaaaagtcaattttctagccgtgcaaaaaaaatatctatagacctgtttttagttgttttcgtgtgaactgtaaaaatatatatttaaagaattttgagcggcttttagcgattttcaccaaatatttttttagctttttaacaactcacaatccacatcaaatttttcgtagctcataactcacaacaatttttttacggacataatctaaccaagagtttttttacggtaagatagagagaaacctgagactccttttgacagtaagatagagagaaacctggagctgtatcaaacaattcgatgaatttcagattcacgattcacgataaaaataggtaaatccaaatctaaactcaattcttccgatgttagaactctacccagcggcagtccattactttggattcctcagatttcgaagatcctgttttttttatataatttttatccaagaacaaacaccggatcgtccaatttgacaaacattgaagcattcgcagtcgggataagtttgatttggagctaaaactgtgcatgcaaggtgacgctggcgctgcaacctctgttcaagcgctc

SEQ ID NO: 1003 - DNA, 28174 bp, Zea mays
  Intron number 6 from transcript GRMZM2G056524_T01 (locus G RMZM2G056524) derived from phytozome v7.0 (chr-ID 8; pos 5 8695307 to 58723480 reverse strand)
ggcttgcctgtattgcttttgtagctattgggaaggtaatagtaatactatgaagttcttgatacattttaaaaatgagtacccaacagccatgccacatatgctatatggtgatgttgttagtggagttagatttgctggccatcataactgaagtgtacaagcatgttgtgacttattcttccacggagtcctggagtgaagttgttaagatcgatttcagtgtgtgtaaatgtcagggcccctcaggtaggttagataaagataagactagtttgggataagattagaattagagataagattagatctagtgcttagaggtcaagtaaccctctctatataaggagaaggattgtatcaatttaaggtaagcaagagattaaaaggaaatcccttctctcttttttttgaaggatcaggagggggaaacccctactgcgcattttattagaaagcgaaaagtaaaggttaggccctggtccttttacaagcaataaaagaagagaaaaagaaagaaaaaggaagagctatttctatatttgccacaaatttagccagttcgggattgaggtgtcgaattctccccgtgctctgtgaatgattagtcgcaattctctactaaattcctgagtatagcggagcacggagggatctctgtttgaaaacagccactcgtttcggcttttccagatgctccaagtcataagaatagtgatctccatagagaagggaacgttgagctggtgtttgaggttcacagatgcctcttcagggttggaaattctgggtggggtaatgccaattgagttccagcaggctttcgcgaagttgcatctgaggaaaagatgataaagggtctcctctctttgccaaaggcagttttcgcaagaataggaatctagctccatgtttctccttctcaacatatttctggtgtttagcctgttcttaagccacagccaatagaagactctatgcttaggctgacacttttccaaactagtttgtagataggatgagtctgcatctggcccatgaaagatctgtaagctttttgggacgagaatttgtccgatccccaaatgtacttccagcggtcgtgaacatcattaagaacaatttgctcccaagaccccttgagtaccagaaattgatcaaacgcttgatcagagacaggtaaatgaaaaagatcatgaaactgctcttgatcgttgacctctttgatagtcatttttgagttcttggcaaaggagaagagctgtgggaaaatatgcctcgggatgccctgactccactgatcatcccagaatgaaattgatctgccattgccaatgacgggggtagccagtcctttgaagtttggcagaagctttacaatgctcttccaccagaaagatccaacgcttctattaccagggagacctcgagtaagatagtaattgttccagatcagatggacccaaggtaagtcgctgtggttgaaaaatttatgcaaaaatttaattagaagagcctcgttctgcgtttctaagcgaagaacacccaggccaccattcactttcctctgagtgaccgaattccaagcaatcaaaggtggcctcttggagttgatgtcatttcctctccacaggcagtgctttctgaaaatatcaatttccttaatgatggttttaggaatcttgagcgtgcacatgaagaacattggtaaggctgagaagaccgaatttaccaattccaggcgcccagcctgggacaaaaaatttgaagagcaagacagcctcctctgaatcctttgaataagaggtaagtagtgttcctttctaggtctcaccaggcccaaaggcaagccaagataggtgaatggcatctcgccaatctgacaattgaaggtacgggataagatcaccattttatccggagacacgttaatagggaacatatttgacttgttgtagttaaccttcaggccagtagaagaggcaaaagagttgaggattgccttgaggaaaaaagttgcttagggcatgcttccaaaatcagaagagtgtcgtctgcatattgaataatcgggaaatcctgttcaccaatgtcaggcaatggtagcttgagaagattccgcatcctagctttattgatgatgctctgaagaaggtcagctgccaggacaaacaacaggggtgaaagagggtcgccctgcctcacccctctcctgcaatgaaaaggcttaccagggactccattaagtaacactgaggaagtgccagagtgaagaatgctccggatccagttgatccacttagggctgaaacctttgtggattagaacctggataatcaactcatgctcaatcatgtcaaaggctttctcgaaatcaagcttgagtacaatgatctctttttttgaggagtgacaaaggtgaatatattccaaggcccatgccaagcagtcttgaatggacctccccttgatgaaaccatactgatttttgtgaactaaccggggcatgaacggttgcagacgatttgccaatagcttcattaagattttcatactattgtttagaagagaaattggcctgtaatcccccaccttcataggactctcaatctttggaatcaagacaatgaatgatccattgatacttctgaggcaagcctggtcatgaaagaatttgtcacacagatcatagaaatcgggggcaatgacatgccagcactttttgatgaagtttgtattaaaaccatctggccctggggatttatctgaaggtaggagctttatgatgctatcaatttccagcttagaaaatggatgatctagcccctgtaattgctcattggaagttaaaatttctgataggtcaaacccaatatcagaaaagtcggacgaccccagtctgcatttgaaagcctcccagagaagattagacttatgttcatgttcaaagaatatggtcccattgtcatcagtcaaagcagagattgaatttttcctgtgtttaatggtggcatgggcgtgaaagaagcgagagcaaatgtctccctcagtaacccaccgaatagccgcacgctgcttccaataaattttttgaatattaagcaactcagccaccttttgttgcaggatttccctgaagttccattcctcaacagaaagatcccggtgctcttccatgatgtcaataagctcaattagcaacttaatgttcttcaccgttatatctatttttggcagcgatctctgccaatctttcagaactttcctaacaattttgaacttggcagtcagattcttggccttgtcgggaatgctagggatcccattccaagtagcttgaaaaaggttcatgaaaccatccaattcaagccagaaattctcaaaccgaaatatcgtaggtttagaaatcccttctctcttgccggcagtgggcaaagccctgccggcctccccaacgcccctaaccctaggtgtcgccctctaaccctagccaccgccctctaaccctcacaaccccatccattgaacaatactcgcgatcctaggaaccacataacatcagccccaaatgctgaccataagagtaaacttttatttagtcttgatgtattaacatcttttgtttttctcgaacgcgcaagagatgtgcacatcactatattaaatagaataaaagtccagaaaaagaccaagaacaaaaggtaccttacggtgtctaaaaacaaatatacaagaatgtaatgtcccgtgggccgtggccgccgccgagggtctcgccgggatgtgagcgtggaacaccgacgacggcgtcatgcgatgctgggtaggtggaattctattcatgattatttcatttcttggagaatagtttgaatacactttccttatacccgtgaacctaggctaggtcacagccatagacgccccataggtcggcccacacaccacatagcgctgtttcttatccgacacgctcacgcctcggcctcatcttcttcataccagattgtaatggcctgtggctgtcgacgagggtctcgccgggacgtgagtgtggaacaccaacgacgacgtcatgcaatgctgggtaggtggaattctattcacgattatttcctttcttggagaatagttcgaatacacttcccttatactcgtgaacctagaccatgtcgcagccataggcgccccacagttcgacccacacacggcccacacaccacataacactgtttcctatccaacacactcacgcctcggcctcatcttcttcttcagcatccgcgtccgtcctgttggcgccgatccgggcgccaatcactgcgttgagaacctgcggcgatgctctctgcataggcgcggacggtctgcggccaggggccggacggtccgcgacctggcgcagggctcgggttccctgcctgacgggccgggcggtccgcgcctaaaggctggacggtccgcgcctagaggctggatggtccgcgcgtgcgtaggggcgacgaagttcgtcggtggcgcctgaatcttgctcccgggagggaccccgtcggggaggaaagatcctaggcttcatctagggtcggcaggccaccctagacacctctaatcgacgtagagccgaagagaagcgaagaatttggggtagggaaaggctaacctagagctaaactagaactactcctaatgcataagtaaaacgagaaatagacttgatttgatcgattgtggggggtttaatcggccgtagcccttcatctatataaagggggaggtctggatccgctacaagttgtttcccgagctaatcccgcggttttaggtaacaaatcccgcgagaaactcggaaccctaactgactctacgcacgcgcggaatgtccgcgaggccacttcttgagctcaacatatgcccccctgccttttggtggaggttgacgaaccaaaagcatatgaactaagcctgatgcaagccaccagctttttcaattcaatatggtgatcattcaatatagccataatgcataaaggctgtttaggattgcatatttctcggccgtgaccatttgatcaatggatcaaaaggaatagaatggaggtgccccctagcctaaatagacaaagggagtacacatgtaccatgggttcatcgtcgtaccattccatatttgaataggacaatacatcgacgatgagtaggtgggtgggaagcatcctggcatgacaggatgaacaggcgatgcttgttgcgtcgtctttcggactgttttactcggccattttgttttagtgggtgaccggggtttctttgttggccgatcgcatagaacgaccttcttgccagcatatttggctagcaattgatcgaaagtagggctggcttttaccagccgaccatgtgcgtcatgttggctttgcccttgcgtctctttccttgctttgtgtggacgctgacgcctctggccatgggcggactgtctggctgagtcagctggaccgtctgtctgaacaccagaccgtccgcacgtaggtgtcggaccgtccgcgatgctcgggtcagcctgtcgtgcttggctcctcaattgagtctgcccccggcgcctccggacttgctggtcttcttgtccagagccttccgagcaatctcttcttgtgatatatttgacgtgcggggatcgctaatgacgatgttttcgcctttgcctttatcggccacttcgggccgaaccaagacctcttcgcatgtgggttctatggtattgacaggaaatggctgcgtgtccacttgcatctcctgaaaaaccaaccagccctcatttatggccgattgtatctgtcgacggaaaacattacaatcattggtggcatgagaaaaagaattgtcacttacaataaacacgtctctttaattcttccataggaggaataatatgagttaatttaatgttgccatttttaagtagttcgtcaaatatcctatcgcatttggcaacattaaatgtaaatttaatctcttcttgccgattcttttgaaccggctgtaaggaagaacatgtagaagatttggcctttgttggccaaacaaactcagcggtatatacatctgtggattcatcatcttaattatcatgctctactagatgtatagtacgggcggccgattttgatgtctctttaaatcggctttcacaagctaaagcccgctgatgtagctgagctattgaaaagaactgggtcccatctaatttgtctcttaagtaggatatcaacccattaaaagctagccctgctagctctttgtctgcgacatggatccgaaagcatcggtttctagtgtcccggaacctccggatataatagttaaccgattcttcgtgtccctgtcggactgaagctaaatcagctagtcccaattcatattccctggaaaagaaatgttcatgaaatttactctttaaatcatttcaggaattaatgtaattaggaggcaggacggcgtaccatgcaaaagcggtaccagtaagggataaagaaaataaacgaacacaaaatgcttccccgtcggccaattcgtctaggtgtgccaggaattggcctatatgttcgtgtgtgcttctcccattttcatcagaaaacttagaaaactccggtatccttgccctttgtggatatgggacagtgtcaaaccagtgatcatatggcttctgatatgattgccccactctagctacactaactccgagcctatctcggaatagctcagccatttcttctctaattttctccattgcgcccgtggcagaccatcggaccctaggctgtggggttcattcggtcggtcattgttatgccgaccttcttgccgtgaccgatcgataatgttgatcgacctgtgatcgtatggcgtgttgtggtttaaatatgtaggggacggaacgtactgctgctgtggtgtgtaataatttggtgcgtagtgtgcaacaataggttctgcgtatgcgtatccggtctgtccggtggtacatctgaactggccggttgtgttcgcttttattggggcgccacacggtagccctggtgcggtcccgggctgtgcggcagggaaagccggatgttctgcgtaagggccggacggtccgggcaaaagctcggacggtccaaccgtgtccaggggcgccgatctgccacgcaggaacaacggtggtggtatttgccctggatatgagttcatcggcataccatataatggctggggctgcgaatcctcatttgttgccgatgtattagacatagatatcctgttactagtttcatatgatagaaaattaggagcaacagacttctccaacgtacgcgttaattttctaattgattcttctaacccttcaatctgttgttttatttgattctgctgatgatctacatactgtttaatagattggatgtcgtcgggtttacgtacgttggggacttgaagcgaagatagaagagatgtgacgtcggtctctctatgtttgacaactttttggtggcgatctaccgtgtattatgataagaatttctccttcgcttgacacatgtagtcctcgtattgttgttgctcatcggccgttagactttcaacagttggcttcaggatattgtctggggagatatcagtgtgatctttagaactggccatttgagggcctaatttttagtagatctagacacctttctccagcggagtcgccaaaaagtgtgttggcgccgatccgggcgccaatcactaggttgagaacctgcggcggtgctctctgcacaggcgcggacggttcgcggccaggggccggacgatccgcgacctggcgcatggctcaggttccctgcctgacgggtcaggcggtctgcgcctagaggccgaacggtccgcgcgtgcgcaggggcggcggagttcgccggtggtgcctaaatctcgctcccgggagggaccccgtcggggaggagagatcctaggcttcgtctagggtcggcaggccaccctagacacctctaatcgacgtagagccgaagagaagcgaagaatttggggtagggaaagactaacctagagctaaactagaactactcctaatgcataagtaaaacgagaaatagacttgatttgatcgattgtggggggtttaatcggtcgtagcccttcatctatataaagggggaggtctggatccgctacaagttgtttcccgagctaatcccgcggttttaggtaacaaataccgcgagaaactcggaaccctaactgactctgcgcacgtgcggaccgtccgcgccaccaccgtggaccgtccgcgaggccacttcttgagctcaacacgcccctccttcagtcttctcacacgtggagtgcccaggagccatcacacctgccccctgcagaacttgcttgcccccaagcaagtgcttgcgggaatcgctgccggaggacgtgataatcctcccatgtcgcaacatccttgggtagattactctagtggaccagcacctgaggaatagctcgtctgcccttcttcaccaagcgtctttccatgacttcgacaggttccacttcatgtttgctaagatcagagctaggaggaatagtagaaaacactcggagaatagttagcagtaaacaacttgagctggaaacgtgaaacaccggatggacttgagctgagtctggcaattccaagtgatatgccactgatccaatatgttccagaactttataaggtccaaaaaacttgaatgccaacttgggacagggcctgctgacaaccgagtgttgagcatatggttgaacgttgagaagaaccatttcgcggacctgaaactgccgctctgacctcaacttatcagccttaggcttcatacggttctaggcaacaacaagctattctttgaggagttcagtaaactggtcatattcagctaacatctgagccatagtaatgtcagtaccagagggaacaacaagagccgcagcaaatggaggatcgtagccatataacaccttcaacggagaacaagccaaagaagtatggtaggacgtattgtacccgaactcggccaaggaaagccaggtcttccacttatggggttgagcatgtacaacacaccgtaggtacatctcgacacattggttcatgcgctcactttgcccgtctgtttgccgatgttatgcattgctcaggcttagtttagttcccaacaacttaaacaactgagtccaaaatgcactcgtaaacactttgtcatgatcactgacaatagattgtggcaggccatgtaacttcaccacttgatccagtaaaacctgagtaacctgagcagctgtaaacgagtggttcagaggtaaaaatgagcatactttgaaaagcgacccaccacaaccaatatagtatcatatccctcggactttggcaatttctcgatgaagtccatcgtaatgtgctgccaggccccttgtggtatcgacagaggttacaataacccaaccggatgaactcgatccccattagcctccggacaggtttggcattgtcggacaaagtcttccacctcctatttcatacccttccactagaacagctttttaagacgacgatatgtagcatgcattcctgagtgaccaccgatcgcactgtcgtgcaacatggatataagttcagtacgcaaggctgagttgttgctaacccatatcttgttgtcttacctgatcacaccttgtgacaaagtataatcatgctcatctgggctgtggagacacaaacgtgccaacagattctgtgcttcctgatctgtagtatatgagttaaccacctcttggagccagaccgattgcactgcactaactacagtgactgccatacaatatcccacccgagagagcatcaaccaccttgttctccttgccctgtttgtaaataaccttaaattgcaagcccatcagcttcgacatagctttacgttgaagctccgacttgattgcccaaaaagttgagagcatgatgatctgtgtgaatttcaaactcacccctctgcaagtacctccaccgatcaatggccataatcaatgcaataaattccttttcatagattgataacttttgattcttgactccaagtgccttgctcaaatgtgccaaaggtcgaccttgctgcctcaaaaccgcctcgaccccagaatcacagccgtcggtttcaactgcaaatggcaactgaaagtcaggcaaagccaagaccggtgtggtcaccatggcattctttaagtgttgaaaggcttgagtagcttcattcagttccaattgaaacacaccctttttgcaacaatttggttaaaggccgagccatagtgccataatctttcacgaatcattcagtttaccccgtcagcccgagaaacccacgaagctcagtaacattagtaggctgaggtcagttacacattgcaatcgtcttctgtggattggtggcaaccccatctgatgatataatatgtcccaagttaactgcggacggccaaaagcacaccttttcatcttgagaaagaattgatgctgtcgaagggcagaaaagaccaactgcaggtggccaggtgctccaaatgttcttgccaatttggactataaactaggatgtcgtcgagaaagaccatcgcaaatttgcgaagatacggagctaacaccaaattcatcacacattgaaatgttaccggtgcattcgtcagcccaaaaggcatgacccagaactggtaatgtccatgatgcattttaaacgtggtcttatactcttctgcctccccatacgaatttgatggtatccggaagtcatgtccaggcttgaaaagacttgtgttcccgctaactcatctaaaatctcttcgacaactggcattggaaaccggttttgatcgtcatattgttcagtttccggtaatcaacacaaaagcgccaggcaccatcttttttttgcagcaataacacgactgaggcaaaaggactcacacttggggtgatcaacccagctgctaataacttctgaacctatctctcaatttctgacttatgggcagggggatatttgtatggccttgagttaaccgatatggatccgggtatcagcggtatgtggtggtcaaatggacgttgcgatggtaactgagagggtactgcaaacaagtcctgaaacttctcaagcaactgtttcaggttagcactaatcacctcttcttgctccttgggcttttcttccagtaatgcacacacccagacttcattaccttttaaccacttgtcgagttggacagtagacacctcccagacttctacttgctccccatctcctatcagctgtactaactttcccttatcttcaaaagtgacgaccctttccttccaatcacaatacatcggactgtgattatgtaaccattcgtagccaaaatcgcatcatatgctcccaattccaacaccttcatgtcatctctataagagtgaccattagaccaccactccaatgctcgaaccacctaatcactcctcatcacctccccattcgtcaccttaaccttgacaggagtacaactctgcgtctccaggcctaacctctccactaactccttgttcacaaaagttgctgaactcctagaatcaatcaaaagtaatagagtttggttgccaatcaaagctcttactctcatacactcctgatttgtagtgccactaatggcatgcaacgacaaataaaaattctcctcttctaatgtaatctattccagcatctcggttaaagtcatttccaacttctcagtagcaatgcatgtaactgctgctgaaccttagaacaacgagcctgatgtcccggtttgaacttttcgccacatgtaaaacacaatccattctgtctcctatactctttcaccagtcgttgcttggacatgtcaggcatattttgtgctcctctcacctctgacttcgatcccatacctccaaacttggaccagctaccctcaacgatttttggcgttgtttctccaaaattctgtgctgcacctgagccaacaccatagctcgattcactgaagaaggcaaatgtgactgaactgagccttgcaactcatgctttagtcccttgatgaactgagccacatagaatgtatcatccagtgtatgattgtgaactgatgttacacttcgagcctcttcgaaatgcttaacatactcctccacagatcctgcctggtacagattcagtagagctctcatggcctggggatactcctcaccagaacgttgcaacaccgccctaccaaactcattccacgatcccagtccattctaattcttgaacagttgaaaccaccttgaggcattacctttcatactcaacgacgtcgtgatcacccaaatccactctggcactcgatacaaggtgaagtagtccacacatttctccaaccatactcgaggtccctccccttcaaaccttggaaaaggttgccgaggtagcgtagacaccggtacctctagatcccccatatgcctctccccaaattcacgattaggatgtgcgatttgttcttcatacctccttgccagctcgggttgtccagaccttgtgcctcctccccaacttcttcctctagctatcagatctagcgattccatgtctcgagccatttgctccaacctcatcttggtgaccgccttatccgtcctctcccactgttgcgcaagcaagacacactcctccgtcgccttctgcaccaccgttgccgccaaactcgcttgcgccaacagctgctgctacacctcctccatccccatcaccttcttcgacaaccgatccatcttcatcatcaacctctcccaccgatccacatcctttttctccttagtcgacatggcctctaggacgagctatgtctgacgagggttttggagttggcgccgttgcggatgactccaactacctccgtccttctctgttgccgaccccacgccgaggagagtggctttggtacaagattgtaatggcccatggccgtcgacgagggtctcgtcgggatgtgatcgtggaacaccaacgacaatgtcgtgcgatgctgggtaggtagaattctgttcacgattatttcatttcttggagaatagttcgaatacactttccttatactcgtgaacctgggttgggtcacagccatagacgccccacagttcggcccacacaccacataacactgatgacatgatggaataagtcttgagcatctagaggacagcctgcttttgactgtcctctgtagtcctttagcatctagagaacaacttgactgtcctctgtagtctctttagcatctagaggacaactgtcgctttttgactgtcctctgtagccgctttagcatctagaggacaacagtcgcttttgactgtcctctgtagtctctttagcatctagaggacaatcctgttgtgtagtgtgtgtgagaaggtgtggtagtgcagcccctagggatataaatatgtgtcctcaacccctctaagggtatgacattgtgtagtgtttgaggaaataaacagaaaattgccccaactcatagtgtcatcctcttgatgagagttagagtccctctacttacaattggtatcagagccaaactatcctgcagcctaaacatctcgtgctcatctccttcccgagcctctccccacactcagtcggcagcaagagctccaactgttccttcctcccctgctcagacgagcagcctttcgtctgagacagcctcttccacacgcagcgacccctcactagcccaccatgtccctacgctcgaccacttcgagtgcgcggcgccagcaggaggccgaggtcgccgcggcacaagaacgcgagcgagcagcagcagcgacagcggcgagggcagcacggttggcggcggcggaactggcagcggcgagagcggaagtagaagcagcggaggcgacggatgctgcacgtgcggcggcaacagagctcgaggttctgcgcggcagtagagctggcagctctgcttctgtcgacgacaacaccgacgaagagctcaggctggccagggaagcagcgcgagagcaggcgacacagtgggcagccgcgcatccccatgggggcgcgcgtggcggcagcccggataggcgccgacgcgctgacggcgctccaggcgggggcgcacgcggcggcagcccagacgggagtagacgcgccggcggtgctcccggcggcagcgatcgagtcgacggagatcgcggcctctacaggcggcgcggttctccctccccggatcggtaccatggtcgccgcatggcccaggccattgtcagggacatcggtcccggcggtgggtggcctaccctcaccaagaccaactacgtcgagtgagccgcggtgatgagggtacggctccaggttcgccacatgtgggaagcagttcgttacgacgacgtcgactaccaggaggatcggcgggcgctggatgccctcattgctgcagtcccgctcgagatgcagttttcgctttcccagaagcggactgccaaggaggcctgggacgccatcgctgcgacccgcatcggcagcgatcgtgcccgcaagaccacactgcaggcacttcgcaaggagtgggagaacctggccttcaagccaggtgaggatgttgatgactttgctctccgcctcaacactctgttgcagaagatggtgtagttcggcgacgacacctacgatgaggagagagctgtggagaagctcttccgttgcatccccgagaagtacaggcagattgctcgctcgatcgagtctctgctagacctctccacgatgacgatcgaagaggcgattggtcgcctcaaggtggtcgacggcgacgaaccacaggctctctctgggcctatcactatcggcgggaagctacatctcactcgggagcagtgggaggcctgccagggtgacaagaagaagggggactcctcctcgacacgaggccgcaaacgcggcaagccgcgcaaggcgcgtggaggcgcccaggccggggcgcgaggacatgctgagggtggtgcacgtggaggtgcccaaggcggcgccgtcggcaacaagaagccggcacgagacgacggctgccacaactgcggcaagcttggccactgggccagggattgtcggcagccacggcgtggccaggccaacgtcgcacaggcggaggcggaggaggaggccctgctcctggcatatgcaagcatcgagccatctccagcggcaccggccgcagcagcactcctccaccttgatgagtcgaaagcacgcactttcctcggcgacggctctaacaaggacatgatcaaaggatggtgcctcgacaccggcgccactcatcacatgaccggccgacgggagttcttcaccgagcttgactctagcgtccgaggctccgtcaagtttggggacgcctccggcgtagagatcaagggcgccggctcagtcgtcttcaccgccgcgtctggtgagcacaggctgctcaccggagtctactacatccccgcgttgaggaactctatcatcagcttgggacagctggatgagaacggttcgcgcatggaggtcgagcacggagtcatgaggatctgggatccctctcgtcgccttcttgccaaggtacacaggagttcaaatcggctatacatcctcaatgtgaaggtggcacaaccttgctgccttgctgctcgtcgagacgacggggcatggcagtggcacgagcgcttcgggcaccttaacttcgaggccctgaagcggctcagtgccaaggagatggtacgaggcctgccgtgccttgaccatgtggagcaattctgcgatgtctgcgtgttgacaaagcagagacggctcccctttccccaacagtcgagcttccgagccaaggagaggctcgagctcgtgcatggggacttgtgtggcccagtgacaccagccacaccaggaggacgacgctacttcttgctgctcgtcgacgatctctcccgctacatgtgggtgatgatccttggcagtaagggagaggctgcgaacgccatcaggcgtgtgcaagtccctgcggaggcggagtgcggccgcaagctgcgcgtgctgcgcaccgacaacgacggcgaattcacggcggctgagttcgcgtcgtactgcgcggatgagggcgttcagcgccactactctgcgccgtacagcccgcagcagaacggcgtcgtcgagcggcgcaaccagacggttgtggggatggctcgagctctcctcaagcagagaggaatgctagctgtcttctggggagaggcggtggtgacagcggtttacatcctcaaccgctcgcccaccaaggctctcaacgggatgacaccgtacgaggcttggcatgggcgcaagccggcggtctctcacctacgggtcttcggttgcctcgcgttcaccaaggagcttggccacatcagcaagctcgatgataggagcaccccgggggtgttcattggctacgcggagggctcgaaggcctaccgcatccttgacccaagaacacagcgtgtgcgcacggcgcacgacgtagtgttcgacgaagggcgaggatgggcgtgggacaaggcggtggacgacgacacgactccgacgtacgacttcaccatcgagtacgtccacattgagggagctgggggagtaggcaactcttctccgagcaggtctaccccagcccccaagtctccaccgactccagcgccaaactctccagctcctgctacaacgatctcttcaccaccacgcactccagccacgactctggctacagcgagctcttcgccaccacgtactccagcaccaacggtaccctctccgggaacgtcctctccgacaccagctcgtgtcgagcacgacccagtggagctcatgacccctctgtcccgcgacgaggagcgcgtcgacacgtgctacgacggcgagccgttgcggtatcgaagggtggagggccttctcatcgacccgtcggtgccaggccctgcatctcgcattctggcaggagagttgcatcttgcatgcgacgatggtgagcctcggtctttcgcggaggccgagaaacatgcggcttggcgtgccgcgatgcagtcggagatggacgcggttgagacgaaccgcacctgggagctcgctgatctccctcatggtcatcgcgcgatcacccttaaatgggtgttcaaactgaagagggatgaagccggcgccatcgtcaagcacaaggctcgcttggtggcacacggtttcctacagcaggaggggatcgacttggacgatgctttcgcccccgtggcacggatggaatccatgcgactcctccttgcgctgtcagcccagcagggctggcacgttcatcacatggacgtcaagtcggcgtttctcaacggctacttaaaggaggaggtctacgtacaccagccgccaggttttgcgatccctggcaaggagggcaaggtgttgcgcctgcgcaaggctctctatggcctgcgacaggtaccgagggcgtggaatgccaagctggattccacgctcaaaggaatgggtttcacgccaagcccgcacgaggcagccatctatcagcggggcaatggagaaaatgctctgctggtgggtgtctacgtcgacgacttggtgatcaccggcgccaaggatgcagaggtggcagcgttcaaggaagagatgaaggccaccttccaaatgagtgacctggggcacctctccttctacctggggattgaggtgcaccaaggggactccgggatcacacttcgccagaccgcctacgccaagcgcattgttgagctggctgggctcaccgactgcaacccagctctcactccgatggaggagaggctgaagctgagtcgcgacagcacgacggaggaggtggacgctacacagtaccagcgtcttgtggggagccttcgctacctcgtccacacacggcctgacttggcatactccgtcggctacgttagtcggtttctgcagcgaccgacgacggagcatgagcaggctgtgaagaggatcatccgctatgttgcggggactctcgaccacggtctctactacccgaggtgccctggggaggcacaccttgtcgggtacagcgatagcgaccacaccggcgacatcgacaccagcaagagcacaagcgggatcctcttcttcctcggcaagtgccccatcagctggcagtcggtcaagcagcaggtggtggccatgtccagctgcgaggccgagtacatagcggcgtccactgcttcgactcaggctctctggctggctcaactgctcggtgatctcctcgggagagacactggagcggtggaactcagggtggacagccagtccgctctggcattggccaagaaccccgtgttccatgaacggagcaagcacatccggctgagataccacttcatccgagactgcttggcagaagggagcatcaaggcgcgctacatcaacaccaaggatcagcttgcagacctgctcaccaagccccttgggaagatcaagtttgttgagctttgctccaggtccgggatgacccaactttctcacaagacgacgcccaaggcttagggggagaatgatggaataagtcttgagcatctagaggacaacctgcttttgactgtcctctgtagtcctttagcatctagagaacaacttgattgtcctctgtagtctctttagcatctagaggacaacagtcgctttttgactgtcctctgtagtcgctttagcatctagaggacaacagtcgcttttgactgtcctctgtagtctctttagcatctagaagcatctagaggacaatcctgttgtgtagtgtgtgtgagaaggtgtggtagtgcagcccctagggctataaatatgtgtcctcaacccctctaagggtatggcattgtgtagtgtttgaggaaataaacagaaaattgccccaactcatagtgtcatcctcttgatgagagttagagtccctctacttacatgacacactcacgcctcggcctcatcttcttcagcatccgcgtctgcctctccttcagtcttctcaccagtggagtgcccaggggccgtcacaaagaatggatccataaaaggataaaaataactacccactaaatccccggaattggggctgttagtagagccaagcttttggatccaactagctttcacatttagaataatattatgctagcttccgtctgttcaccatctagaaaaatattaagctaatttaggcatgaatgttatatgcttcaatcatagtattagttcttagaacacagaagctgtgtacaacgtacctctttgtattaacagaaaaaagataataaaaccatcatgattacagaagcaactgcaattcctcaaaagttgaggctagagcaggttgtaaatagaagaataactcaatcaccaatgagaaagacaatcttagtattagtgttcggacttgggactaccccaaacaggagagagacgagatatgctctagggtttggtgtgagatcccccttgcctttggcccatgggttgtattcataggggagattggaagaggaaatcttcctccctatctgtaacaccctataacctccagaagttccaggatgttattaaactcccaaactaacaaacattaagaactagcagaaagaaaacatataattttttaacactatctcctttgtaacttaagcatatcgagagtattacgatgtataaatcagttattgaacctaacaaaagcataaccaatataaaaaacttcgatggtggggggaaagaccgccccatggattttgactaagaagatgtcaagggcgttagtgcccaaggcaggaggaccccggctacgtagttcatagccttggcccgtggttgccggcagggttatgcccccacgccgagcttcaacgtcgactgggtgaatcctccagtcgccggcttagagggatagatagagagagggctggaaagtaatgatattgctttcccctcaaggtgcctccgcactaggttatatagccggtggccttacaaaatgtagaaggtcctccttgattgtaggactaatcaaaatagggaatgactaatcagctagatactttctatcctagccaattcaaaatagggaaatgactaatcagctagatactttctatcttagccaattcaaaatagggaaatgattaatcagctagatactttctatcctagccaattcaaaatggggaaatgattaatcagctaggtactttccatcctagctgattgcctgctgctcctgcgcccttgctgctcgctcagccgcacgacgcacgtcgcgggctcttctgcgcctggcgtacgtgtgcccgtacatgacatctctcctctcctcgagaggcagctcgtcctcgagctggaatgtggggaacttggcgctgaaggtgtcgacatcctcccaagtcgctgatgctggggactggtccttccactgaatgagtacctggcgcactccgcgggcgatcctgttcttgacggctcgggctggctccaaggtgacggctccatggtgaagcgggggcagtggtggcgtagcttgtggaggagtgccctggtacttcttgaggacgcccacgtgaaatacatcgtggatacgggctcgtgccggtagctttaggcggatagcgacctcgttgatgatctccaacactcggtacggcccatagaaccgaggctttagcttgctggtggtgtcggtgttgagggaggcaggggaccggtggcggaggcagagcagcacccactcgcccacctgatatgtgacggcgcgatgtccctggtcatagtacttttttggacgacctgagcctgctccagacgatggcgcacatcagcgaggaactcctcgcgttcctccatggtcctggccacaacagcaacacgtgtgtcccccggctcataggaccggatggatggaggatcgcgtccgtagacgatccggaatggcgtgtcacagatggagctctggtaggcggtgttgaagaagtattttgcccacggaagccactgcagccattgtcgtggtcgatcacccgtgaggcaccgcaagtacatggtgatgactctgttcgccgactcggattggccgtccgactgagggtggaaggccgatgtcatgtggaggttggtccccatcagtcgcatgagctcccgccagaacttggaggtgaacacgatgtcgcggtccgacaccatggactgcgacaccccatggaggcggacaatttccgcgaagaacgcctgagccacggactccgctgaatatgggtgtgccagcggaataaaatgacagtacttgctgaacctgtccaccactgtcaagatgacggacttgccacgtactcggggcagggcttcgacgaagtccaacgccacgtctgtccaaactccctgccggatcggaaggggaagtaggagcccggccgggtgtaggtgctcggacttgtggcactggcaggtagggcactcctgcacatagtcttggaccacctgcttcatgttaggaaagtgaaagtcgcgtcgaatgtggcggaaccgcccgaattattccaacttaagtgcctaagtcccgccttagaggctagaccacacttaaatgggaataacccgtcaatccctcggatctagtccgacgaggccaccaacaggatcaagtaccacgtactcactcgatggtgagacacagagcaaatacaataaaacataaaaccatacattaaggagtattaaatttattacattatcatcggagtttttgcaaaagtagtcatcattgttcggaatgcagcggaataaaactaacggtaaataaacagagagatggggaagcctgtcccatcactcctcatgctcctcctcagccgaggtagggtcccactcgactgtccagcccggtggcaagatggacgaccaagtcactccaacaaccatgtcctccagagaacctgtaaaattatgccacaagcaaggctgagtatactaatactcagctagacttacccggtgtgaggagtctactcctctacctctagacatgcagctgtttggctgaggggtttggttgccaaaagcactagctgagtttattaatcaagttttagctttgtcaagttttagtgtgactctcttaagactaaatgtatacctatctaatcatacatggtatcaaacatttagcaatcaacaacttttgccaagtcatctcattttcacttgttactcaatgtagcagcatggatcaagtagtctcattagctgcgagaagcagacaattcgaatcgagtttttaaaccttgcaaggtaaacctaaacacacgacgtggcgaggcactccgtccccacacacatcaaccgtccccatcgattccccgtcagcagatcagggctcaccaccttggcgtgcaatgcctcactgacctcgactgccgtcgtgcagtgaccgcacttgcacccaccataactggaatgggagaccacgtctcaggtcgcgtgaggggatatgtccactgccaggttcactcaggtactaggcttaccgatttaccatatttctcggcatgtgcttagtacattcaaacgcttgacacacgataccacaccttaatccttattccaattcccgtctcgtagacaacgcatccccatggaccgttgtccacagactattatcattacgatatcaaaatggatacaaccaattcttgacctcgcgcgagtgctagaaaaatcactcgacttctaccgagatccctaattaataaagcagctactcgacctagcatactagtatccatctcaacaaggattcctgagttcatgcaactagggtttcaatcaactcctacacttaagtgcacaatacaagcctacaaacattaagtgtagtaaaatatcgtatagaacaggttatgcataaaaccggggcttgccttccaaagctgggacaggcagatcctctggggtaggctctggtgctggatccggggctacctcctgagcaactccttgctctggcacgaggatgtactctccgtccgcgaggttgcaatctatcgaatgcaatgaataagatatatgcatgctatgatatgtagaatttaatagcaattatgccttagtgtagaaaaactaagttggttaatcatttagggttttcttgttataagaggctcttagggttttaggcctatcaatttaggtttgagtttcttgcctaagcataatggatggagacttggaatgccccttaaatgttttagtgggtactcaaggggttttgctggtttagttagggtaacattagtctccactattaatttctttttctttttctatttatgcttttggggtaggtttgaactataacagtgatttaacttttctcaaaaattctataaaaattacagtgggttactatttgtcactgcagtctgtcctataaatttgaggtggatactgattaagatattacttgtgcaaaattaacaaaaacaagttttaaaagggcactttacactatagctgtgatttaagtaaggtttctgtaccaaattttattttttttccaaatacataggtgatattaggcctctgtcttaaaaatcacagaaaaaggcctactggatatttagttgtgaatttctaaagttttatgccagaaaggtgtttataactaacttgttatttgaaaaatatcaaacaacagatttcatatttttcctatgttcataataacaaaacattagttatcccaaggtttgaggtgttttctcctcagggttatttttctagggtttcctggtttttctaaattaaaaggtatctcctttcttttgcactaaacaagggtataataaattttctagtgaattacactgaataagggagctaacaaaaatgtgggtgctccctggttcttatattaaactacctttaatattttctctaactttaggctaaaaaggctaaaaatgatttaaatggttaactctaccttaacttggtatacagaggggtttattattttttaaataggttaggaagtgattaagtatttctctaaattttcttaaccccagtctaatagtgtagctatttttccttatttcttttagcttttgaccagttaatcatttaaatcaaaactttaaagttttctgtaacacttaggggttttatatttttcctaagtagtttacattatttaggatctggcaaaattggtttgactcgatttgggtaaaccaaactgaagttatgaatttttcaagttatgtttggatttaaatcagaatatttaaaaggtttcctggaaaactactttgcatcgaagaccctgggttcttactaaactaattccttcagttatacccctgcgccactattcccctgagtcactgacagcgcacaaaaccccctggccttttcttcttctctcccgaggtccttccccttatgtaaacagtaaccgcggaaaggaaaagggcggcgcggtttaccgacggcgagagaggtctggcgaggggcgggttcgcttcgggaggtcctggcggtcacagcgaggtacgctcgacgcggtggtggccggaatcgacgggtccacgtgcgcaggcgggtgaactcgtcggcgacgagtgctccggcctaacacggcgatctagttcaattaaacggcacgatgagctccaagggatgacgtagaggctatgcgcgcagggaatcggaaaatggtgcagagacttaaccggtctacgttcaccggcgatcgggtgaagcccggcgatcgtggactggcttctctggcgaggcaaggtccaattccttgctcggggagcttcaccgaggcatgcacggtctactccgagggtcggacgcggctgagagaggctctgctggccggtctacggtggcgggggttcgggtggccgcgggcacgccgtttgcagggcaaacgccggtgatctctggctccggtgaggtcgagcgcgcgcggaggagtatggtcgacgtctctgggggctttataggcgcgggcgcgggcaacggcgccggctcggctttggcgcgacgcggggcacgcgggggcgtgcgtcgggcgtgctctggcgagctcagagcgcgtcgaacatgtggctctttgtttctgttcttgttctaccctctgctgagcggccaaaacgtacgaatcttgccctaagacctgtgagagatctcttcccttcacctagggctacctagttcatgtgagttccaaggggagatgtggtcgggttagagagatatgggggtgggaagttgtctttgtcctagctgtccaaaccgagacaaatcttgtgccaagtcgtgtcaaacgacttagggttgggttcaaacttttccagggtgttctagaggtattttggcgccactttgtcaattgggccaagtggagtttgggatcaaggtgaacatgtttgatctttggaaagggggtggttttggacttagaagaattctgatttttctcttatgttcaacccttttgtgaatcttttggggtttttttgaaatctttttggggttactttcttactattacttgtacggtattaagtgcactacatcttgtataattaggccccaagacatgatcaagtggttttcataactttttggtcatacttacctatagtactccaattatgcacagggggtgcattagggttttgggcaatttctcccccttcaatgtacatggtaagccaaggcatgacatctaagataggttgcacttacttaggatcttgagctccaaatttggtgtactttttcccaacttaagtcacatgtgatgatgggcttacttgtatagtcttgagtgaaaaaccctaagtaacacctggggtgttacatcgaaggcgatgcagcgtgcgctggaccccctcgtggccgtcggcgtgcatagctgccagcagctcctgaagcagcggtgaagatgacggtaagtagagtcggccggcgtactggaccatcccgtcgaccaccgcccggtgatgtgtctctatatatgtaccccttctctatgcaatacatcaagcattacacaatcttacatggtatcagattagggtttcccacgacccgtgctttgaggcccaacccacacgaacaaccccttacacatgggcccacccaccataggccagttcgcccatgccgaccaagggaaccaatgggtgacttcattaacctcagcctgaaattcgctctcacggggagtcgaacccaggacctgaggagtgctactcagaccaccgaaccaactcagctactattataaatataaatcgaccatattaaaagtaaataaactataccatcatgccaagcttaaacatccaccaaaaagttattattatcatgaaaatagttgaattattaacataaattgtttaaacggtgaagtgtaaatgtgctactattttcccaaagacaaacatcatacacccgaaaacaataaataaagcaatggtgagatgaaaacatctcaacaagtaattggttaacaagtcatgtaaacttcgtacttacagaataattaaatatataatgcacctcttccattgaattagactacaactaaattataagcatatacactacattgcatgataaaaggtagaacttcacaaccacaaatacatatccgctttaaatgccccacatgaatgcatatgagtgtgatgtatgctttcttctaccttcatacctagtaatttatggagccatgtcatgaagatgctgtaccggtatggtcaagacataggacatgacataacttcaatgcaataacttcatcacgtatatgtagtaccactacggtccagtcataaggcttgacatagcttcaggatcacacaaatacaatactggtacggtcaagaccataggtcatgacataacttcaatgcaataacaatggagaatagaatgcatataatgaatgtaataaaccgcatacttcaatggtatatcatctttcttccaacagaaatggaattcacaaccaatttatgatatatagagaataactctatatccataacaaatatcatcttcaacagaatatgagcaagttaacttcaaaactcagatacttcatagaaggggggacgacttcccccttagttacgtgaaagaggaagaggcacaatgtgcttcgtgtgtgaagaactcacggaagaaaaccagagggcagcgacttagggagaaagaaaataagaaaagtcccccaaccctaaccatcaacgacccaaatcgtttggtactttgaatattgattcgaaacccaaacgagacaatctatcagtcgatcaaaatcgtcttgacgagctctacacatctacggtctctgatcatacataggacacaccatacttcgattatgatcatgatttggtttatgcactggcccttagcctttacaactagggtctttttacaagggggtgggatggggggacagggtaggactagaccatgcctcattccaaacaatactcataaggcacactgatgactctatactaatgggcacaaccgtgcttagatgaactttgtgctgacaatgatacaatttcattggattcactagaaggatgagatgttaccgatccactgttgtgtaaaatctttaatcttgctatattgatgattatcttctactcaacgaaaatgatatgctttatatgcgtagtcacttgggtccaacacgtagatgccggtatctcacatactaacaaaaatactatagatgttgtttatttgtttgagttttcactatacatttaactatgcaatgtgacatatgataaaggcatgttcctgcagaagtgtctcatatggaggcattattgactttttttattactgtggctttgatcattctgaggattatttgggtagatgcaatttatgtgtattattttgtagtggttaaaccgaaggattgcacttcaacagagagc

SEQ ID NO: 1004 - DNA, 859 bp, Zea mays
  Intron number 1 from transcript GRMZM2G165170_T01 (locus G RMZM2G165170) derived from phytozome v7.0 (chr-ID 2; pos 1 36046033 to 136046891)
gaacgtctaatctgataatcgtcgctgattgtggggattttcgaagttatttgattacggtaagggctcgtcgtttatattctatttattttacctccgaagtagttatggtgagctcaaagtgtgttaatgcttgttagagtaataaatagcttggacaaatatttttagtcatgatgaacctcgtgtttagtcaggatgcattgtgtggtatttcagtgatgtgtaggataaatttagtgtttaagcaattatcgttaagtttgccgatgttaattgtgtcagtgcgtttgtacgatagagtcgatgttctatgttaatagttaatataatctatatttgtgatcagtaaatgtcatcgtctgatattgattagttaaattagtagtcgtgactaaatgtttattttatcctggttgtgtctacccaaacaagttaggaaagtagtttcgtagaactgtacgttgtatgataatgttctactgttagattaagaatacatgaaatatttaatttaatgggacttatgtataatagctgagaatagtaattctagaagctaatagagtggtttctattttcagagtttagatgttgtgctctagtcaagagacatatggtgtttataaatggttcgttgtggtttgctgttagaattagattcgattaagctaaaataccataaatatagttttaatgtgatctcgacacctagtaatttcttttatgtgctattatgcgtctcgcccttaagtgtttagttttctaccgtgtagcaatatttattcttgtactattcctgtctatatacattcatatgcataatgcatttcattcaggtacgtgaattaaccacgtg

SEQ ID NO: 1005 - DNA, 16049 bp, Zea mays; identical to SEQ ID NO: 669
  Intron number 1 from transcript GRMZM2G117458_T03 (locus G RMZM2G117458) derived from phytozome v7.0 (chr-ID 6; pos 1 55465795 to 155481843 reverse strand)

SEQ ID NO: 1006 - DNA, 1986 bp, Zea mays
  Intron number 3 from transcript GRMZM2G309933_T01 (locus G RMZM2G309933) derived from phytozome v7.0 (chr-ID 10; pos 78139600 to 78141585)
ggaatcttcagagttatcttcacaaagcaagcaaggtgcaccatttttttgcatttctaaacttacattaacaaaaccaaagaaacctaagcttaatattggtactcagattagtgctatattatatttaaataaaaaatactgagtagtgaaacagtaccacatgtttggtgattcctgaacctatattctgagaaatggatgagccatacttctatttgtttactaagtaactgaagtggtcacagatatatacttctatttgcctaactcaagtggtatcatttaaacaactaaggtatgccagttcatctgttctagccttctaggtccgaaataatgctgtgaacctaaccacactcctgattttccctactccagtccagttatactgaaataattgttagatatcacaacagtccatgtccatccatcatgcaataattttttttcctactatacatcttgaccacgcacttctatccatcaagtacattgtatttctacaaaaatcacatatgtacttaaatgtgttcatactgcaaccatataaaatctgcaataatgataatatcaacgatttgagcatttagtcatttacatataatttgtatgcaaatgttgctgcatgttctttgttttcaaacagcttcctgctctggcttgttgtacttgtaataaatgataataactcaagtcttcccttacttttgcttcctgctctggcttgttgccaactgaaaatctgagattatggagtataaccattttgtactattcaatatcaatgtcactagtactcgtaataaatcatttagaggaaatgattatgataaataataatagacattagtaaccgttgaagctttatcttctttcattttatcgctgtatctaagatattgtatccttttttttgtgatagcatcaggaagcaaaatgggttctcttagattaattagttcaaaactttcacaactcaaacatatattattcttgaggttatagtatattagtattatataattcaaaactggtatgtttctgtttttatttatagcaaaataactgatgtactccctccgttcttttttatttgtcacggtttagttcaaaaatgaactaaagggcgacaaatattcgagaacggaggtaatatatattaatagaatagtgaacttgtattatagttagaactatgtcaataataaaatgataagagtttatcttacacaaacatacagctgcagtgtaattgtaagtttgtaaccacaagatatgctttcaacatgcctacaataagagtttatcttatgcaaacatacagctgcagtgtaactgtaaccataagatatgctttccacatgcctaccttccagtgcgtctactggtcctgtttcagtaaattcatatatgccattaattttcatggttcaaaccctctcgagcccatttatagactaagggcccattttacatagctctaattctactttgaatctttaatgtgtaaactaaactaaaaggatttaattatttgtatattgtctaaattataaataaaatgggtcatctagatactcttgacatatcctcacctctagatagagcattacttgaagctacaaatacccagctctattatatccatagattccctggagctgagactctgccaaactgggtataactagtattagtatccatgggttggtatcctccaaagtgggtgccgcaaagccgcacatgtgtttctagtctttctttaacctaatctgtgtaagataagatcagtgaactacatgatttcttctgtgaaattttatttttcttgaactggaaataacgagaatccttcaaaaatcttagtgttgccacttgtcatcagcatatatataactgcaaagtcttgcaattgaattgtgtgatttgtttcagtgatgcagtaaccccttgttttaatttggctcatactaggttcctgct

SEQ ID NO: 1007 - DNA, 14036 bp, Zea mays
  Intron number 1 from transcript GRMZM2G320549_T02 (locus G RMZM2G320549) derived from phytozome v7.0 (chr-ID 3; pos 1 9784379 to 19798414)
cccgccggcaagctctacgagtacgcctccaccaggtaataataattccaattctccctcccgccccggcctcgatcgctccccttcctgttccatccgatttgttgttgcttgttgtgtgctcataccatcctgactgactattagcaagagcagttcgtcggcctccctcgatccccccttgtcctgtcccgccgcctcgccatgcgctagcttccagactgtctcccgccgagttgcacttgcgcgttgcgccacaccttgcatgagagagactgggagcatgacctgacccctgcctgtccctgtgcgtccacctgttccggatcttgccctagccgtatccgtatgcctgctacagctccgggctccggccggccgcacgggtgtgctgtgctctgccttctcgccgcttcagaatagatagtggcctcgccagccctgtcgcttctcgccatgcgcacgtgctttgcgtgcgggtggaagtgggctcgtttggcttgctacttcttctagtgctgcgactattttttgttttgttttgtttatttattactgattgctctggctgatgttgggttgggagagagggatttctcgccgctgccgtcacgtacggagagttggttggtttggacgattattagtcatcacgacaagaccgcccttgactaccttttccctcagtgcctggcactgcacaactgctgcagtgctgctcctcgatgccgatgctaatccaatcttgcaatccatacatatttccttaaacggaaggtctatacatatttctcaaaatgaaaggatcccttgacaccttattaagggagtgtcttaataaggggtgtttaggctgtccgcaacatatctcctaagattggcgatttgcatggtagattacaacgtttggtcgtttgcagagtaaagtttgtcttagagcatctataaaagctcctcaaaagtctataaattaagttcttcatgaaaaacacaaaaaacttgtcttcgacggtttctctaaagtgctccaacttctttatagtcattaaaactctcatttgtagctacaaacgggggctttttgggcttcctagaaaacacaaacgtgccacgcccacacaacctcacaatccgctaccacccacgcaacctcgtcgtctacctccgtgagcgcatcctccccatctgcgcaacctcgtcgtccgttgctggcaacgcgcccacactatcctgcttctaccatctcacaacccgctattgaacctccgttgtcgatcagatctctgctatcgctcggtctcgccgttggtagtctctcaccggccacgtccgcccacgtacaaccaacaacctttgatggtggtatatgtttggtcgttggacagatgtcaaagtcgtggaagaagaaaatacacaagtgaaacatatcaatgtgggtccaagagtggcttggcctagttatgagaatggttggagaaatggttaaaatctaccctaataatttttgagatactcctaaaaactagtttttaatagttatttgttggagagcggttagagatgctcttagtatggcccttaaaatctgtttttaatagttatttgttggagagcggttagagatgctcttagtatggctctgaaagaatcatgatgcccaagagggggtgaattgggcttttttctaaaaattcaacaacaattaaaccctgagcaaatatttaaaccctaagctagagcccaacttcacctaactactagcaataagagaatactactagaaagataacaatcctaagacatcacttcaactacttgctaaacaattgaataaagtaaaatgcttgaattaaatgcggaaagtaaaacaaggttgagaagactcctccaatattttgtcgaggtatcgaagagtcggcactctttcctagtcatcgttggagcacccgcgcaagggtatcgctcccccttggtcaagaactaagtactcactatgaggtgatcctttgccactccggcgcggtggatccctcacgaccgcttacaatctttgagtcgggtcaccaacaaatcatccgaggtgatcaccgtgctccaaacgctaccaagccatctaggtgataccgatcaccaagagtaacaagcaatagactttcactttaccaagagaagcttaatgcatgtggtgtgtgctctaggtggctctcacttgcactaatgaggtcctgacgtggaattaagattttctagtcacctcactagtctttgttgtgcttgcaatgttgtagcaatatgtggtcatcaatgtgggcagcaagacactcaataaggtaggtggacggggtataaatagccccactcaccaaactagtcgttacctggctgttctgcgtatgggcgcaccggacagtccgtgtgccaccggtgcgccaacggtcgtctccaacggctagttctgacagctagcagttgggctgatggcacaacggacagtgaacagtacctgtccggtgcacaccggacagtccggtgtggcggctaaaattctttttctccactcgttgctctcggattttctcggggacagaatcactgcccccggggctgactggcaccactgtcagggggtgcaccggacagtctggtgcacatcggacagtctggtgcccctaagacagaaaccctaacttcgtttttccttttgtttttcaaaaccgtttttgttctaactcgtgagtgtgttatagagtgacacctaacactagatgtaagtgtgaatatgcaccaacactacactagaattctcttggtcaaactactcatccacaacctctctttatagtacggctaaaacaaaatagaagacctaattctataccgagtgtctacaactccttcaacactcggaatatgaagactttcatcttttgattcgtcgtttcagttgtcgcttcaagttctcatctcagggattgttttcaccattgtagtacaactttctgtaatgcgacctaacttaccatttgctctgcaaaacacacgctagtcacatataatattacgttgtcattaatcactaaaaccaaccaggggcctagatgctttcaggctccaaggcaacaccttatattatgagactagaataaaaaagtggttgcatctcatatacttggacgacgagagttattagaattccgatatccatgtctacctattattaaacattttaagttattattagattttttagataaaggaataaatattcggcttcatctttcaactaagaaaattagaccaattatcacaaaattttagatcaaaattctaatttattcaactcaaaacataattctatattgttcagcatccaaaagaagtaataaaaaatgttcggcagagaagaagacccccaacagcgggtattttagcacacaataaacttgaatccatctagaaatagcacaaaaatatcacattagaaggatcgataatcattttactactaaagcacatatcattcctagttttccaagtggcccaaagtacaaccagtacaaccccacatccaaacatcaccaaatcatcatgtttttactaattttctacctagtccccaaacaaggaatcagaattattcacaaggttacctaatacgctatttgttatgataatggagtccttaatgttccatcgggttcatgataacttctgttttggtggaacgtggtactacgactcttatggtgatcaaccgtgtcactaatccggttgatctcgttaagaaggctaatccatgtcagtgaatcgaaaacacaagaaagaacttgaaagtacacagctcaacaaaaatgctaacaatatatgtatgactaagatcacaaaagtggggttttataaccctataatgacaattattcaaagataatttttaaaagcaaaacttgagtcctaacatgagtagtggctactaattatatatcctaaggctatcacaccccttgaacgtgtcccctaatgggctctaagacaacacatgcctagccaaccaaaaaattgtgacacaacactaacatattttgaatgctgacttatttcgataatttcattaattccggtggaaattagaccttagatcaaaattattagttagcttatgaaaatatatttctattcatatattgatcataaaaaatggattatgtatgtcgtgtatgtctcgcacatctgttttactacaggatggtcctaaaggtccactcagactcaaactcgagttggactaatgcctttaattggtcttgggcgttctttttgatcttcacctccacaccttcaattacttcatgaccctctctaatgttatcaagcacgataacataattagataatctattcccaaaattatcgaaaggatcacttacctttgaaaatttaatcatcacatttgtgctcaagtcattggaccttatataacgatcggatgattagtaggcgcatctgaaggtgtgatgtccttatcatccttcctcaattgaaatggagtcattcttgactcaattcttcatctaaatatggctttaaatctgcaacgttaaagatggactaaccctagacatagattcttctttagaggtacttttaatcctattcccctactttagcaccactgctcagttctacccctctagtagtaatggatgaggcgtttttaatactagagaggtgcaaaactgatctatgacgctaagctaggagcatatatttaaaagtccctacctctacaagtgaatgatttcttgaaagactttgttagcaatgtgaatgtcatcgtcgcttttatgatagggaataaaagttatcacttcagataaatgatcaaccaccacaaaaatactatcccccctattagttctttgcaattccaaaacaaagttcatatatatatatccacccaagaaatagaagaaatgaaccaacatatacaaaccatatgggttcaaccgcgatttagctatttgacatgtcgtgtatcaagctacgaacctctctacatcttgcctcatccttggatagaagaagtatgtgaccaacactttatcttcttgacattaaaatgttccatcaatccacctccatgtgcctcttgcaacaacaaaagacgaacataaacaagtagaatgcattatcggttagctctaaacaaaaactcaccatgcatcacaaatttgttctatatacatctctttatatatattttttgtcacatccttaagttcattattattaacatattgtactttaatattttaagcctaattatagaacaatcaaattggaacaacatagtatattatctggacaaagcatcaacaataatattatctttttctttcttatgtttgatcacataagaaaatgattcaataaattcaacccacataggcatgtgtacgtttcagtttattttgacttagttattagagtaattaggaaattctgcatacagttcttcgccatacatagaataattaagaatgtctatttaatttctcactaaagtaagcaacgagcttaccttgcatcaatacaccactaatgcaaactccattagcatcacattgatgctcaaaagtcctacaaaattaggaagttgttgtaataatgtgttggtaagcatgttctttcaaagagcaaaggacacttcttgttcttttgctcagtgaaacatgatgtcctttttgtcaattcatttagcaaggctataatagtgctttaatccttcacaaagtaataataaaatcatataagtccatagaagcttcacacttttatcacggttgtgggcgttgaccgactctttatagcacacatgttatcttcatctactttacttccgtgtgaggtcacaacatagccaaaaaaagatacttattcgatataaaaatgtacttcacaaggttaccaaatagatgtgtagcatataaaacattaaaaacatagatgagtaaaatgttttgttaaagatttagtgtatatcaatatatcacaaaatagactaccacaaatttacaaataaaaaacataaaacctcatccattaatctcatagaagtgatttgtgcactagttaacccaaaagatattactaatcactcatatggaagcacttatagagtgtttggtttgaggaatcaaaccatctaaattaaggtggtccatcatgggttcattcctcagatttggtgggatgacttcattcctcatattagtactaactaactatgtaactatgagaaaagagatggtgatggattaactcattctattccacaaaccaaacaaaaatagtgaggagtgagaagatgatggactagctcattcctcaaaccaaacaccccattagttatgccatattttttggaccaaaataactaaaacaccctatttttgaacctaagtaactaaaacaacacaagaactaagactgttatatacatatttgtggtctaaaatatcttggacttggtgttgaatctctttagtctcatcaggattggcaaatcaagctcgctcgagaagttaatttggtgcttagtcccttgaatgagtggaagtcctagagttatctaagtgaagaacatttatttctacaaaaggttaatgatagaaggtggttaagtgctacctatatcataagtgaaaaatagcacatctttgtatatcagcgcatagcacacatcatgaatctctacaacttctttggagaagtaaaattgatgaatagcaagagcaacataattaaggcataagacaacacgctaacatagctcactttgaccttctatatatattcttctagatattgttcctcttctctactttgtctttctctatttttaggatattgttgtttataggaattttgacttccatttctttatgtttttcttgccttagaagcacaaaacaagtaaccatagaaaatttaagtttaaacaagtaaaatgcgtggcatgtggaatttttagaagaaacattcaaagttgaggagattattgtttagagcttggaaagatgttcttctaagctattttttataaaactaaatttgccggacccatcgaattatgttcacacttcacaaaattgccaccattagtggaaagatattgctaagtagactaggtggtttcggttaaaagccgtgttttgatggagtgacgcgagaaaccagaaaaatctcgctaaacagcctgcagcgcagatgattctcgtcgccgcggcttcgactcaaccacgggatttgtactgagaacagaaaatcccgtatcacaagtaaaatcatgattttctcgatcgctgctcatgtcaatcacgcatatgtgagctgcgaaaacaaatacaccctaagcctataggtgctaagtagtgaggtgatggtgccgccctgcaacatggtgtcgatgtatcccagaagagatgctagattttgttgtcaaatagcctttccgcgacctagagtgaagtggggttgatggccctccccgtcacctcgtacaacaatgactaaccattgttgtccattgggaagggatgcatcaacaccaagcttgcaaagatccagaagcaaagtgtatcatcggttctcgaacttgatacgatgtgttatttaggtccctgaactcaggaaactagaaaaatagaccctagtgcaaaatcattcagatctggatttgctcaaaccatatggcgatgtgacgtgctacatcaaatccttcccacacgcatcatgtgcctgctgatacacaagtccccaaatttggcatgttatgtcacttaagtctctgaacttgtgtccccaaactttcattagtgagctctaaagtagcatgccacgttggcatctagtttgagcaaaatcgattttagataaatttgcatgagtcgaccaacttttcgacctatttttctagttttctaggttctgatacccaagtgacacattgtgtcaaatttgaaaatcgctgatacattttactcaagatccaaccatagggacactcggtccggccaccatgtcataaaaccttgccacataccctccaaatttgtcaccagaggaggggaccaccgccacaaagttagcaagagcctttaaatattattcttatctctcatgtttggtatctatgtctataccactatataattgactagtttaaactttgcaaaaccaatccaaccaaatcacccccacacccgtaagtttcgctaaatccaccaaacagttgcacctagacttaacatatcatggtttagatcactatataaacccgtcttttttacccaaatccaatggacaatattatttgaatcatccatcataccctgcgaccctgccgcccccagcctctcccctcacattctcgtcacccctccccttcactcgtgccgccgcaatagtagtagtgggtctaaattccataactataaggtagcattcgaaaattataacttgacaagtccttagagtgacatatttttaaaccatttttatctaactcttattttaatttgaaattaatagtttaaaagtttatattttagtttggctaggccatttgttatggttgaagatacgtatattttctgtaatttaatctttttttaatataactaaagttaacgcctgctatattttttgctactaaccaacaattgttaattgttatgtatttgtgattcataattatatgaatttaatatatatgtgattatatgtctaatttaattgtgattgatatgtactttttgtctgatatattggtttgaaaacagtcatagacattctatttgcatggcgccccgccatcctctataacctccacattctatgacctacatgaaactaggcaaaaggcgtggtgcgtcacttatccattcaaacacaggaatttgttgcaatcacgggattgtagaagaaaactacaagatgtgatgatgctgatgctacataagtcatgctaaaatgtctcgtttattgaagtattgtatctcaaatatattattttttaatttctttatcttgtagtttatatttgagattttattattatatttagtcactgcacactctcattaaaagagtaacgacctttttggtgactaaagatgcttatgaagaagggagattgctattaaagatttatgtattacattgagcccttatacgatttatatagagtacatgacataagagacaaggcaacccatagatacatgtggcaattcgagacacaatatctagactatcaaatatactctaacactccacaatcatagagggagcatggtagacgtttagactatagaagtctatatggactaaaatcccccatagtcgtgacgttgtcggagtgcagatgcaacgacttggagaagaaaccgacgagaagctgatgtagacgatagttctctgtgtcgatgttgaggtagcctagtacaaggatgaacagttgtggtcgataatcttgcaaaggatagttgtggtcgatgaaagctatcgaggtcactaagaagtaggagccacacaagtcgtgtgcttgatgtgttgtggtgatggtggcgaatagaaggaagcaccatagacaaagatggtgatgcagtcaaggcagtcaatggagaaggtcgatggcgaagtcgacattgtcgaatcaacgtggctgaggcatgtgtgaggtttactagctaagcccaaaaacacaccggggatgaaggtacgcaccagtgttgctagcaaaagacatactaggtagaggaccccaaccatacgtcagtgtctaaagtgactagcagagaaggcctccgcgatagttgcaatgtgtagaagaacaacgaggaagcatgtgtcaatgcaccaatggttgtcggtgtggatgaagtagacgaggacagaggacgacactggcaacgagattgtgatggacgaagtcaaagaagtagatggttgacacatctagggacccagagtggcagtggtgagatctgcattgcgcaaggagtcatggtggtgctagagtgttgcaacagtggtgcttaaagaagatgacgaagagcatgaacggtccaggtataccatgtgagagaggcgcacaacgacgtagtcgacggtgatgtaggggcaatacaaggatgaaaataggcgacgatggcgcaaaacccgaccaattaggaagaaaaagggacccacaacaacaacaaattttgttacatcaccaagtacccacaaatagtccattctcctaactcaactcaccctccttatcctcgatcagaagactgaaagagggagaaagagataaaccacgatcacaaaggctcgacttggctaacagggagaggcacatagcctagcacaaccaacatcctctttttctttggcaggggtcttaatggctttgttgcttttctcctcaaataaatctccaaagatcgcatccattggattcactatgcaggggaggctaggcaatgcctctttgagcttgtcgcctgatgtatcctcctaggcgggctttttctcgacctacttcgacatagaatcaaagttaacaaggtcgaccccgaaaggacttaaaaataccatgatgtttgttttgtcattacctcaattttctgagcgttcagaacaagactcttcaacaacagctcgtacatgttcttcagtggtaggggtctttgcaatgccagcaggcttctctgaggcaaccttagaggcctcgacctagaccttctacttctcaccttcatggtgtttcctttcaaagcgcttgggtgctagcaacttttcctttgccacaatctcactacccttgtattttgcctttggcttcaaggactttgtcggagggccccctctagcctccttttcactaatcactcaacccctatctataattcttactttgcatttcctctgcaatctagcatcatgatcgacaatgaggttggggtagtctagatattctaagtcatatgctttgatcacacgattatgtattctctttattgccactcactatcgcactaagtagatgatctctttcacaatatagttgcataaaactttgttagcaactgtctccaccataatgagccactcattgctcggctttatgaagatgctgaagggattgaatttataaggtaactgaatcatctctcgagcttcaatctccttcgtgttgtcctcatcttttggcttaggtatctcctagccaactttcataggaaatacatggtaggcaatatgctcttgaattcgtctcttagcaccctaggggtcaagggtgacaaagcccatgggctcacacggcctctccagaatcgtcaccacgacaacacgtggatgtcgtctgccccacaaccatcaccatgattgcatgcacaaaggacaaaggcatgatccaaccggtaggagagcccaacaaccaccatgacatgtagagaaaccagcgagcctctgatttgttgaagcttgacaatacaataacgacgatgaacgcgacaaatcagaaggattagtcatgcatcctaactacgagagcgcaactcttgatggagatcaatttcctcgaggcagcgcgacgacgacagcagaaggggaagcctaagtcatagcctaaactcgttataccatgttaggggggtttgccatcaaggattgatgtattgcattaagcccttaggcagtttatatagagcacatgagtaagagacaaggcaaatcatggatatatatgacagtagacgagacacaatatctagactaccaaatatacttttaacaacttctaacaactaaatataaaatatctaaaatatttgttgagaagttaacatatgagagagaacctataactgtgcaactaatataagaaaaataacataaacatataacaatgggaaaattatgacacgctaataagtcacaaacaaaaataacaactaattatgaaattgacatgtagttgagtatttatacaatgatatatataatatcgaaagtgctttcgataatattatgttagttgatcaaccgtgctcataacttggttggagataaatcataaattcacattctttgtcacaatttattacaagtttctattgtccaaaatattatggtttaaacaattcaatttctatagtgcatgggcatgatgcctaaaagcttactagactctcttctcttatcattttttcctagagcatatcttttgttgccctaaaaggtaaaaacctatcacttgggggtcgctctcaagttttgaatgtatactccacttatttcatttgttcgatgtcctctcagctttcattctcaactgagcatatttagccttcaaggaagggaaagaaaaagaggagacaagaaaaacttggctatcaacttcacttatatatcaatggaagaaaaccaacttctattgggcagggccatgtgcatcaactagactctagcacccccaacacaaaacctgtcatgaaaaaaaggcgtgcccatactgtgtctagtagattcagaacatttgaagatggaaacttcttgttgggagtgtgtggaagaaaacttagaaagctaaatccaactcgggaaacatggggaaattaattacaaatatttagaaagagtgcaaaaagcccaaccaaacatttagctaacgactgcgccttcttagaacccaccctacacgccctgaaacttcttggcttttccacatggagcatatagagctagtcactttgacttctctagtacctaatcataacttcagaacctagacagcctagatggttgtctcggtatgtagtggtccaaactctacagtcagatacaaggaacatcacattacattaataaatatgatagggcatatatggtagagaaaagtctattattcaaacagttaacttggacatctggaatctagatgacatcatatcgagaactctcaaaggtatacattatctttcattcattcttcaactgaatagatttgaagcccatgaatgcatattttttctaatctgtatcacccatcggaagtccatgtttttcctttaaaatccttgtccatagaaagtctatttttattgcctttttggtttgatcctagaccttcatataaatatccgaaccttttttcccagtgatctacttctaaatacacaccctttatttttgaaattatgataacaaacccacataccagatttatccgcattatgattcaagggaagaaaaggtaaaagaatataaataaggagttcgtaaacaaaaaatgtcctaggtatttacatttacttgtgtaattgcttgatacaagcatttcattggttatccacttgcgtatatgactagtagctcctctttgatacaacatgtcattttaggacaaaatttggtcaaaccttgaaaactacgaagatcaataacttttaaatctttaggtttggatacatgatatatttgcatatttgtataataaaatagttataaaatcttgaaaatatattctagatgatattggtggtccaagatatgcatcaaagaccatgtaaagttagatgtgacagataggttgtatcatggctcagttctgatgtttttatatgatcaagaatatagcaacgaaaactcttaaaacatctagagaaacagtggtccgaaacctttatgagaactaagtagagtagaatagtagtatggaatgtgatggaccagggcatgaactcaatatcatgaggaaaaaggacatcatactaataaactgtatttgactgtaagattcaggatgtaattcataataatatactcacctccaataaaactgcctgcatttttgttccacgtgaggtgaatatatagatgttgattgtccaagagtacattatgcaaggagctaatatcatattcattttttttctcctttttcagcatagaggatacatataaccgctatcagcaatttt

SEQ ID NO: 1008 - DNA, 1912 bp, Zea mays
  Intron number 6 from transcript GRMZM2G175504_T01 (locus G RMZM2G175504) derived from phytozome v7.0 (chr-ID 2; pos 1 8116873 to 18118784)
gcaaaacatgtaagtcttgagagtctcgaagccattctacttggttaaaagtagttaaaatgggccgatgttttctacatattgaaatatggatctgctatccttacatttattttcccttttctacttttttatctgtgcccataaatcatgaccacttgaaatggaccacctcttcaaaaatatacagccatttgaaagttgtatttccaacaacatttatacactagtctgaagttttggtgtggtgagcatactggtctaccggtgtaaataacttgacctgcgggaggtaagacaacccccggacattttattaagaagaccttctcacgcaggtcgagaaaacccccgaacccttgccccacccagacacaacgacactgtaaaaaaactcaatctgcatggggtaagacaaccctgagcattatattaagaagaagaccttctcatgtaggtcaagaaaacccccgaacccctggcccacgcatacacaacggcactgtagactagaaacgactgcgaccggtccttagacctatgctttggcatgggacaaacgaggagatatttttaaccacaacctgaaattcgctcacacggggagttgaacccaggacatgaggagtgctactcagaccacctaaccaactcggctagaggccctttcgcaggcctagcggtctagttactgatgttaaggttatcctaatccttcgtgggctattcattaattaactcaggtcatggataagtgtcacttcagacatttatatgctctccaaagcctaactttgacagccagtttctggtgtaatattagttgaatatccatgctctgcctctctgccacaagagatatcattgtacggttgtaccacaccaccgtaagtccgtaatatgcagtcaatgagcttagcttatgacatagcttcattcttgtctcattgggtctgtttggttcaacttttttctgaccagtttttctgagaatctgattgcggggagaatttggttgtgggagaatatgagtatcgtggggattacgtgcggagaaagatgaaagtgtccatagagttcagatctagaaaatgatgaattcctactattgcaacgactcggccgattctgtgtctatgttgattttgaatagtttttaccaaatcaattcttatagaagcgggctgaaaagctagggtttggtagtacatagcagcttttggtggccagaagctgaaaaaaactgaaacaaacagggccattgtgcctccagctgtgaccgcctacgccatacccctcagtgcccctattagtacatccaagctctgcccctctgctgcagtataagttgtgcctctgttctagtgcagcatcatgatatgtcacacacaaggatagtgggtgggctatgatacaaccttgtatggcggtgaataattggttgagtacccaaggaatgcaatgtgacagagggaggagtggtttgggataagctgaaaatttaccgaataatactccctttgatttaagtacatgttgtttaggaaattgacactgtctacaaggtgaaacttttacaagtagtttctgtgaaaaatatgtacatttcaaagaaaagtaactattttgaaaatgatttttatgttgaatctagtaacatgtatctatggttttttataatgatgtttaaaaagtttgttcaccaggaatactaaattgacatatatcttggaccagagatagtagtttgtttgtttgattttctcatttttcattgtttgtttatttatgtggaacatggggaagggtaatacaattttacttgtgattttctttctgaaaccataattcacttaaatactcctcagtttgttatttttttctccattttgtgtttgtttctaccagatca

SEQ ID NO: 1009 - DNA, 7182 bp, Zea mays
  Intron number 1 from transcript GRMZM2G094028_T01 (locus G RMZM2G094028) derived from phytozome v7.0 (chr-ID 3; pos 2 0060287 to 20067468 reverse strand)
ccagacggcatacattacccagtgagctgcggtgagtacaagttaatccaaattactatgccacgctccatatataggttagttcatcgatacctttcttcggcagactgtaggaagaatcaagtcaagtgacggctcttaagcagccataaaaaatattttttagtgaagcatttcccatgtctgtcagaggagcaactccaagcctaaagttgggtcctagaagtcgaattaagacacgattcaagttatttaggacctaacaaatttgttttactccaacagtgagccttataatcactttattatttagttaatcctagtttattcggtggatttgacggcagcattttggcgccttgacgctaaaacgatttgggcagagccatgggcatccattcggccacaccccacacccatcacgcagcaacgccggcgtgtgaccctgcatgtttagccggggtttggggcggggggttttggctagcggcaagagaccatggcgaatcaacccagctttacgtgatcctacacatccatcaacagagcaacaccagtagaggcagacagtaataaagataaacctggatcacgagaaacccaaagacaaatgttggtcatgcactcatgcataggatctgtaggctgcagcaaccagaaaccaacataagacctggggtccaagatgtctcagagccttggcagatcaatctcttggcaaaatgtttgttacgcagtttgcagttgtcataactaaagaaaataaataataataataataatatcaatggcgcactgtatgtaagcaaccatgattggaacacaatagtaaatagagaagattgtatgtacccaaaacaaatgctaatatataattcttaaaatagataacaactgcggctgactactcccggaacaacgagtcaaaatcttttgtttcatcaacttaaagtactattttaattcgttgcccattgtgctcgtgtttgtttacattatctctctgtcctgccaatttttttcactctaattcaaggttactcttctccaactcataaaacttgtcatcatgggcctcttccagcctctctctatttattgatgtgcttctttcatctttttaacttcttcaaagaaaggatcatcattagtgttacaaccctcaggctttctcacccgtcctttttccttctcagcttttctccttggaggtctatcaacgttgacaggaccatcaccattaccattgtttagttcatgctggtctttgagctttgtttctttgaatgcccggtctggctcatgcctaagaataaaacacagatgaaacacacaaaaaaaaagccttcccttgatgttttttcctagaattttaattgttttcacttcagcaagctacaaaatgacatgggattaactcatatgagaaagtgtatgtcatgtgaagaagtataaacaatagtatcaagtgtacaattcactttatcatcactagtcttgccaatttgatttttctatgacgttatagtaaccttgaaaaatattcaattccttctgaattacaccctactgatgcttcaatgatgaccagttacgatctgactcgaatctcctgttcttgtggaagtatttccgtactctttcccgaagtgtgtcgtcttttttatcccttccagtgtaatattatatttacttagattaagatagcctgaaaccaacattatgttctcctctttactaaattatggatcaacccctcttagtcgtctgtaggtttatttcatccaccggtagtgaccctgccacttcattatcaacttccacataatcatcagagccaaaaatatttgcatctttctggttgagtagagaagtgtagtaacaccctgagagtccatagtgctacaaaatagcaatacataattgcataccataatctgcaggtttcatccacatggagtaaattgcaaatattgttcacaagaaccagcaacaactaccaagcaatacataacagcgccactagaaacactatagcaattgcaaggatttctaataggagcaccagctaaacaatatatgaagcaaatcaattaaccaaagttcataatcaaacatcatccaagagggatcactgtcagtgtttggtaccggcgacgcactacgggtatacagaagcgggcccagacatttgagattgggtattcaaaaattcaaaagattaaagaatttagtgttctaacgctattttatgtaatacattattgacaaattagtgttctaacactatatatcaccaaaaacatgggtattcaatgaatacccatgaagcccccctaggcccgcccatgcaggtataccatgtagtgcttttgggaggacagtgaagtcgattgctgctcaatggttcgtgcagggcacatcggaacgcagggaattatacaggtttaggccgctcaagcgtgtaataccctgtgtcttgtgtgtttgtggaattgtattactcagtgttcctggttacatagagggctagagctagaagatgatgatgcctactgatgtgtctccccggttttcgtaggggtaggcattctgccttattccaacgggagagccaagtcacacatgcactacgcccacgtccgttgctcggtccaaaattgactccaaccaatcaggaagtcagcgagtcctcaggagcatatcgtgccctctgcatgcgtagggtccggtccgcgtgccttgacgcccacgcaaccgtcatcccgctagcttatggtcacgcgcggtcgacgacttgtaaagccttgtcgttcggcccactaaggcctctccagcggcctacggatcgtagtcaggtcgtgactacccgagggatattcatccctcacaaatcatcattgccaaacattgactacaatggaagttcaacttgtggatgtttagacgtcatccaagagggattgtcgtaccgacatacagtcgagatgcaggttgtgggcgtgcaatgacgtaggctaacatgggacctctagaatcttgccaaattgcatctatggtggcgtttaattaggcctatgatggccccttcgtggctattatggcatcctttgatccatccacaggggtcgttggtttttggagatgggtgtgtcagctgtgtgatgagcgggaccactgggtgggggtggctacagagaagatgggtgtgctggcaggtgaggagcctatcgactggctgaggaccggccgtagagaagatggatgcattgatgggtgaggagcgggggtcattacaacgggtcaggagcatgctgggggagtgatatggctagtgagagcacacttgcagtgtaagatctaggacactggctagaggacggtgaatagacggttttgactaaaatcacaaacactagagaaattaaatcagtacaacgagagatataaattatctagcctatgttgagctatgttaggtttgcaacctagcgtgaacaagtaacctagatgactagtaatgaaaaatgatccaactaaccacaagtaattgcaagagaaggagagagacatcaaattttttcctatggtctcggtgatttgccgatcactcctaatccacgttgaggtagattgcaagttctcaattgctcctctatcaagacactgtttgatctttgaatcaagtggacaaggaaacactcaatacctcggttccactagcatcgcctttgccactccggtgaggtagtcgcgaacccctcacaatctcattcgtggattcttcacaatcttcacgaagagctcgacagagtcaccaccaagtcgtctaggaggcgacaacctccaagagtaacaaaccaatgataatcgtctgatggtccacttagtgcctcaagatcaatcgatgatgcaacacactagattcactcaatcactcactagaatgcaatctcaagcaatgtaggtgagggagagagtttgtgatgctccaatgtgctcaaagtatgctaggaatggccaagagagccctcacacatgaacactacttctatttatacctatccattcaatactagctgttatggacaaactagcccctttctgtgcactcgtggatggtccgcgtcctagagccggatggtccgccgtacaagtaactgctagttttcctgtttgaaacgtgacagagctgtcagaaaaaggcaggcgcggacggtccgccgaccccggccggacggtccacgacctagcaacattaaccacctgagctctgcccacttggcttaaacacaggcaaatggtccaccaaaccaagctggatagtccgcgacctgggagttagtactgtccgaactcaaacctcagatagtatgtagtacaactctccgaaaacacacagttcgtgcccaaatcacatttggcacctacggacggtccgtcaaccctagtcggacggtccgaccattaggcctgaacggtccacggtgcaaatactttggaccactctgaagactgttgtacttcggacctctcttagttgatcgcagacggttcggccacctggctcggacggtccacaacaccgacacttagcccactttccagaacacgcttttgaaaagattttaacttgcaaactcgaaagcactattattcctcgtgcacatgcactatctatatgctctacgaggcactaagtttcacacaagaaattgtcattggcccctcttgatagtacgactatctagcctactaactctgtcaattttcttctctaaacaccttgtgactggcaaaagtaaaaacatacataatatatttgccttcattcattccacaaccaatatcaaagtcttcaaaacttttaataaagctcatcttccatgatccaacctgcattcttatttctccaaaaattcattaatccacattggttgtcatcaattatcaaaacatcacttagggatctagatacttcacatgcgggtgagaagaatctagtgcattagaatttctaaactaatcctcttgagtgtctctagttactccttgcagccttaatgagatccttatgttgtcttcattgaaacttacgacctctccccattgcatatatactaggacaatgcacgttctttgtgatggcacagccacacccagtacaaaagatatattgatgttgttatgtatctagacatgctgatatattgtatatataactacatagcaaaacttatgtatgaagaaaagccaaaacttcttatactttggaatggagggggtacattagaagttcaaatgggcatttcccaataggagcaagacaagattagttatttttcctacaaaacttatcatccacagtaattcagtgcaacaacaatcataatgcctccaacaaaattgaatctagaaaggacatataatagcaatgcattaatgcaacagtaatcacattacaagaactaatgactgtagaatggacacacaaattaatcagtacaagatgcatctatttgaaggcttcggattcctcaatattagtttggaaggctgcaattcagacaagagagcatcactgcctcacagactgcttgcaactatcaacataaccaatagggtccacgattgaacaacataaaaaaaacagaatgcacgaggaaaaagaacacaaggaaaatccacagttctacacacctactgttgatgcaccattggtattgcacgaatcaacttgtgttgatgctactacatcacccaaagttgtagtctgcttgttcttcatccgctctggatcgtcctgtacctcctgctatcgcatcctgatctacacctcaatcacactctgctcctatccaaaactcccaactcgaaccaattggcgaaaacaatccaaggcaaccaacttaaaaccaacccctagatcgaaacaaaaggagcaagatttttgcaactgaaattcaacctctcataggactcaaagtaggacagactcactagattgtcatccttctcgtcattcttgtttcgcttccccttggtcgcgggtgcaggcagcggtagttgtaatgatcctatattacaaaatagacgaaagtaatataattactggccactcaccgtcaacatcgattttcaaaacaggaagtaatatatggtgtccacaaaaaatacatgattaataataatccttacgtccatgaataaattaaattttataattaccatgtgtaaaattcttaaattttaactaatttgaataaaaagtactaacatctgtgaaaaaaatgtagtatgaaaatatactttttatttgtggccttgatttatgggaacgtactggctggagcttcagatattagaagactggccttgatttaggaagctggctttccttcccctattttgtttatgtttgcttgctctgtgtttttctgtctgtttctttttgtctttgttaatgtttagctgcctctttttggctgcttgtacttgatctactttagatctttttcttttccttttagtataatgatctactttagaaaaaaaaaatacactttttgttgtatctaactatattaactttttgtcataaatattagtcttctttatatcaagctagcataaattcatgcaatatgcctgtctaaaaaagtaggactacctctccttcggttcaccatctgatcatctaggaacctatagtctcttacctttcatatttcatctggaataaggacacttcaaaatactacgcattccctcatttagaaacaattgatgcaatagtacaactattttcttttcttgattagtattatgtgattttccaggtagtaagaggactggcagaagaacgataatgtcaataggtaactatttttgtttaaccatctttctaaatttaacctcattcaaaattcaatttctacaatgcaagatcatagaagcaccgcactaaagctactgttgaaaatttagtacaaacaacatttatgcctttggatacaagcccgatgaattcggagcaaaatttgagaaccttatcttgctagttctaattttgaggccttgcattttaaaaatgtactattgttattgaattttaacagtccataatataacttcgtccattgaaaagaaaattaacttgtactttaatttactcagtgttga

SEQ ID NO: 1010 - DNA, 6095 bp, Zea mays
  Intron number 1 from transcript GRMZM2G029981_T02 (locus G RMZM2G029981) derived from phytozome v7.0 (chr-ID 1; pos 1 54158903 to 154164997)
gcaacattgctcccaccactatatctggtaagaagtaccttattcgatgcgtaatagactaggcttcgtttagaacctatcaactttgggaatcagatattggggcgcatttgcgtgctcgacgaccatggccttcgccacgtgggctctgcacgtcgccacaactggtcggcgggaggacgtgcaacatccaaggaatgaccctgattggagtataccgttttgcgggtcattaaatatgatgcatcgaaatccgatcggacgtctatagttggatcttgatgtaaagctacggggtgagttatggatcgttagatgatgatccggtggtctagacttcataccggttcggccatcttatccaatccctcatatcaagatctaacgggcagtaacactcgcacgttataatagcgaggctgttttcataaagtgcccctggcctttttacttaataaagtcgctgtccaaatcagttgaatagtatttaaaacaaggccttgaaatttacacaaagcacgctggacattccaaaaaaattgaagccaccatctaggtttttgggaaataaaaaaacagaacatgacttttgtataagaataaatctagaaacttagaaaatctatatctttcgtgtttgaactccatttttagtagttctcgaaatcgcggattcgtctcgatgcatataatactcttacgtatttggttttcatgtttggtgtgcttcaaattttaaatcattatttgtctgtatgcttgtactgctacgtttagacaggcgagtgtatgtggtctgtagatctagacttttgaagagatctaatcaacaagttatcgcaagtaaaaggcaagttgggtccttgatcacatttttgacctaataatatttacttttatattcacaccctgatttcattgttagacgggacttaataggttacctagttttctttatcttacaccttgcatgcaaatgagttattgggtagtcttgctattgttctacttggttttgggattaatgttacatacaaattatgatctggtcttattattaatgttggctttattattatacatgataagatcattttattaattggaacatggagcgaccacccgagacaacaatgctatcacaatggtggaatgggatgatgttggctgattaattaggaaagctagcatgtgagaattctttctcaaaaggggcaagcgtggaggagttaccacaagtacagggaggttctcgggtcaagctgtctatgatagctttctggacaagggattctataccccctctgcttgaaaccatagcaacttttctgatgctagtgaaactttataaaggcctcgtagtgtgtcctcgccaactcaccttggaaatgtttaagggtctgcacaacccaatgcgaaaagggaacacgacttgttcgtaaagatgtgcaacctctgcagagtgtaaaactggtatatcagccgtgctcacggtcatgagcggttcggaccctcacatgagtaatgtatgaaattaaatttaacatgtcatgcattgtattgtgggaatttcattatgatatattattttgattgggatggtatttacttatactaagtaattgctaataaaattttgaacaacaaagttaaaagctatgctcggccttagccgttttccttggtaagccatatacactactggacacagttgcgttgctgagtgcttcaagcactcagcaaagtctttgccgagtgtgactctcggtgaactgtacatcgacaacaacttctttgtagagtactttttgtcgggcactcgacaaagtctttgtcgagtgccatctagtgcttggcaaagaaaagtcaccatcatggtgacaagtgacggtgactaagactttgccaagtgtactcacttacactcggcaaagagggaacctttaccgaatgccagccggcctggcactcaacaaagcaggctctagtaggcccccatggcaccatatgtgccaagagccgcaagttggcactcagcaaagggagcttttttgcagagtgcctgcctgcctggcactcggcaaagggagcaccagtggtcccctttgccagtccctttgccgagaggcactcgacaaagggtgcttctttgccgagtgctaggaccacaatactcgacaacgaagctttaccggttcctaggtgtgccttctttgtctaacacttttgccactgtactaggcgaaggagctctttgtcgtgtgtaacactcggcaaagtgactagaaaattgttttttatttggttttattattccatccaaacaaacaaaacatatatcacataatcatcacatatacatcacaaagtgcacagaatcattacatacataatagataccacatatctcacaaaaaccacgagtctcacaagtttttcacaaacataagttctatcacaaacataagtatcacaaagaccacaactcacacaagttcagaccaagtttcacaaacaagtttgacaaccataagatcatctgcgaggttgcagctagactgtgtcagcgaagggctgagcgaagcgtgagggttgttcgatgccaccgattgtccctgcacagagaagagattgcatgtgtgagaccagatgaatatatatcatgcaggactaaaattttgaaacccacaggagtatggaaccgagtagggtcaactagagggaacaacaaatgtggtggagcaagaccctatgcggcgccaaggctctacatgtattggaacatctccaccatcctctgctgatccaccaagcgagtcgcccttatcctcgcctccatttctatacgcggcctgctgatgaccctttgccgagggttacatttcaccgagagatggacactcgacaaaggctactatgctgagcgtctgattatgcagagtgttcacgctcgacaaaggaggtctgtgccgagtgtgtttgttcactgagagtggcgctcggcaaaacatgttttgccgagtgcccgataaattgttgtcgacaaagcatcgggcactcgacaaagagcttgttttcggtagtgacactacacttcttgagccccaataataagtgagttcatacacacttttccccatacttgttgtgacacctggatttaagggataaagctgggtgcgtctcatatgtgcgccaaagaagaacatcacatataatgacaaagtgtatagagataaatgtcacaagtatcattattacatagcggaagtcttacaaaaataaatgataacaataaagcaaactaaatattcttccttggcgccaacaagctgactgggagacgccacctagatgagctcgtactcttcattgtaaggctcctcctggaccacctattcttctcctgtgtgtgggggggttatatatcgcaagggtgagctcacaaaagatcattgctcaaaaagttgtggcaaataatgtgcatgaactcaccaaaggtgggagctcatgtgaagtgtaaggctgatcaataaataaggggtaaagctgagcattgcttttataagttggtcaagttttattagaagttactaaatgtaagtagataccaaaccagagtaataatagatcgaaattgataataaatcccaatgtgatgcaaatgacaaattgaatttagttccataaattaatcatgcaagagtcttgagctgctcatgaccacgagcacgactagtataccaattttacactctgtagaggttgtaccatgtacccacaagtcgtgtatcccatctagcctttgtttgcaaggcccttagacactgccgaggtgaatggctagggatccactacgaggcctttacaaagttccactagcttcagaaaacccgctacagttcttggaagagcaatgcaggaattccccgtctgatcgccatcatagcaaaatcaacctgagaacctccctacatgcctactcccctactacccttgcccctttcgggtaaggtagtcctacactagctttccttgttagtcagccaagggtgtcccattccacccttgtggtggcacatgtttctcaagttaagctcgatgttccaattaacatagtggtcttatcatgaaaagaaatagaacaataataaagaatgaccatgtgtaatagttttctcaacacccaaaaccatatatagcaataacaaagactaaccaaaagttcaggggtaaacaaggtgtaaagataaccaggctagggtgacctattgggtcccatcaaaattaagcctatgcatgataaatgattatagagaacattattgggtaaataaaagtgggcaagggcacaacttgccttcaatgagctcctgctcagcaacttctacctgctgaacacctgaatcctcggccactggctcgtctactcgccacaatacaaacaaacatggtaccagggagaaattaacatcacaccaaccatgaatatagaatatataataattatctacacttcataacgaggtcgtaggaacaagaatcactaaattcggaattacagattttaggttatgattttccgaaggtttcatgtgttcggtatagaaataattaagtgatcaattttaatacatgtttcatgctaaaacagagacactaggtgataaacaatattaataccaaattaatgcaactagaatgggttcaaaaggagttaacatgtattttctaggaattaaacaagttcttggaattaattttgcactaatgattattttccaactgaatttccatagtgtattcccttattagaccgcgcacattattatcaaaacgttcaggggcttctacgtaaaccgttctaagaccagagcactctacgctggactgcgggttcatatgccagaaatggaggcgctcttgtgctaatgtcactacaagaaatttgtccttttatgacaaaatacctaatgacaaggtcagttattgtcatataatgtcacataatatgatggaattttttgagtcgtcataatttcatgaggccatgaagattttatggcgatagtgtttttttgtcacataagggtacgaagattcgtcatatattgtcaggcgccagaagctggtagacggttttacttttatgacgcttagatgtgcctttatttgatgatttggcagcgtcactttatgttttttccaaaaaaggaccgtacccctttctattgaccgcattcactttcccatctcccacccaagatgaccaaaattttcctcctaccttatcctctcggctgctcacctccgcgtccgcccccaccaccacgcgcccgcccccaaaacccccacaaaccctagccaccgccagcaaggaatggccgccctcctgcggcttgctgcagcccgatccgccctcccccggcgcaccctcgccccacaccagaggctcgcggcggtcgcggccgtcgcgatggaggagtggtggtccgactaggagcaggacggcgaggaggaggcgcgtgcctcggcaccggctgtcggccttgaccccgccggcgggggcccctggggcgtgcagtgggtcgtcatgggccgccctggcccgcagaagcatgcccacgccgcgcgcctcgccgatgtgctcgccgtgccctacatctccatgggcgtgctccttaggcaggagctcaaccccgccttgcaactctataggaaggtgggtggctcctgttcccctgtccggtgctctgggggaggctcacgttccactcccctctctttgtctgtgctccagctgctctgattctgtgatcttgggaggtcttaatcatcctagctacgatctagccgtttaacttatttaagtccctagccgctaaactactcagagatcagcaagttctctaggaaggatgcagtggcatacccaaggtgcagtttatcttggaatgatcttagattaaataaatgtttaagttcctgattcctgtggtatctatgtacattttagctctttattacaatggtcttggtaggatctgtatgtgaatgcagatacgaggagaagctggagaacttctgcaagctca

SEQ ID NO: 1011 - DNA, 12040 bp, Zea mays
  Intron number 2 from transcript GRMZM2G095657_T02 (locus G RMZM2G095657) derived from phytozome v7.0 (chr-ID 8; pos 3 103471 to 3115510)
gacgccgagaaggtatcctagagtgtagttaagcgtagaattagcaaacgcctgtgtctatcagcacttcttcctttgcgatataagattaagattattcgaggtatttgctctggttcagtgaaactgggtgtttggatgattcggtttaattgtgtgtgttttagctaccctagctgttgaatgggactaggaaggttgtcagctcaattctggttgccacgaccctgtttcctatcaattagcatattttgtcgttgattctttaagattgtaccaattttgaatcgtcctttaagagaatataagagggtactaaatttcaaacgtacagggcataggctgctcaatttttaagagggtactaaatttcaatcatacagagcatagactgctcaatcttattaaaagttagaactagaataatgtttatgtttgtgatagctttataagtcaatctagttctgatttggtcccttgtttcatttactatgacttgcaatggtattttgattatgtcataatacacattctctttagtaatttctttagtatcagttttctgttctttccaacaaaattgtgcatctattgctaacttctatcatgattagagcatctccaggagttttgttaaacaacttcctatttttagtttttagtaaaaaggggaaaaggtgctctccaacagttttgtagatgagctccttaaaaattaaaaagttgtcaaatatcctctccaacttgtaagtttgtgcagtcaagaggaactatgtatcggctccccatccagcgtttttctcaggagaccggaataaattggatgcatgagtaaattttgaaaataaaggcttccagatgaggaagcggtaagagtcaaagaaactattaaaaatgattggttggttagaaatagtttgaggtttcccaatgcaaaattgtttagtaggctattatagcagactagagaacaataaactttaaggttgcttttttttgttaacttgctagatctgtaagtttagcaagtaaagtattaactatatcaaactcttggagatgctctcacaacttgaaagttggaacaaacatttttgtcaattgtaaccacatctgtcagtttcttgtgaactagtcccactgctgtgaaatataggttacataggatccatgtggccaagccttcaagatctgatattttcttcaagatctgatattttccagattttagtcatatgactcatatcatatgccagtacaatagctaaatcggggcaatttcctgtataccatcagaaaatatactcattccttgtgtgccactgactccacatgttatacacacaaaaaattccctatatgccattcagtgacacacaaggaatgagtataaaatccaatggtatatagggaatttttcctaaatcatattatcctgtaatagtggaatgaccattgccattgatctagtcttgcagaaaatgcttcatacgttttgcagatgccaagttttgtcagtcagatatgatttagtgttatttgcattctggctgtgataagtagcacatgcattttttggaaactgcagcttgaaccaaaagtaatttaactaagaatttatattcatatctgtattccaaattcctgtggattttaatagtattaatgagttccccagccatggttattaaaacggtaaaacgttaaaacgttatgaaccaacttttcaaagtttaaacgtttaaacgaacgttgaaacgtcttttcagacttgacatagaatttcaaatatagattaagttcatacataagttgagttcacaaaccaaatagcattagcataaaaagaaacagatcaagttcaacaacacaagttcaaacacacaacacaagttacaactttcatgcatgattagtaaccatcatcgaactcatcaatattaagaccatgagcatccacgccttgatcatcaccatcgtttccactattgtttccttcaatttcatcttccacatcaagatcatcaagaatatattcctcatcatcgtcatcttcatttgctaaattagtctcctcttcctcaaggtcttcattccttctcacacacccaccagcggctcgcctaggaaaattacgacctctgagatgtgcagatgcaccaatagcttcatcaacttggtcccacgataaattgaaatcatctccaagagcattgctaacatgagaagaattagctaatggatcaacccattcattgtcccaatcaaagtcttctaaaatcaaaggatcaaagttttttccttcctcacgtattttttgaaacctatcagccatctttctgttgtatgaaacatataccaagtcattcaaccttttgtgctccaacctattcctctttttggtatgcatctacaagtgcaaataaatgatttaaccaatgaagaactaaggataaaagtagtggcgaatcgaaattgaataatttgactagctcacttacaaattcaaatgtactccaattccgctcacaaccggatgatgaagcacaaagactaacaatccgtcttgcaaacttatataattcaatagtacgaccaccatatgcaagccaccaatcaactaaaattgcaagaacaaagattatatgttacatgctgaaaatggatggaaggctatcaagtatcaattttagaatacttacgtggattccttgtttgtgcattttttatagccattggatttgcaaatgcctctctttggttctcataaagaacagcttgagcatcaatcttctctctaagatcctcatctaccaccattttgacaagcacgtcattaaagcaaccccttagctctccaacatagccttcatcaacacctgctttgatattgtagaattttccagggttcaaatatagtgctgctccatataatggggtatccatttggttcgcccaacgtcgatccacaatgctcataatacgtttcatgttaaggcccataaggcccataaggcctatatgcctatatatatgctacagtacccgtgggggtgattatctcggctaatcaaggttagtaacatggtatcagaggaggttagggttagggtttacgtctaaacccgaccctgatccaaaattttggcgccgtcgcgccgtcgttgtgctgccatcgcggccagctctccggcctgccgtcgcggccatcccttcccttctctgccgccgtcgcgcggttttcccgccgccagggaatctcgctggcctgcgcctgcgccgtccgccggatctcggccgccgcctccttcaacgatccgccgtccgccaggggcggatctccctcggccgccatcgtcctccgccggatcttggtctgcgcctgcgggatctctgccgcgccgtccgccgcctccttcaacgatccgccgtccgctaggggcggatctccctccttcaacggccgccgccaggggcagagatccgcgccaggagctgcgcgccctcagccgcctggggcaggccgccgtctgccgtccgcccgttctctgccaggggcagagatccgcgcgctctcagccgcctggggcagggcgtcgttctctgccaggggcagggcgccgttctcccgtcgttctctgccaggggcagggcgccgttctctgccaggggcagagacctcgccgtcctctgcagaaaatctgcaccgtccgccgctgttgcggacagggccgcggatctgcaacatcgctgctcccgccagccgctgctcaactcggcttccgcgcccaggacctccgtcaactcgtccaagtcggtctgccctggtttgtttggtctcaggtctcctgttctccctgattttttttccttcaattcaatatggcgacaaatgctattgtggtcaatatcactcttgatggtcaaaattatccggagtgggctttctgtgttgagactgctctccgaggacatggattactcttccatttgactgatgcggcacccgttcttgctgatgatcgtcgcaatgctgctgatatcaaaacttggcagcttaatgatggtaaagtaatggctgctatggtgaacagcgtcaaaccgtcgatgattatgagcttgtctaaattcaaaactgctaaagccatctggtctcatttgaaggagcgttttgttcaggacagtggtgctctattacacactctcatgcaacagacacatgttattgagcaaaatgatatgagtattgatgagtactactcagcctttgatcgcctgatgagtgccttgacatcaatggtgcctgcttgtaccgctgatctgtgtccggctcataagtttattgagaagttcttcacttacagatttgttatgggcgttcgggccgagtttgattctcttcgtgctcgtttacttgagggttctgacactctcacaatggctaaggcgttgtctgctttacttgctgaagagactcgtcttaattctctgtcctctactggtggtaatcctcacagtgtgttggctgctgcccagaaacctaagaatatttttaagccttgtgatcattgtggcaagaccaatcatcgatctgagctttgctttgtcaagttccctgataagttgactgatttccgtgcacgacgtgctgctcgtggtcgtggtccaggaccatctaatagaggctcagttgctgttgctgccacttcgtccgcttgtacttcagagtcggcctgggtacttgattcaggagcttcctttcatgtcacatctgatcagtcaaagttggcttctactacacctgtcacagatggtgcttcagtgcagacagctgatggtactgtatgccacattactcataagggttctctttcagatccacactttacagtacctaatattttctttgttcctgagctatctatgggaccttctttcagtaggccacattacggatcataattgctttgtcggattttgatgactcatcttgttttgtacaggaccttcgcacaggggaaagtgattgggactggccgtcgcccgtagagctgctcctcgcctctacatcttggactcttgcggcttcctttccttgggctacatctccagcgcatgtgctttcagctacccttgcttctgttgcgtcttttgcccagtggcatcatcgtctaggtcatttgtgtggatctagattgtctactctaataaagtcaggttgcttaggtcatacttcggttgagtctgattttcattgtaagggttgtcatcttggaaaacaaatacaacttccatattttactagtcattctcattctgttcaaccctttgatttggttcactctgatatttggggtcctgcaccttttgtgtcaaaaggtggatataaatactatgttatttttattgatgatcattctcgctacacttggatttatttcatgaaacgccgctctgagctgatttttatttataaaacctttgctcgtatgattcacactcaattttccactcacattaaaacctttcgttctgattctggtggtgaatatttatctgataatttccgccagtttttgacttcagagggtactcttgctcagctttcttgccctggtgctcatgcacagaacggtgtggctgaacgcaaacatcgtcacattatagaaactgctcgcactttgttgatatcttcttttgtcccgtcacatttttggggtgaagcagtttctactgcggtttacctcatcaatagacaaccgtcatccaaactctctggcaaaacacctggtgaagttcttttcggaactcctccacgatatgaccaccttcgagtttttggatgtacgtgttatgtactattatcacctcgtgaacgtactaaattgactgctcaatctgttgagtgtgtttttcttggatacagccctgaacataaaggctatcgatgttatgattcatcttctcgtcgcatgcgtatttctcgagatgtgagcttcaatgaaaatcgtcccttcttttataactcttccactcattcttctttttattccacagagtctacctccttcatgagccttcctcccatttctgaaacttcatcagtatcaccacctactgtttctaccccagatgtccttattcccatcacaccaccttccacttccacatcatctccgtcttactcttccaaaccacctgtcactcagacttacattcgtcgtcctcgctctactcccacggccagtcctgatgacgatcctgttgctgatacttgtactaacaatgatgactctcatgttgtttttaatcaggggtatcatcttcgtgaccgtggcactattgcagctccagaacgttatgggttttcccgtgctggtgcagtcattgctgaaccatcatcttataaagaggcgtctggtatacctgagtggcagcttgctatgactgatgaattaaatgcccttcatcgcacatgtacatgggatgttgttccgttacctgctggtgttgtacctatcacgtgcaaatgggtattcaaggttaaaaccaaatctgatgggtctattgagcgatataaagctcgtcttgtggccagaggttttcaacagacacagggtattgactatgatgagacttttgcacctgtggcccatctgactactgtccgagctttacttgctgttgcagcctcatcttcttggactatctctcagatggatgtcaaaaatgcttttcttcatggtgatttacatgaggaagtctatatgcatccacctcctgggatagaggttccatcagggcatgtatgtcgtctccgtcgagccttgtatggtctcaaacaagctcctcgtgcttggtttgagagatttgtttctgtcatcaaggcttgtggtttctattctagtgatcatgatcctgcattgttcattcatgtttcttcacgaggacgcacattgttattactatatgttgatgacatgttgattacaggcgatgatccagaccatatagctcatgtgaaggcgtctctgagtaaggaatttcaaatgtctgacttgggggcactcagttatttcttgggcattgaggttttgcagactcaaaatggtatttatctttctcaggccaagtacatacaagatcttcttgatcgttctggtcttagtgatactcgcactgttgccacgcctatggatctacacttatctcttcgtccgactgatgggacacctttggaggatccatctcgatatagacatcttgttggcagcttagtttatcttactgtcaccaggccagatattgctcatgcggttcagatcttgagtcagtttgtctctgctcctacatcagttcattatgggcacttacttcgtgtgcttagatatttacgagggacaaaaacacaatgtttattttatgactcaaattccccacttcagcttcacgcttactctgatgctacctgggccagtgaccctacagatcgtcgctccatcactggttactgtattcttcttggatcatctcctattgcttggaaatccaagaagcaagctgctgtatctagatctagtactgaagcagaacttcgagccctggctactactactgctgagattatctggattcgttggctcttggctgatctaggcgtttcttgtgactcgcctacacttcttcgctgtgacaacactggagctatacaaatttgtcatgatccagtgaagcgtgaactcacaaaacacattggtgttgatgtctcattcactagatctcattgtcatcagaagaccattgatcttcaatatgtgccctcagaattacagcttgcggatttcttcacaaaagcacaaactagggcacagcatcagtttcatctaatcaaactcaatgcttcaaatcctccacttccgccttgagtttgacagggggtgttaaggcccataaggcccataaggcctatatgcctatatatatgctacagtacccgtgggggtgattatctcggctaatcaaggttagtaacatttcagacatgctttcttgttttgagtagaaaatgaggaggtaatcttattctttgctatagtcatggctgcagcaacctcagccatggctggcttctcatcaccatcaaccaatctcagcacgacaagaagcggtaaagaagctctaagacaatcctcaattgaattccaaaattcttgagagaaaacgatgtcatatgcttttttacctgcctctgttttggataccttggattgagtgaaaacatcacttgaaaatagacctttcaatgagtttttgtgcttgtgcaaactcttcatggtaaggaaggcagtagcaaatctagtagcagcaggtctcacaagatccatcccatttgtatgcaccctcatttcactaagtatcctcccatgcctataaataaaagtggtgacatgacgagcacgagcaataggcttcttaaaatccttcaactttcctatgtcctccaacataaggtccaagcaatgtgccgcacaaggagtccagaacaaggtaggaatcctctccattaaaatcttacctgctgccttataattagcaccattatcagtgacaatctgagtaacgttttccttaccaatcccttcaattctcttttctaacaagtctgcaagcatcactgcactgtgtgactcatttgatgcatcaactgactccaagaaaaatgttccttgagggttgttaacaaggaaattgatcaaatggcgacctcttttgtttgtccaaccatcagacatgagtgtgcaaccatattggctccatgcttcctcatgcttcttcctctcatcatctatgtctttgacagccctagcaagtaaaggctcacgtagctcatggaaagtaggaggcttgaaaccagatccatattgagcaatagcctccacagctacctcaaattgccttgagttcgcagcattgaatggtataccacactcatagaaaaacttggcaatctccaaacaaacagaatttctttcttccttaggcttcatggtagcacttatggtagtttgagcaggtccatttgcatgtctctctgctacaacctcttgaggtgtacgtcgaaccatagatgcaactgacttctttggagctgcaattgggtggggcttcaattggaatattgctttgtttcttttggcagctgttccagaacttggcacagtacatgaggaagccttggatgatgctgacattgacctgcttcccataacttggacatcatcttcttgtcctgcttcatcttccattacatcgtcatctaggtacaacggcctagcccgcttcccatgattcaaagcttcattcatctctttagcaatctctctagtagtgttaggacacttgacaatgtctccatagccaccagctagatgttgtttcaccctcttgatacctccttttatttgtttggggcacaaagcacattgaatcagctctcgctttcccgcctcaacatagtaagcatatttccatcctggatcatttgactttggccttcgtgactgatatttgagtgggtcataggagtcattagcctcgctatttgttgccattgcaattgaaattcactgccacacagcccacactttaacctgcaacagtgcaacacacaatggaatgaacatcagcagcccacagccacacagccacagtggaattcactgccacacagccagcccacactttgcaattgaaattcgttgctgggttgtgatgctaagcagtttaaattcgttgctgggttgctgggttgttatacttagcagttttaacacagggaatcagcagccaagacagccaagggattctggactctggacttctggagggcggccgatagcgacaacatacctggagggaggagggaggagggaggatggaggagggggcgacatacctggagcgtggagagcggatgacgtctgggcggtctggcggctggagcggctgcgtctggcggctgggcgtgcgcaagcctttggctttgctcctgggcgttggatagcaggccggctgggtgggtaaatgacttaaggcggcccattaaggcccactagtatacatcgcgtagaacgtccacaaaacaggaaaaacgtccagaacggacgttctgacgttttaacgtcgtttaaacgtccagaacggacgttctacgctgtttttgatttgaaaaacgtgcagacgttccagcctctaatcacgttttagcgtttaaacgacgcttaatcgtcgtttaaacgacgttttaataacaatgtccccagcatttttgcaggtaattaatagaagttttcctattaaatatatagtgcaggtacccgtattaggggtggtaatggatcgcgatccaaatgttccttcacaaattcttagggccctaaataaattttagttcaaaaatgaatagaaatagagcctgaccctaatctgatccgattcttaaattttatagtgtaaaatttagaacctattgtcacccctaacctgtatacactcagggattggtactacttactcagcatatgtttagtctgatgagcagtgtttttccttttcatttggatatggtaacatctcaactatttttttatgttgtcttgtatcttgggctgtatataccttggtttgacatccctcttactggagtccagtattctcccttgtttgtttccaacggttccttcctgattagctatatactattaacctaattagttagaactaaaatgcagatctagatacaatttgatattttgatatgtacttcagtgtgtttgggaacatctatgtttttctttgtttaaatacacaaaaatgtctttcaactaagtgagtgtttgaatgcactaaaaattgctagtagaattagctagctaacaaatagctagctaactattaactaatttactaaaaatagctaatagttgaactattagctaggttgtttgaatgtctttagctatttttagccactaactattagctctagtgcattcaaacaccccataagtgcttgttcgttttgctatccatccatgtgggttgggtgagtttgtttgggtttaaatcccaaataagtaaaaatcttttatatttttttccaattccatccaatccacatgggtagggatgaaaacggtcggaaacggtatttattcggtaatcagtttttcctttgattgcgaataaataggatatagaatatacaatacaaatttatattcttgtttttaacatccagcttgttaagattcataaaaggtaaacctcaaattcatcctacattttctcaaataatagatataaacttcagtatggattcggaaacaaattcggtaattttttcaactttttgtgttgtagggagcaaataatacataaaacaacttatatactattttattcatatttgtactaatgtgcttgataacataagaaaagatcaacatcaaattttatgcatacctattttaaaatattaaatttgttctaacagttcggattaccactttcatccctacacatgggatatgaataaccgaacaccctagggtttatgaaacatgtgtaacctacttttcaaaaaaggaacatgtgtaagaccacctccagcagcttacctatgcacgtacctatatttaaactacactctataaacagtgcaatctataatgtaaaacgatgcaaaacggtgtttttagtgaccatataggtgcaatgtagtactgttcactcatatggtcaccaaaaacatcttttgcattattttgcactgtagattgtattgtttgtaaagtgtagtttgaatatgggtacgagtaagctgctggagatggtgagagatggtctaacatacccttcaaaaaaggaacatgtgtaacctgctactaactatacttatttcaatcgtgctcttagctggatctatggatttctttgctttgcaggaactcaccaagttcatcaaccagtgcaacgaaat

SEQ ID NO: 1012 - DNA, 4521 bp, Zea mays
  Intron number 5 from transcript GRMZM2G449309_T01 (locus G RMZM2G449309) derived from phytozome v7.0 (chr-ID 3; pos 2 16900452 to 216904972)
gtactcaagaagaatctactgccacttatgtttctgacccgtacgacaaggtgtacagcaacatccttgaagaaacacatatgctcaagcttgttcccaactgcggttattgcaccgcgaagaagtttgagtatgagccacctgggttttgttgtcgtggtgggaaggttgagctagctccagtggagacccctccccaactcaagaggttgtgggatagtgcagactctgatgctaggcactttcgtgataacattaggtttttcaatggccatttctctttcacttccctatactgttgcctcgatagtatgacaactaatgtaaggggttctggtatatacacgtttcgagcacagggcatgatgtaccacaatatcaagtcatttggtagggaaggtggggcagagcataaacaccttgagctttacttttatgatgacgatcccagcctcgagcatcggtaccgtaagtgccgtgaagagcatcaacagaaaggcaaggaggttatcaaacagatagtcgacatactacgtggaaactcgtactccgagcaccttaggaccatgggccacgttgacaactttgatgactatcgtatcgcgttgaaccttgaccagacgttgaaccagaagacatataacacacctctcacttcggaggtggccgctgtctggatcgaagggagcgaagggcgaggccaattcagcaagagtgttatgctccatgggaaggacagttcaagccactgcatccgctcataccatggatgctacgatgcactatcatatccattgttcttccctagaggcgaacttggatggcatgcaaatatcccaaaggttggagtatccatggacgaagtggatgcataccgcgcgacacatagggcaagtaatgcaaatgatgaagatgcgggttagttgttaatttgatatttgagatatttgcacattattaactatgctttcgacatcactcacttttcaatccttgcatatgcagaatctcctagccatttatgtgtgtctgtacgtgactactactgctacaaattctagattcgtcccggggtattcaatccaatacttcatggaaagcggcttttccagcagttcgcggtcgacacgtacataaagattgagagctctcgtttagatttcatacgtaagaaccaagatcggttaagggcagacctataccagggcttggtggatagcatgctagatggagatattagagcagagaagattggcaagcgaactgtgttgtcgacatcgtttattggcggtcctcgtgacatgagacgtcggtatatggatgctatggctctggtgcgcaagtttggtaaaccagacatctttcttaccatgacatgtaaccctaactaggatgagataaggagggagcttctccctgggcagacaccgcaagatcattcggatcttgtagtgcgtgtctttcatgcaaagctacaggagttaaagcataggctgactaaacaggatattcttggtaaggtccgagcctacgtctatgtcgtggagtttcagaagcggggtttgccgcatgcccattttctactcataatgcagaggaagtacaagctcacatgccctgagcagtatgaccttttgatctcagctgagatcccaagcaacaagtaccctgaactacgaaagatggttatcaagcatatgatgcatggcccgtgtgggtcgctaaaccctaactgcccatgcactaagggtcgtaaatcgtgcaagaatcattaccctcggaatttcagtgacacaaccttgcaagggaaggattcgtaccctgtttacagacgtcgtgacaatggtcgtaccgaaaaggttcgagggtgcgaattggacaatagatgggttgtccttacaacccatacctcgttcgtctcttcaactgtcgcatcaatgttgaggcatgtgggagcatcaaggctgttaaatacctgttcaagtacatatacaaaggccatgatcgtgcttctgttgttatgagagatgcgagcaaggcagatgatgatgtagatgagatcaagcagtacaaagatgcaaggtgggtgactcctccagaagccttatggaggatatacggctttgagcttagtcagatatctccacctgtgatgcagttgcaactccatcttccaaacatgcacatggtgtcgtttcacgagcggcaaatggtcgagcgagtcgtcaaccgtccaggtgttgataggtcaatgctcatagcatattttgaggcgaatagtctacacaaggaggctcgtggcatcctgtatcgtgacttccctgaatggtacacttggcagagtggtaagggaaaagtatggcaacagaggaaacgagatacgggtggacaagtcggtagaatagtctctgctcatccggccgagggggagcgctactatctttgtgttctcctaaaccatgtgactggcgccacttcctatgtggatctaaggacagtagatggtgtcatgctaccgacttttcgtgaggcagcagagagaaggggactgcttgagtcggacaacacactggatgagtgtctcactgaacgtgctcttttccagataccatcggcgctgtgccgactttttgccacaatacttgtgtactgtgagccaagcgatgtggttgtactctggcagaaacacctagattctatgtccgaggactatcaacacaggaatccgtgcaaaactcatgttgagcagatggtattgattgacattaggaacatgttgcagtcaatgggaaaggacataaagacattccctcttcctcctatcatggatgcgtatgacgatgctattggtactgctagggaggtttacgaggaggaaattatcgaaccggcagcaggagatgtggctctcaaagactgtcttaacaaggaacagagggccgcctatgataagattatgtctgtcgttgacactgatcagggcggattattctttgtggatggacctggtggcaccagaaagacttacctatatagagtgctgctcgcgacgctacgcagccagggcaagattgcagtcgcaacagctacatctggcgttgctgcttccataatgcctggaggaagaaccgcccattcacgcttcaagatacctctcactattgacgatggcgctgtatgtagcttcacgaagcagagtggaaccgcagagttgctacggaaagcatctctcattatctgggacgaggcttctatgactaagagacaagccgtggaggcactggacaatagcatgcgtgatataatgggtcgacccggactgccattcggtggtaaaaccattgtcttcggtggggattttagacaggtcttgcctgttgttcgtaaagggtcaagggctcaagtggtcgcttcttcgctacggatgtcttacctatgggagtccatgtcccacttaaagcttgttaccaatatgagggcaaaaaacgacccttggtttgcagagtatttgctgcgtgtaggcggtggaactgaggacacaaatactgacggcgacatccatcttcctgacgaggtatgtgtgccttacagtgggagtgacaacgatcttgacaacctaatagacttcgttttcccaaatctcaacaaaaatatgtctgattcgacctacatcacttcaagggcgatactgtcaacacggaacgaatgggtggatatgataaatgttaagatgattgatcgttttcaaggggagcatatggtgtaccatagtttcgatagcgccatggatgatccccataactactacccacccgagttcctaaacacactgacgcctaatgggctgccaccacatgttttgaagctcaagattggatgccctgttatattgcttcggaatatagaccctgcgaatggactttgcaatggcaccaggctggtcgttcgtggtttccaaagaaatagcattgacgcataaattgtactgggtcaacacgctggaaaacgcattttcctgccgcgtatacctctatgtccctccgatgaagagatgttccctttccagttcaaaagaaagcagtttcctgtacggcttagctttgcaatgacggttaacaaagcacagggtcagactattcccaatgttggtgtatacttgcccgaaccagtgttctctcatggccaactatatgttgctctatctagagcgacagcccgatcaaacataaagattcttgcaatcccacccgttgatgggaaaaaacgtcgaggaagggtgtaagaaagaaccccacagtagattgtgggacatatactaagaacatcgtctacaaggaggtcctaacaaactagacctacggtaagtctgtcaaaactcaattgtttgtttcaataaaaagacaccgacacaagactaacactcaaatgtaattgtgacgttttgatgaggagatgttaaggagctttataaaataatattgatttgtttgtaactgttctgtttgataggttggggtattc

SEQ ID NO: 1013 - DNA, 7886 bp, Zea mays
  Intron number 1 from transcript GRMZM2G369242_T01 (locus G RMZM2G369242) derived from phytozome v7.0 (chr-ID 9; pos 1 31130239 to 131138124 reverse strand)
tcgagcgcgccagcttagagctgtccaagtaccaggtgttagactctctccacaaggtgcgctatatgctcctctactctatatttagcgcacggtgatcaactttttccctccaacaacgtgcgctaaagggtccggtaaaatagaggacgccctcaaccacctccaaatgcagcggctcctctattcgtgtctctctacttcaggtccgctagaaatgtacaacaacatgcagtagaataagtattgtagctgaattaatgaagaataagtagcagcaagcaatactattaggtgtctgctcaaatatgtatagtagtttttttaagatctgccaaggaaactttgtaataaaaaggcgtactattttaggtgaagaaaaaaattaatatacatcgtattttaatactagatatacaaatgatatttttctgtgtgcgtccaatgtggaaaaaagaatgtagaaaataaagtctggtaacactatttatatagagaatgaaatttagaggacgctgctagagtagaaaaagatatagaggacgaaatcttttagagggtgctgtaaaggacacagaatattcctttaaaggatgaaatttagaggacgttgctggagacagccttaggatgtgtcctctacactagccggttaacagtaaccggggtagggttaatcctaaccgtctaaccgcgctcctaatcgggaggctatcctaaccattggttgcagccccgtcacacgacgccatataaaatagattaagggggccaacgggtttagccaacgctaatcgctcgaccacaaaccctaatcgacactttgagaggaatcgatcccctaggcgctcggagtgactggaatcgttgtgactatgtctcagatccccgttatcccatcgggatctgagattccacctgcaggcaacattggaggagctgatccaccgccgatcaacgacggaaaccaatctcctcgacaccagcagggagatcgacaagaaggaggaggcggatcttcgctgcaagacgccgccgtaatgatggctaggaacaacaacgacggtatgtatacatgtacccctcagtagaatagatctactcatcatcgaggtattttagacacggattggtattatagggacttaggaaacgatcctaagcaccagaaattctaacattggtatcagagccacctaagaaccctagatctcctaatccgcattcggttttatgagataatagaaatgtctcggatctatgtgaatgaactctttttttaatcatcattcatcacccgagaacagagattagaataaatagaaagagtttcatgctctcgagttaggttttccctaaccctaagatttaggtttggccactgtaagagacacagcgagtctcggccccaaaccagagagctctcacaactaactagggttagggtttatgacctaaccctaatcggttaagccgtcaacagagacgatgcagaggcttatggatccaacgatccgcggccaagaaacaaagtcaataagaaacacagatagggttagggttttgaactctaaccgaaataatcccaaaaccgcacgctctgtccgaaggcccaatatcgtttttgggttcaaatttgtgatcagaaaacatgtatagaaatcagatcaagtgcgcagagcactgttcacgcatccatagggcctcatgaccaaaataacatcacagaaaagctcgaataatcagatccatgcttcaaaaccctccaaatcttgattcccattacatattattcatttcttacaagcatacatcacgtgaagtggggatcgaataaaaaaaaggagaaaatcatgacagagatggccatgctgccaagtgcctgcagaaatgtccatgcggccagatggtagaacaaaaaaagagacaacgagagagagagagaataggagtagtgatcggccaggagccagagctccctgacggatgatttctgcgccaagaaagtcggccgccaggaaggcatggggctgaaatagaaatgagctagggttacctccacatccgacaatctcggtatttataaacctagctacagtagctcgtacattcctggccgttgattttgatccaagggcacagaataagcctggaagcacccacctgcgcgtgggccagaacggcggcccaggctcaggttgcggcctgggcgcgcgcctctctcacgccagcaccagctgggccgccagcacggctgggccaaatggccagaaaagatttttttttcagcgattttttttaaaaaatcagaattagtgaaacagaagatgaaattaaaaaaatagtgcagaaaattcataattatatttttccagttatagaaaatttcagagatatttatggactattttattccgctgcgtactttggtacttttatttatattttatgcaatttttccagttaattatgaaaccaacgtggattaattattgtttaaattgcatagaattcagaaaattttgtggtgattgaatattttagccaacgttggatattgttaccatagttttatacaagtttatgttttctagatcatccaacgatggtttagaatttttgtgatcagaaattttcatagatatggcatgattattatttgaccaatgttgaatatttaattcatgcatgttctatgattttgtattcagtatttatttcagatgtcctaaatattttctattttaattttgcaaaggtgctcatactgccatgctgattagccagattgcttagatgaaaccgctagatggtagtaattaccattcttggcgggaggatattgacatgataaccacagtgggtgagatagattacgcactgaggtttgataaaccagttgagcccacagtgggcactcccaactatgaccacatgtggatccaatacagcatcgacaaggtcaagtgggaaagatcaaatgacaaatgtatgattattattaagaggagcattaaggagcctcttaagagttccataccagagtgcgagactgtcaaggaataccttgagagggtagcctctcatcataaagggccttttaaggcttatgcttgctctctaatgacagaatttgtcaatgcaaaatacgatggaaatggtgtcagatcattcattcagaaaatgatatccatcgtagctaagataaacaagtacctcgggtctcctttacacgaggaatttgtagtatttatgataatgaagtctctgcctaaggagtttgagacttttcacatacagtacaacaccagtgtcactgataagtggaatatagaccaactcttggcacagtgtgtccaggaggaagagaggttaaagcagactggagactctatcaacctcatcaaaggcaatatccccagacagaacaagaattcaaagaaaaagttcaagaagcagggtaaacagaataaccaggcttcctcaagcaacaataattagccaagacaaggaggcagtttttcagtcccccctgatacctgcctctattgcaagaagacaggtcattacaagagaaaatgccctgaattcctgcagtatctactagagagtggtaaggaccaagttacttttgtaaatgagtctttatacttagaatatcccagttattcttggtggattgactcaggtgcaactgttcatgttgcaaaccctctacagggactccgtacaagccaaaggctcccaaagggccgaagaacaattagagtggcaaatggagttgaagcagcagtcgaggccattggagatctacatcttaaattacataatggttttgtactgttgttgagagacgtactttatgtaccttccttgcgaaggaaccttatttcggtttctagattagatgatcagcacattcattgccattttggtgatagacagtgtggcattcagtttgataataaagatgttggtctcgccatccgacgagatatcctttatttactttcgcaaagtgatgttgttaatgtattagatataccagaaaacaatccagccagcagtggtaggaaaagaaaacaaagtgatagagaaacctcgtcgaaattatggcactatcgtttgggccatatttcgagggggagaatagaaagtcttgttaaggaacagattctccatcccctagacttcacagacttagagcaatgcagagattgcattaagggtaaatttgcgaagcagattaagaaagatgctaagcatagtacgagagtgttagaaattattcatacagatatatatggtccttttccagttaggacagtagatgggtttaattcgttcataaccttcacagatgactactctcgctacggttatatttatcctattaaggaaagatcagaagctttagacaagtttaaacagtttaaggctgaagtagagaatcaacacgatttgaagataaagattgttcgatcagatcatggggggagtactatgggcgccataccgagtatggccaggtcccaggacctttcgcgaggttcctaagagaaaacgatattgttgctcagtattcaacacctggtgaaccacaacagaatggggttgccgaaaggcgtaacagaacgctaatggatatggtaaggagtatgttaagttactctaacctgccattgggtctatggatggaggctttaaaaaccgctatgcatatactcaacagagttcctagtaaatcagtggctagaactccatatgagttgtggactggcagaaaacccacgctcaactacttccatacatggggttgtccagcagaagctagaatatttaatcctggacagggaaagctagatgagagaaccactagctgccattttattggctaccctgacagatcaaagggttacagattctactgccctgacagacaaaccaagttcatagagaccagacatgccattttcttagaggatgacatgatcaaggggagtaaggtactcagagaggttgaccttcaggaaaagaggatatatgtcccatttccgatggttaaagaaccatacttctcgatacccactgtggttccaccaacagtcacaccgactgtgggtgaaacccctgctgcaaatgtggcgtcatctagtgcaactactacagagcaagtagcttcaccttctgcgcatattggccctgagccagttgcacaggatagttcagaagatgatgatagagttgtgccaagtgacgcaccattgcaggagccccaggaagaatctgaactagaaccagaaccaagtctcaggaggtcacagagactcagaaaatgtgcgattcctgatgactatgaagtctatgcagcagaaaatatagaatgtgatgagattcatatgagtgagtacattgatacagaaggtgatcccactacatatgaagctgctatgagaagtgcaaattcatccaaatggttatcagccatggaagatgaattagaatccatgagaatgaacaaagtttgggacttagaagtcattccccatggagccaaaacagtaggctgtaaatgggtctacaagacaaagcgtgactctagagggaacatagaaagatacaaggctagacttgtggccaaagggttcacacagagagaaggcattgactaccatgaaaccttctcacctgtctcaacaaaagattcattcaggatcataatggcactagttgctcattttgatctagagctccatcagatggatgtaaagacagcattcctaaatggagagttagaagaaaacatgttcatggcacaaccaaagggttttgttgtgagcggtaaagaacacatgggatgtcacttgaggaggtccatttatggattaaaacaggcttcaagacaggtacatcaagtttgatcagactatcagaaagtttggtttcgaggaaaacaaggaagacaattgcatttatgcaaaatttagaaaaggaaagtatatcttccttgttctgtatgtcgatgacatactcttagctagtagtgataaggatctactagcggaaacaaaagggtttctttcctcgaattttgatatgaaagacatgggagatgcctcctatgttcttggaatagaaattcacagagagagacaaaagggagtattaggactctcatagaagtcatatatagaaaatgtactaaaaaggtataatatgcacaagtgtaatgcctcgcctggtccaatagtcaagggtgataagtttggggaatatcaatgtcccaagaatcagtatgagaaaaacaagatgaagtcagtaccatatgcttcagctatcggaagcattatgtatgctcaagtatgtactcgccctaacttagcttttaccaccgggatgcttggacgctatcagaagaatccaggcatagaacactggaaagcagtcaagaaggctctaaggtaccttcaaggtactaaaggtctcatgcttacgtacagaagatctaattccctacaaatagttggctatgcagatgccgactggggagggtgtagagatacactgaagtccacttcagggtatgtctttatgctctctgggggagctatttcttggaagagctgcaaacagatagcgagagcatcatcgacaatgcacgctgagtttgtagctacgtatgaggcaactggacaggcgatatggataaagaaattcgtacccgtattaagagtggttgatagcatagagcgaccactgagaatttactgcgacaacgagccagcggtatttttctcccataacaataagtcaagtggctctgccaagtatattgacattaagtgttatattgttaaggagaagattctggatcacaccattcaagttgagaatataagaacccatcagatgcttgcagacccgctcacaaaaggtcttccacctagcgtgtttagtaagcacgcagccggcatgggattaagggagtacctatgatctagaatcacaggggctacagattgcaacctagtaaaatctttcgttctaaagcaggggagcatgttgtagtcaatgagtgcggtgatacttaatagatcattgtcacgcattggtctctatgtgtaaacttgttaaaggacggaattaataaaagtttgagtgtgagatatgtagagaacaaaggggagattgttaggatgtgtcatctacactagccggttaacagtaaccggggtagggttaatcctaaccgtctaaccgctcccctgatcgggggggctatcctaaccgttggttgcagcccccggttacacgacgccatataaaatagattaaggggccgacgggtttagccaacgctaatcgctcgaccacaaaccctaatcgacactttgagaggaaccgatcccctaggcgctcggagtgactggaatcgctgtgactatgtctcagatccccgttatcccatcaggatctgagattccccctgcaggcaacattggaggagctgatccaccgccgatcaacgacggaaaccaatctcctcgacaccagcagggagatcgacaaggaggaggcggatcttcgctgcaagacgccgccgcaatgatggctaggaacaacaacgacggtatgtatacatgtacccctcagtagaatagatctactcatcatcgaggtattttagacacggattggtattctaggaacttaagaaacgatcctaaacaccaaaaattctaacaccaggtgatcatgtgcacacgtacatacacctctattcctgccatgtgatcggcatgtgccgtgttctaatgagtacgcgcacgtgcgccacattttttggtgtaggcggcggcggcggcctcggcctctgtggccgtggg

SEQ ID NO: 1014 - DNA, 5426 bp, Zea mays
  Intron number 2 from transcript GRMZM2G132591_T01 (locus G RMZM2G132591) derived from phytozome v7.0 (chr-ID 4; pos 8 7227116 to 87232541)
gcaccgacttgtttcctctgcctgcaaagatatccgtaggtgagatactacaaagaaaagaaaaaaaacaaactatcaaggggaaatgcaaaattaattgaaaatattattgttgatgcaaaattaattgaaaatatttatcgttgattctttggcggcgggaaaagcacgccgtaggcgagtactcctaaaaaacaataaccaaacctgtttctggctgaagaaatatgttcagcactcttaaaaaacgataacagccaaataaacttgtttctagcttataaacattgggtgagtactcttataaaacaatgacaacaaaacttctttctatctgtataaacatttgttgttggaaagtgtacttttttcaaaaaggaaaaaatgttcaaaattacatcatgtactgtgtttttggaaccatataagaaattcgtttaaattttaaccataggggcatgggggggggggggggggagggggggaggcgattaataaaagttgtctcccacgtttatttattgtttcgctccatttgagataacaaactgatctattcaccatgtttttaaataaggaccaatagaagctgtgtttggcaaaccacactttttgttcgctgtgtttggcaaaagaggtagaagctgtttcttgcctcttatttacatggctttagccaagccacaacaaaagccacgctggtttcgagccatacaaagaggccctatatctcatagatttttgcttataaccatggggataagcctttatctcctatggttctaagggggtgtttggtttctagggattaatgtttagtccctacattttattccattttagttctaaaattgctaaatatagaaactaaaactttattttagtttctatatttagcaatttatagacaaaaaaggaataaaatgaagagactaaacattagtccctacaaaccaaacaccccctaaacagcaagcctcatcaatctgaaagggttttggtttgaaccatccaagataacataaatttaaacgtttctaaaaaatccatgaaagatgagatgatatgggagttcttcaacagtgatactgcatctatcactctgtttattttactatctagatctaaccattgatttgagcactacaccccaccccgcccctcccttgacttagggtgcgtttggttggggagccaactagaacggaactattctgttctaatttctaagaatagagccgctccattctctgtttggtaggtagaatagaatcattctctgttttgtttggttggagagcacatcagagcggagtcgttctgttccgtgtttggttggagaatacagaacgacatgatccgaatgcaaaactgcacacaactcatgcaaacgtctcattcaaaccaaacaaaactgcaaaccgctcgtgcaaacctataatgcatggaccaaagttcatcaccacgaaattttcataatgcatgagttcatatcaccatgatacataactatagttcaaccatacgaataaaagatacatgtccaaataaaagatacatatttcatcaccagtgtaaccatatttcatccaatcaccatgatacatgagttcataacgccatgacaaaacatagttcatataaccataattctaatcatgacgcacaaactagaagttctcactaacgaaactcgaaaaccatgatagcttccaatcgaatggtagattcacgaaagcatgagcatcattaggatgtctaaccaagtgctgatagtactaagacttgtggttaagctgaaaacctgggagactgtccactgcttcaaacaaaccatctggtaaagcactgcttgctttctcgattgcctttgtagcctttcgctgccatgatcaaatgcttcaaccaagcaatcagtctttcttctactatcatcaatagtcttgtctctcttagctggcctagctaaagaagatatatcatcattgacaacacttttatcaatcccatggttcatcccctcactttctgcattgccatcagccccattgttcaccccatcaatcccaagtggttcattagagctctttgcatactgaccagtagcaaaactattgccaaatattgtagctagaaaaccatagtatggaagaggcttgttcaaatattcatcatcagccttgtttttttggatcctaacagtgagtgcaacacttattaaaaataaaaggatataagttctttctatgtttaagacaatactataataaaagcatataaagaacatataaactatttagactatgtacacactaaaatatcaaatacaaagggatagtaaacctcataccgccatatgttctttgtagtgctcatgatctagagaaacaatgaattcattttcatcccaaagtgcagcactcaaattcttaagatacttgatcctagtgtacttcttcttccatgtcttcaagtgattagcaacttgatcacatgtcctcatgagcttaaaatggtcattgagagccttagcacaagcattgagataaactttcttgaacccagtggaggtcttagtgccttcagcaacaatgttgctaagaatggtgagcacaaatgtggattgagttggtgtccattgacatagtccaccaccaacttttgcactgcttacctccttgtccatgacctacacatccatacaaataaaagatacatgtccatacaaaataaaagatacattccaacttttagcaacttacatgtccatacgaataaaatgttcatgtccatacaaataaaagatacatgtccatacaaataaatgctacatgtccatacaaatgatagagacattggaaaatacatagcaacaaatggtgtttgtatgatagtcttcccacatagcattggcaagttcctgcctgaagttaaccttaataccatgctctattgcttgtccatgcgaagatatttgatgattaatggtaggcaattcctcattctcaggaatgataaagtcatcacctccatcttgtataacccagttgtgaataatacaacaagcaaccacaatttctacttgtgtagagaaggggaagaacattgtagcatcatcaagaattttaaatcttcttttcaatgaaccaaatgcccgctctactgaaactcttagagatgaatgcctatgattgaataattctttctcattttgcacaggattagttccccacttgttcaagtggtatcatacaccacgaaaaggggcataaatccaggtttggctccatatccagcatcgactaggtagaacttgcctaacatacaagggatatgtatgtgagctacactaggtattatatttcatgactaaagtaatgagctacacaagttgtatttaccttcaggcacacgaagaccattttctctttctaaagcatcacgtaagactagtgcatcatgagctatcccctcccaaccggccaagacaaatgtgaatcgaagattaaaatctactgctgccatgacattttgagtagcataactctttctaccacgaaaggaagcctccatgtgtttaggaacagatgctcgcacatgtgtgccatctattgcaccaatacaatcctattattcaattagaatgcaaaaaaatataagcaattataatctgaattccacccttaaaatgaagggaagatacaatagcctcacaccttaaagtaaggatcccatcttgggtttcctgcaattttagctggagttgatgtagatggtggcctaataaactccttttgtagctctccaatagcgtggagtactttgttgaaatagcgactaacagtttcaccagacctatcaaaattggtgccaactaacctattcctaacattgtgacccacaatgtttaaaaacattgcaacctgctgctcaacacacaaatgtatggtgtcttttaaaaggccacgatccctaaatagtttacaaaattggaagaaggatgctctattgagtctaagcatactaacacatgttacatcatttttccatatcttattattaagatattcaaatctcattctatctctcccctcaattggagcatatgtaattgtttctacagattcacgatgctttctttttctagattgaataaccatggccatcatggaaagcaacatatgcgctgcagctgtgtaaactaaaatttgttacttcttatccatctatattatacacaacaaggttaaagttaatagttgctaacaaatcacataatcacacaaggcacatagtcaatagttgcaacaatattataccttctatcggcctatgttgcatgtgcttctcttctcaaagtgttgctgcaataataggacagagcctcggctggccctataggcaataatagaccggagcaagcaagcaatcagtcagagctcagtccaatgtgcagagtaagcaactcggtaataatagacatgcaccatgataataatcggttgcacccaccggtagagcaagcaagttgctacctaatcctaataatcagctggagccaccgtacctaatgacaccctgcagcaaaggcaagcatgcacgcagcagcaaccagcaggacgtgtaccatcactgagacctgctacgcgttgccgagtatcattgagccagcagccagcagccagcaggatagacgccgctggactgggagacgcggttggccagatccagcgacgaacgggcacaaagacgtacacaggacctagctactgggtcttttctgccatttccccctcctattcaaatccatcttcagatccatcactgtgaagctccctgcacccagcagatctggtgaagggttgctgacgacgtggacgaagggggtggtggtagaagtagaaacagcagaggaggaaaggccggtggggaaagagaagagggggctggaaggagaagaagtggtggcagattcacctaatttgacagatgacggcggacgggcggagctcctcacggcggcggctcaaagtgcactgctcgcgtgagagagaacgaaggagtagagagaaccagagcactcaggtccggtcgatttggccgagcagactcattctggatatcagttgtataatgcaatagagccactcccagagccgctccgctctttcttactgcgtaaccaaacactagacaataggaatggagccactccattctctaccgctcccaaaccaaacacacccttagtatctcattgtgttcaatccatccattcgactggcaatggacaattatgaaaacttcgcacttgcatcagttcacttaaccatttctaatgttttatgaactatcaataaattaggataataagtttatttgtactttgtataggtggcataggtggacttttcttaatagcacta

SEQ ID NO: 1015 - DNA, 9150 bp, Zea mays
  Intron number 13 from transcript GRMZM2G095326_T01 (locus GRMZM2G095326) derived from phytozome v7.0 (chr-ID 4; pos 186675026 to 186684175 reverse strand)
atcttgagtcacttcttctggaaaattgtgaagcggtaatgtttttaacatcataggttcttaattcattattgtgctaatcctttgttctcaacatttttttatggttttcatcgttggtgataattttgaatgcaaatacaatcaattttagtatgagggtcacacgatcaaaaacccaagtccttgctttaagaacatcaaggaaggtccacaccatggttttaaaggcggctaggcggaactagacgcccagccaccgccttaccaagccaccaaacagctgttacagctcataaactagaaatcatcacaaattcacaatagcataatagtggatctgaaatagccacaaagtagtttctaaaggaacaatagcaagtcacaaaatttaaaacagcacaataccaaatctgaaatagccatatagatagtttctaatggcataattaatagtaactagctgcagctactaatgcagcaaatatgctaatgcaatctagcaatagctactccgccgtctctcaaaaatcatcatcaaactctcctgggatattgggtgcctccccttcttcaccatcattgccaccattagattcatcttcacaatctgtgatttctgcatcatcatgtggaacatcttcatcttcatcttcctcttcagcctctgacacattttgtgcagcaacagaatttctccttgaatacacattatgagctcttcttggtaagtttcggccacgaagtgcttgtgatgctccaatggcattatccacaaggtcccatgtaaggtcacactcacacccacgtccaccttcagggactacatgcaaagaatcagcccactcattgtcccagttgaagtcctcattaaccaatggatcaaagtttttccccttcttctggcgtagtttttggaacctagctttcatctttcggttgtaggaaatgaagacaatagaattcaacctcttatgcaacaaccaatttcttttctttgtatgaatctacaaaataagaaaacaaaagacacctggtcatttaatcttgaaatattggttacaaaagtagccaagtaggtggatgaggacttgaggaggcacacataataacttacaaattcaaaggtactccaattgcgttcacaacctgatgaagacgcacaaagactcaccaaacgtctagcaaatctctaactcaatagcacgaccaccatacgaacgccaccactcaactgcaataacaacacaacaatttagcaagctactagcattctagcaacaactagtaagtagtaaactagtaacaaccacaaacacttacgtggggtcatagtttgtaggttatttttggccatcttatttgaaaaggctgctcctctaagaaactcgtaatccattgcttgagaattgatcttgtctctagtttcctcatcatctaccattcttgcaagcacatcaagaaagcaacctctaagctgaccaccagtagcatcatcatcatttcttatgagaggatgcagctttcctgggttcaaatacattgcagccccatacaatgggtgatccatttgtttctcccaacgccgttcaattatagttatgattttcttgagtaaactcttcttgctttggacaacaaagctttgattgatcttttcctttgcacattttatcaatgcttggacctctggcatagctggcctctcatctccatctaccaccctaagtacaataagtagtggccctgaagctctaaggcaatcttctactgaattccaaaactgtgtggagaagacaatgttatacacatccaatccagcactagtctttgacaatctgttatcagtccaaactgtgcttgcaaataaagccttcaaagcatccttgtgcttgtacaagctcttcaatgtgagaaaggaagtagcaaaacgagtggcagcaggcctcacaaaatcagccccaccagttttctctctcatggcagcaagaattctcccatgtcggtatatgaaagttgtcacacgccttgcacgtgcaattggtttcttgaattccttcaagtttcctatgtcctccaacattaggtccaagcaatgtgcagcacatggactccaaaataatgtaggaatcctctccattagaaacttgcctgcagctttgtaattgacaccattatcagtaacaacttgtacaaccttgtctcttccaatctcatcaacttttttctctagcaaattagcaagcatgtatgcatcatgtacttcacttgatgcatcaacggactataaaaagtaagtgccctctgggctgttcactaagaagttaataagatggcgtcccctcctatcagaccatccatcagacatgagtgtgcaaccatagtgtttccatgcacgctcatgttcctccctcattgtatttgttgacttcacaaccttctgtatcaatggctcgcctagttggtaaggtgttggaggcttataccctgaaccaaactgtgctgtggcctcaattgcaatctgaaactgcctagctgctgcggcattgaaaggtacaccacactcatagaagaacaaagcccactgcatgtccacatagtgtttgtcctccttactttttgcactggccaagattgtgggctcataagagcctgaaagtctctcatccaccacctcctctggtgttctccgcaacatctcaactacggacttggctgtctttggttgtgctttactacttgccttaaattgcaaggttgattgtctttttttggctgttgtaccagaactaggctgcaccttggatgcttgagactccactgcagatgtatcattcgccccatctgctgttgccacctccaccacttcatcatcttcttcatcttcatctagaaacattggtctttttctcttgtttgcctccaaataacttgtcatctccttccttaatccactgctagccttgggacataactttgcatctccatatgcccctgtcaaatgttgctttaacctctttatccctccactaacaacctgaccacatagggtgcattccaccttatctttattttgaagatctggccaaaatccatacttccaccctggatcagcagacttccgtggcttccgggtaggatcgctcttcgggtcgtactcaccagccacagaagatggagcttcatttcgagaagacattatgttgtcggttgtcgctagtcgctactcgctgcagtcttgagtcttgacacttgacagaaactactcgctggctcgctgcacagtctgaaaccaagggaggaggggatgagaaacatcattcttgagtcttgaaagcaggggaggaggacctaccagcgagcagcatccagcagccagcagccgcgaacagtagcagtgcccagagagcagccgcgtgcccagagagcagcagccgcgcgctcagagcagagagcagcatgcgcgcccagagagcagccgcgtgcagggagagggagcagagagatttgccgcgcgtagggagggagcagccgcacgtagggagagagagcgcgcagggagagaaatttgcggcgcgcagggaagagatttgctgcgcgcgcacagggaagcccaaaacgcgcgcctaaagcccaatgcaaaccctagcccaatgcaaaccctagaggataaggcgtcgcccagacgcctactacgccaaggcggacgcctacctcgccaaggcggataccatacacatttttgtctgggcggcgccgacgcctagcacagatcatcgcctggacgcctaggcgactctttttaaaccatggtccacactctatttttttataaaaaatgtcatgattcgaattttgaaatgatctgtaaagctcattacatatgttggtgcagcaaaccacccgctatctccatcagcaaaagcaacctaggatgctcgtaaagcttgacatctcaaaggcctttgattcagtctcatggcccttcctcctggaagtcttacaacatttgggctttggccaagtctggagagatattattagtggattgctatggacttcctcatctcaggtgttacttaatggtttacctggacaacctattcttcatcgtcgtggtctccgacagggggatcatctgtctccttttttgttcatcttggtcatggatactctgggcttcttgattaataaggccgcataggatggactgctgcagccccttgctcctcgagcactgcaacaccgggtctctctctatgcggatgatgtggtgatctttcttcggccggcagccatggatatcaatattattttggattgtcttcagcagttcagctatttggagatgcttcgggtttacgtacgaatgttcagaaaagcagcgtgtaccctattagatgtggagatcaagaccttgctatgctgcagaatatgttgccttgtgagttagctgaattcccttgtcgttatctgggtttaccgcttgccattaaaaagctttcaaaaatccaagttcaacccattattgataagattgcaaatcaactctctggatggaaggctgagttattgactaaagctggtcgaaaggtgcacgtccagcatgttctcacagggatggtgatctacttggccatggctgttgaccttccagcttgggcccttaaagccactgataagattcgtcgaggttttctgtggagaggccgaagagatgtaaaaggtggtcactgtcatgtggcttggggaattgtttgtaggcctcgtgaattggtggtctaggcatttctagtataaaagaacttgcatggtctcttagaatgcgatggctatggctggctaaaactgagccaactcgcccatgggcctctcttgctatccaagtccgtaaaaaagtgaaagatttcttctcgatggctatgcaaactgagattggtaatggggctacaacctttttctggaccgataggtggctattgggtcacaaaattgcagatttaacccctcgattatttgggatcattcctaagagaagggttacaagagaatagtggtggatgctatctctaatcaaagctggatttctgacttcagggagctctttctattggaattatcaatgaatttctcatcttgtgggatttaattgactcaattgttctaagacctcaagttgaagacaagcattttttccgcctagctgcaaacggaaagttctcctcaaaggaagcatataggggtttctttatggggtcttctgagtttgagccttttcatagaatatggaaaacttgggctcctccaaaaaccaagttttttatgtggttggtcgcacacaggaaggtttggacagcagataggctgcaaaaaagaggcatggaccatccggagagatgtccattatgtgaccaggatcaagaaaccttggaccatatgttgattggatgtgtttttgctcgagaattttggttcaaactgcttcttcaagtgaaccttcagcttcttgccccccaatctgaggatagtgccttccttgaatggtggagaacgttatgcactaaggtctctggaattgcaagggatgccctcaattctctagtcattctgggagtttggaccttatggaagcagcacaatggctgtgtatttgacaataagggctccagtattgctgatgctattagaagagttgggttggaggttgacctttgggagatggctcgtgcaaagaagttatctttgctcaccgcccccattccggggctccctgctagttagctagcattgtggtagttcttgttagttttttagtcatggatgggtttctgtatacctgttactggccgtcgtagggccccccagttgtttcttgtatctgtccctcttctttaatataatatcgcgcagttctcctgcgctttcaagaaaaaaaaacaagtgaatatcgcaaaacaaccaagtaattttatccaaggttgttgaccagttcatgtgaatagaaaaacacctctttaccaacacatcaacatatcatttgtcccaagcaagttggagtaggctagagttgaaacccaacaagaagtcaccaaaaagacagagagagaaaggggacgagaaaaaggttttgagagcactaaaagggaaaaggcctaatcacttctttccaagcacttctatccaaacacaactccattgagatattccattctttcaagtctcttttgattgcctccttccatgtcaagtttggtcatcctctacctctcttcacattattgtcccgtcttatgatgcctcgatgcacccggtgcctctggggtctccggtggacatgcccaaaccatctcaaccggtgttgaataagcttttcttcaatttgtgctactcctagccgatagcgtatgccatcattttttcactcggcccaatcttgtgtgcccacatatccaacgcaacatacgcatctctgcgacacttagttgttggatatgtcgtctcttagtaggctaacactcagccccatataacacagcaggcctaatcgtcgttctgtagaacttgcctttcaatttctgtggcactctcttgtcgcataggactcccgatgcttgacgtcatttcatccgccccgctttgatcctatggctaacatcttcatcaatatcaccatctctctgtagcatcgatcccaaataacggaaggtgtttttctttggtactacctggcttcccaagcttacatctccatcctcactaattgtagtaccaaagtcacatcttaaatactcggttttggtcctgctaattctaaatccttgactctagggtctgacgccataactctagctttctatttactccttcccggctttcatcttctagaactacatcgccagcgaaaaacatacaccaagggatatctccttgtatatcccttgtgacctcatctatcactaaggcaaatatataagggctcaaagctgaaccttgatgtagtcctatgttaatcgggaaaacatttttatcaccatcaattgttcggacgctagtcacaaccttgtcatacatgtccttgatgagcgaaacatactttgttgggactttatgcttattcaatgcccaccacataagattctaggtattttatcatagaccttttccaaatcgataaaaaccatatgcaagtcgttctgcttcttataccgctccatgacttgtcttattaagaaaattgcttccatggttgaccttccagacatgaatccaaattggttcatggtgatatgcgtcattcctctcaagcgatgctcaataactctctcccatagcttcatagtgtggctcatgagcttaatccctcgatagttggtacaactttgaatatctcccttgttcttgaagattggtactaatgtactactccactcatcgagcatcttgtttgattgaaaaatatggttgaacaacttggttagccaaacgatagcaatatcccaagacatttccacacctctattgggataccatctgggcccatcacattgccccctttcatcctctttaaatcttctctgacctctgattcttggatcctgcatacaaagcatctttttaaatcatcgaaggagtcatccaattgggtgtccatagtctcattctcaccattgaaaacattgtaaaaatacctctgtcacctctgtttgatgtcttgtcctttcaccaagagttgactcatctcatccttaatgcatttaacttggttgaggttcctcgtcttcctttgtacttagtcttcgataaagatcatcataggctcgaccctttgcctcacttacagctcgctctgcagtcttctttgccaccttatacttctctatattgaccgcactcgtgtcatcgaacaagctcctgtaatattcttttttctcctttattgccttttgaacgtcctcggtccaccaccaactatccttatgttcacctctgctccctttgttcactccaaacacctctgacgccaccttcatcaagttgccatcttcacccacatgttgtttgcattttcttcttcggaccaagcaccctccacaaaaactctttccctaaaaactttggatgtctcccctttgagtttcaaccacttcgtcctcacaattttggcttgtttatccctatgggtacgggtccgaaaacagaagtcaaccacaagattatattgggacacaacactctctctaggtatcaccttacaatccaaacatgcttgtttatcttctctccttgtgagaacgaagtcgatctggctcgaacgatggccactgctaaaagtgaccaaatgagaatctctctttctgaagaaagtgttggctatcactaggttgtaggctacaacaaagtccaaaatattctctccttgattcctattaccatacacgaaacctccatgagccaactcataacctatatttgttgaacctacataaccattgagatctcctcctatgaaaagcttcagataaattttatgaatatgttattttgatttagatttattccagccactaatactattaaagtaatatgcaaaagaagttagaacagttggtctaaaaaaattcccgaccaagttttacttcaaataaccatgcaaatttttagtattaggagagattttaagattttatttttagtctgagatatgctaatagccacctaggcaagaagtcacattttttgtccttttaattgtggctcaaattctcagtttagatatcatctttggagtcaaaacataacgttttccaccattttttaagagatcacaagtgtattcataatttcatatctcatgtaaagtcttgagaacttatcactgatggctaatttttcatactttgtatctgttgcatttcttgtggttgatacttcaaactcctatggagtagatatgagcttcagaaacacctgtttttattatgtgtagactaactttccccaaattgcaatatgttaccatctctaagagcctaaccaaatgatttctatgctcttagtttaaactttacataattgcttgatcttacacttttgctatctatattttttcttaataaaggagcaaagtgaggttcgcttttctgctataag

SEQ ID NO: 1016 - DNA, 6507 bp, Zea mays
  Intron number 1 from transcript GRMZM2G134563_T02 (locus G RMZM2G134563) derived from phytozome v7.0 (chr-ID 4; pos 1 16126657 to 116133163)
gtctgcttcaatccagctgcgtcatctaatttgtttttccctacagtccattccctaatatccaatcccaactgcttgtatttgtagtatctattcaattggattgaaaattcaaacaagaatcacgaatctaaaattatagattgttcaaaatgaatgagaccaatactttggtatctcatttcccctgcgctgctgccacacaacacaactgaataaaatattacttttttatacaatttaatgttcttactttattttactcttaaacatgtaactcaagcatcatatcgttttgaaagtttccctagaagcttcattttacctctctatatgtacaacgtatatggctagtttttgccaatggtaagtggtcctaattctgaacaattcctgggttcactaaccgccgttgccatgcatgccattctgtgtagccagtcttccagtctagtcaatgacatacgtgaactacccaagcaaggatagggcattgttgcctcagaacatcaccagctcttccctagctggtgctgtcagcctgtcactgactaagcagaagggagatgcgtgctaccttgtgccgtaatggaggaccacaaccaatgcacagacacatagggcctgtcactagcaggccgtcatgttgattttgaacagttttaactaaagtgattctcatagaatcaggctgaaaagctaggcgttcggtagtctgcagcagcttctgctgaccagaagctgaaaaaagctaaaacaaacatggccataggcagctcttcagtggcagaccatgacttctgtgctaggcattaaaaaactgtgacacaaagagttcatgaaagtattgctaaattaacaatataaagtcaatatacaagttttttcatacaaaatactagttcttttcgcaaaaaaaaaggaaactactacaaatagcgatgaaaaaacattgaatatctagtacgattttagtctataatcttggttacatattttctaaaattctctacgttagacatttaaaaaaaccatttttcctgtgaaaaaataaaacaagagctatcattcattggcattaaccattcaccactaaatctaccatccaataatttgtttgaaataaaactagctacttcttgttcctttctgtgatgatcacatcctgcacagtctattatcttgcatggttgtgtggctgcagcttttgtccatggctcagacaaggctgagctgccttggctaccattggatggacgttgcatgttatttatgctacaaaagagaagaatatgggagaatagaagcatgttttgagatagtgtccaacatgctgtatactagtacatatgtctaacacatagattatatatttgtttttgtgccaaaagttttgggcgttcaactgaatgccttgaatctgtgtaggtccacccctggcagccctgcacagaccccatcacattggcaacgtctccggaagaccgaaacgaaccacacacatgcatgaagtgcctccatccctaataaatacctatgtggcactatctgggcatcttacctgtctcctttccttctagtagacacgcatgtgaatcatgattccaaacgtttatctctgactaacactaagtctaatgtagattatacatatgattttggtataataatattcatattacactttcatataatgtcaatttcatgctcatgccaaatctaatagatgaaatattcatggtttcaaaggcaaggcgtcgcctaggcgtccaggcggccaaagaagtctaggcgtccccgtcgcctagccaagagtcagcaagagaggcaagaggggaggggaagaagcctagcagagactttggggagcgggatcggcggcgcagagcttgggggagtgccgagctcgggggagcagcagtgctgagactcgggggagcgctgagcttgggggagcaggagcagcgatgttgtgacaggagtggcaatggtgagatgggggcaaccctaaccatcagggaggatatatgggctgcctggtgggctgggccatctcttctaccccttccttctcttttttttttctttttctttttcttcctcatctatgctgctgttctgccgtttctttaattggtaaggcgccacattgctcgccttagtaagcgcctaggcgtccaggcggtgacccaacgccttgtctcgccttaccgctttaagaactatggaaatattaacggtcgaaatgtgaatacgagcttttgtttgtaaagaagctgccaatagcatcaattagctcttcatcccttggtggtcatacctgaactgaaaggaggcgggacttgcttctttgagcgaaagcatccgaccatccattgattaatctgaaaaacctttagaggtagtaatcatgcccctgctctgcaactccaatccttagttcttggcgcagaaaaccttttgcaacttcaattgtggtcatctttcgccacagaggttttatagcctttttcttgctcgaatgtgccaattgactcacaaccagatggggaattttatcgaatggaacatggttcaggtctctgctctctaattaggaccttttttgcttggcaagaacaaagacagacattctgtcttgttttctattgcctgaagaacaaagacagacactctgataccagcaagtacttgaggctgtagtgatcagtcttgacttcgaaacggcggccccaaaggtagggcctccaatggcggattgcctggactaggctgatcagctcccgctcataggcggctagggcgcggtgacgaggcgccacgggccgactgaagaaggccacggggtggctgtcctggaccagcaccgccccgaagccatgggacgaagcgtcgcattcgacgacgaacgtcttggagaagtccggcatggcgagtaccggggccgacgtgaccgcctccttcagagcggcgaaggcagccgccgtctcgtccgaccacaggaatccgtccttcttgagcagggcggtcagcggcgcgacgattgtgccatagttgtgcacgaatttccggtagtacccgacaagaccgaggaaaccgcgaaccgcgcgggccgaccgcggctgctgccagtctcgcaccgcctgcaccttggcggggtccatggcgactccagccgccgagacgacatgtcccaggtacgcgacagaggaggccgtgaaagcgcacttagagcgcttgacgaagagctggtgctgctgaagcgtgccgaagacagcacgcaggtgacgaaggtggtctgcccatgtgcggctgtaaatcaaaatgtcgtcaaaaaataccagcacgaagcggcggaggaaggggcgcaggacatcgttcatcatggcctggaacgtggcgggagcgttgcacagcccgaacgccatgaccaggaactcgtagaggccgtcatgtgtgcggaacgccgtcttgtgcacgtcagtcggccgcatgcggacctggtggtacccagagcgcaagtcgagcttggtgaagaagcatgccccgtggagctcgtccagcagctcgtcgacgactgggatagggaacgcgtccttgatcgtgagcacgttaagcgcccggtagtcgacgcagaaacgccacgatccgtccggcttcttgacgaggaggaccggggacgagaacgcggagtcgctgcgacgcacgatgccttgtgcgatcattgctgcacattgtcgctccaactcatctttgtgggccgccgggtaacggtacggccggaccgctaccggcagtgtgcccgacttgagtacgatgctgtggtcacgcgcccgcggcggtggcagtcccgagggctcggcgaagaggccatcgaacgtggtcagcagctcctccagcaaggcttcgggcgccgtgatgctgtcgaggcgcggtgtgcgccgggcggccacgtcctcccagcagacggggcggccatggcgtgtgaaggccacggtgcgtgtggtgaagtcccacaccatcttgcctagcgtgaccatccactgggtgccgaggacgacgtcgtagccggccagtggcatcacatagaggtcgacgcaaaagtcctcgtcagcgatggtgatcggggcctgacggaaaacactcgggcaggcgatgcgctcgccattcgccacggtggccgtgaggcgtgggctggtctggacaacaagccccgtgcgtgacgctgcggcctcggcgatgaagttatgcgtggagccagtgtccagaagggcggtcagcgtcatggcgcccacttgcacgcgcacctgcatggagtcacaaatgggcataccagccacagcgcgaagggagaacaatggtgcggaggtgtcgacggcgtcagcctcctgggcagcgtcctccagctcgaagccgtcaatgtagaagacgcggcgacacacccgattgtgcccgcgggagtacggctcattacagttgtaacacaagccaagacgacgatgttccgcctgctcctccgtcgtaaggcgcttggcagccccagccgcgccgcgtggaggaggcgctgggagggccagctgctgtgctgggggaaccggtacgggaagcaccggaggcgcaccggccgctggtagcgctggccgcgtaggtagagcgggcagggccgcgcgcggggccgcccgaccgagtagggggctgagccggtctagctccaccagttccagcatcctggccaggctcatggttgcggccagggactccggcgcgtgaacgcggacctgatggctcggcggcagcagcccccctgtgtacagctgtacgcgctggctttcctgcagccggccagcacgcgaaagaagagcctggaagcggttggaatattcttccaccgatcccgtgcgtcgacactccgtcagctcgaacagcggcgccgatctcagcgctggtccgaaccgaaggttgaggagttccttgaagcgaccccagggcggcgtgccctcatcctcctggagttggaggaaccacagctgggccacgtcgtccatgttgtaagatgccatccataccttttcctccggcatggtgcgttgatgtcgaaagtacgactcacacttgttgatgaagatcagcgggtcggacttgccgtcatagcgcgggaactccatcctctggaacttcggcgggtgatccgtgcggggctgcccatcttggtggccgccgtagtcggtcgcggaggcgaccttctcctgcatgataaccatgtcggactgcatcttggacatgttggtggacagggtctggagcatctgcatgacgtcggccatggagggttgagcaccgtcacccatggtgatgaacctggacgtagcggtggacggggaggtgggggctggtggtggtggtgcggctgcagtgactgaagggttgggggtggtggttggggatcgccgacttcctgataccaggttgtcaagggcgtcgggcccgagggtaggaggaccgcggcttcgaaggtcgtagccgccgtccgtgttgccgaccgggttatgcccccaggaacggcggtcttcgtcaacgggttatgccccctgttgccgattagagagaggtaggagactgagataaaactttcttgtcctcttcattggtgcttacagggggtatataaggccataggccagggctactaaaggaagccactaatcactcttattcccttctaaatgtagcccggattattaaaggaaagccatcaatcactaatcactcttattcccttctaaatctagcccggactaataaaggaaagccatcaatcactaatcactcctattccttctgaatctagcccggactaataggaaggccatcaatcacttttattctttccagatctagccactaggcctggctgcctgctggatcaggcgtcctgcgcgctcagccgcgcgtgccctgtgacgccgtgtgtacgtatttctgtacatcacaagctcacacatctgcatatcccacattaactgcagttcagatcagggatactgaaattagtgattaaggtatatactccatccaatgtaggtcattttacgattctagctggtcaagcttctttaacttgacccatcattgcatgaaaagttacatagattggcaacatgtgcttgattttattagattcatcatggaaaatacttccagtacatataactttcattatttcaaataatatttttttacaaaagatgcaagtcaaagtatcaaattggagtcgatgttgctatcctaaatgacttacctttgggatcagagggggtgatctatacagttatcttcattatgtgtgtctgtgtgtgtcttgacaacatacaaactcagctttgtccctcctctgaaacatttgggatcagagggggtaatgtatacagttatcttcattatgtgtgtctgtgtgtggtttgacaacatacaaactcagctttgtctctcctctgaaacagctccacc

SEQ ID NO: 1017 - DNA, 9106 bp, Zea mays
  Intron number 1 from transcript GRMZM5G854328_T01 (locus G RMZM5G854328) derived from phytozome v7.0 (chr-ID 9; pos 1 52499304 to 152508409)
aaccgacacttgatacagtgtgaaagggaaataggcttacaccttttcctaaattgattttggtggttgaattgcccaacacaaataattggactaactagtttgctctagtctataagttctacaggtgccaaaggttcacaacaagccaataaaaagaccaaagatgggttcaaataaagagagccaaagacatcccaaatggcacccttgtctggcgcaccggactgtccggtgtgccaccggacagtgtccggtgcaccagggcactcgaagctgaacttgccacattcgggaaaatgggaggccactccgctataattcatcggactgtccggtgtcacaccgtactatccggtgtgccagcggagcaacgactacttcgtgcgcaacggtcgactgcaacgcatttaaagtgcgcctgcgcgcgtacaggactgagcacgcgcagttggcgcaccagacagtctacatgacctgtccggtgcaccaccggacagcccagaggccccacaagtcagagctccaacggtcaaaccccaacggttgactgacgtggctggcgcaccggatagtgtccggtgcgccatgcgacagcagacttccaacggccacattttggtggttgaggctataaataccccaaccaccccacattcaatggcatccaagttttccaccttcaacacattacaagagctatagcattcaattctagacacaaccaaagagatcaaatcctctcccaagtccgtaatcactccaaatcaaatagtgactagagagagcgacatttgtgttcttttgagctcttgcgcttggattgcttcttttctttctcattctttcttgtgatcaaactcaattgtaaccaaggcaagagacaccaattgtgtggtggtccttgcgagaactttgtgttccgtttgattgagaagagaagctcactcggtctaagtgactgtttgagagagggaaagggttgaaagagactcggtctttgtgaccacctcaacggggagtaggtttgaaagaaccgaacctcggtaaaacaaatcatcgtgtctcgatctttatttgctcacgatttgttttgcgccctctctctcggactcgtttatatttctaacggtaacccggcttgtagttgtgcttaagtttataaatttcagattcgccctattcaccccccctctaggcgactttcaattggtatcaaagcccggtgcttcattagagcctaaccgctcgaagtgatgtcgggagcatccgccaagagggagttcgggaccggcgagaagcctgctacaagccatgggaaggctctatccggggagtccgccaacaaggtgaagggatccccttcacacaacaagtcggggcagagcggtgacaagaagaagaagatgaggaaggtggtctactacgagaccgactcttcgtcgccatccacctccggctccgacacaccgtccgtaacttctaagcgccatgagcgcaagaagtttagtaagattcccctacgctatcctcgcattttcaaacgtactccattactttccgtcccattaggcaaaccacctatgtttgatggtgaagattataatatgtggagtgataaaatgaggcatcatctaacctcactccacactagcatttgagatgttgttgagattggagtacaggtaccatcaccgggggatgaagactatgattcgggcgaggtcacccaaatccggcactttatctctcaagccaccactatactcctcgcatctctaagtcgagaggagtataacaaggtgcaagggttaaagagcgccaaggaaatttgggacgtactcaagaccgcgcacgaaggagatgaggtgaccaaaatcaccaagcgggagacgatcgagggggagctcggtcggttccgactcaagcaaggcgaggaccctcaaaccatgtacaactgcttgaagaccttggtgaaccaagtgcacaacctcgggagcaccaaatgggatgacatgagatggtcaaggttattctaagatccctcgtttttcttaatcctacgcaagttcaattaattcgaggtaatcctagatatacactaatgtctcccgaggaggtaataggaaactttgtgagctttgagttgatgatcaaaggctcaaaaaaatcatcgagctagatggcccctccacgtccgaagcacaaccggtcgcattcaaggcaacagaggagaaaaaggaggagtctacatcaagtagacaacccatcgatgcatctaagctcgacaacgaggaaatgatgctcatcaacaagagcttccgccaaatcctcaagcaaatgagggggaaagattacaagccccgctccaagaaagtttgctacaagtgtggtaagcctggtcactttattgcaaaatgtccactatctagtgacagtgacagggataacgacaagaagggcaagaggagagaaaagaagaggtactacaacaagaagggctgcgatgaccatgtgtgtcgcgagtgggactccgacgagagctcctccgatgactcctccgacgacgagaacgccgccaacatcgccgtcaccaagggcctcctcttccccaaagtcgaccacaagtgcctcatggccaaggacggcaaaaggaagaaggtaaaatcaaaatcctccactaaatatgcaacctctagtgatgaggatatatgtagtgatgaggaggataatttacgtaccctttttgccaacctaaacatgcaacaaaaggaaaaattaaatgaattaattagtgctattcatgagaaggagaacctcttggactctcaagaggacttcttaattaaagaaaacaagaagcatgttaaggttaaaaatgcttacgctctagaagtagaaaaatgtgaaaaactatctagtgagataagcacttgccatgacattattgccaaccttagaaatgacaatgctagtttaattgctaaggttgattcaaatgtttgtgatatttcaattcacaatcttagagatgataatgttaatctacttgctaagattgaagaattgaatgtctctcttgctagccttagaaatgacaatgaaaaattaattgctaaggctaaagaattagatgtttgcaatgcttccatttccgatcttagagataagaatgatattttacgtgctaagattgctgaacttaattcttgcaaaccatctacatctaccattgagaatgtttccatttgcactagatgtagagacattaatgttgatgctattcatgatcacctagctttaattaagaaacaaaatgatcacatagctcaacttaatgcaaaaattaatgagcatgacttggaaaatgaaaattttaaatttgctagaagcatgctctatagtgggagacgccctggcatcaaggatggcattggcttccaaaagggggacaatgtcaaacttagtgcccctcctaaaagattgtctaactttgtaaagggcaaggctcccatgcctcaggataacgagtgttacattttgtaccctgccggttatcccgagagcaaaattaggagaattcactctaggaagtctcattctcgccctaatcatgcttttatgtataagggtgagacatctagctctaggaaatcaacctgtgctaaattgcctagaaagaaaactcctattgcatcaaatgattccaacattgcatttaagacttttgatgcatcctatgttttaactaacaaatccggcaaggtagttgccaagtatgttgggggcaagcacaaggggtcaaggacttgtgtttgggtacccaaagttcttgtatctaatgtcaaaggacccaaaaccgtttgggtacctaaaatcaagaactaaatttgttttgtaggtttatgcatccgagggctcaagttggatcatcgatagcgggtgcacaaaccatatgacaggggagaataagatgttctcctcctacgagaaaaaccaagatccccaacgagctatcacattcggggatggaaatcaaggtttggtcaaaggattgggtaaaattgctatatctcctgaccactccatttccaatgtttttcttgtagattctttagattacaacttgctttcattttcgcaattatgtaaaatgagttacaactgtcttttcacgaatgtaggtgtaactgtctttagaagaagtgatgattcaatagcatttaagggagtgttagagggtcagctatacttagtagattttgatagagctgaactcgacacttgcttaattgctaagacaaacatgggctggctctggcatcaccgactagcacatattgggatgaagaatcttcacaaacttctaaagggagaacacattttgggactaacaaatgttcattttgaaaaagacaggatttgtagcgcatgtcaggcagggaagcaagttggtgctcatcatccacacaagaacatcatgacgactgacaggccactcgagctcctacacatggacctattcgctccgatagcttacataagcatcggcgggagtaagtactgtctagttattgtggatgactattctcgcttcacttggatgttctttttgcaggaaaaatctcatacccaagaaaccctaaagggattcttgagacgggctcaaaatgagttcggcttaaggatcaaaaggatgagaagcgacaacggaacggagttcaagaactcacaaattgaaggaatcctcgaggaggagggcatcaagcatgagttctcttctccctacacgccacaacaaaatggtgtagtggagaggaagaatcgaactctattggacatggcaagaaccatgcttgatgagtacaagacttcggatcggttttgggccgaggcggtcaacaccgcctgctatgccatcaaccggttatatctacaccgaatcctcaagaagacatcttacgaactcctcaccggtaaaaagcccaatgtttcatattttagagtctttggtagcaaatgctttattcttgttaaaagaggtggaaaatccaaatttgctcctaaggctgtagaaggctttttactaggatatgattcaaacacaagggcatatagagtctttaacaagtcctctggactagctgaagtttcttgtgacattgtgtttgatgagactaacggctctcaagtagagcaagttgatcttgatgaactagatgatgaagaggctctgtgcgtcgcgctaaggaacatgtccattggggatgtgtgtcctaaggaatccgaagagccaccacatgcacaagatcagccatcttcctcaatgcaagcatctccaccaactcaagatgaggatgaggctcaaaatgatgaagaagtagatcaagaagttgagccacctcaagaggagagcagtgatcaagggggagatgcccatgaccaagatgaggaagaagaacaagctccaagaccgccacacccaagagtccaccaagcaatccaacgagatcaccccgtgaacaccgtcctcgtcgatattcaaaagggggtaactactcgatctcgtgttgctcatttttgtgaacattattcgtttgtttcctctattgagccacacagggtagaggaagcactacaagattcagattgggtggtggcgatgcaagaggagctcaacaacttcactaggaatgaggtatgacacttagtttcacgtcctaaccaaaatgttgtaggaaccaagtgggttttctgtaacaagcaagatgagcatggtgtggtgacaaggaacaaagctcgacttgtagccaaggggtattcacaagtcgaaggtttggatttcggtgaaacctatgcacccgtagctaggcaagacgctttatgggctcaagcaagccccaacagcatggtatgaatgcctaagagattttcttgtcactaatggcttcaaagtcggaaaggccgatcctactttatttactaaaactcttgacaatgatttgtttgtatgtcaaatttatgttgatgatattatattggggatctactaacgaatctacatgtgaggaatttagtagagtcatgacacagaaattcgagatgtcaatgatgggggagctgaagtactttttgggatttcaagtgaagcaactccaagagggcaccttcattagccaaacgaagtatattcaagacattctaaacaagtttgggatgaaggatgccaagcccatcaagacacccatgggaaccaatgggcatctcgacctcgacacgggaggtaaatccatagatcaaaaggtatatcggtcgatgataggatctttactctatttatgtgcttctcgaccggacattatgctttccgtatgcatgtgtgcaagattccaagccgaccctaaggaagctcaccttacggccgtaaaacgaatcttgagatatttagtttatactcctaagtttgggctttggtaccctcggggatccacatttgattaattggttatttggatgccgattgggcggggtgtacaattaatagaaagagcacatcggggacttgccagttcttgggaagatccttggtgtcttgggcttcaaagaagcaaaattccgtcgctctttctaccgccgaagccgagtatattgctgcaggccattgttgcgcgcaattgctttgtatgaggcaaacccttagggactatgttaacaaattaaccaaagttcctattctatgtgatattaagagtgcaatccgcatggcggataatcccgttgagcatagccgcactaaacacatagccattcggtgtcattttttaagggatcaccaacaaaagggggatatcgagattgcttatatcaacactaaagaacaattggccgatatctttaccaagccactagatgaacaaacctttatcaaatttaggcatgagctaaatattcttgattctaggaatttcttttgatgttttgcacacatagctcattattatacctttgatcatatctctttcatgtgctatgactaatgtgttttcaagtatatttcaaaccaagtcataggtgtattgaaagagaattggagtcttcggcgaagacaaaggcttccactccactccatcaattactcacccttcgccgtcgctccgagcaactctccaactttggtataatcttcactcatattttgtttgccaaaggaggataaagtagttaaaagggcttatatttcactcaagtatccatttttggcgattcatgccaaagggggagaaagtattagcccaaagcagaaggaccacaccaccgccaatttttcaaaattcgagttaagaaaaagttcttgaaataatgaatttttcaattgatatcttattgtattcaaagggggagaaagtagtattttcaaaattggtatcttaaaaccctcttgaacactaagaggaggattttattgaggggagttttgtttagtcaaagcaaaagcatttgaaacaggaggagaaaacttaaaaatcttgaaaatgcttctcaaaatcttagtcatttacctttgactgtttgcaaaagaactttgaaaagaatttacaaaagaatttgcaaaaacaaaacatgtggtgcaagcgtggtctaaaatgttaagaatataaagaaacaatccatgcataccttatgaaaatatttattggttcaattctaagcaacctctgcacttacattctgcaaactagttcaattatgcacttctatatttgctttggtttgtgttgacatcaatcaccaaaaagggggagattgaaagggaaataggcttacaccttttcctaaattgattttggtggttgaattgcccaacacaaataattggactaactagtttgctctagtctataagttctacaggtgccaaagtttcacaacaagccaataaaaagaccaaagatgggttcaaataaagagagctaaagacatcccaaatggcaccctggtttggcgcaccggactgtccggtgcaccagggcactcgaagctgaacttgccaccttcgggaaaatgggaggccgttccgctataattcatcggactgtccggtgaagcaccggactgtccggtgtgccagcgaagcaacggctacttcacgcgcaacggtcgactgcaacacatttaatgtgcgcctgcgcgcgcagaggacagagcacgcgcagttggcgcaccggacagtctacaggacctgtctggtgcaccaccggacagcccagaggccccacaagtcagagctccaacggtcgaaccccaacggctggctgacgtggctagcgcaccggactgtccggtgcgccatgcgacagcagacttccatcggccacattttggtggttgaggctataaataccccaaccaccccacattcaatggcatccaagttttccaccttcaacacattacaagagctatagcattcaattctagacacaaccaaagagatcaaatcctctcccaagtccgtattcactccaaataaaatagtgactagagagcgacctttgtgttcttttgaactcttgtgcttggattgcttcttttctttctcattctttcttgtgatcaaactcaattgtaaccaaggcaagagacaccaattgtgtggtggtccttacgggaactttgtgttccgtttgattgagaagagaagctcactcggtctaagtgaccgtttgagagaaggaaagggttgaaagagatccggtctttgtgaccacctcaacgggaagtaggtttgaaagaaccaaacctcggtaaaacaaatcatcgtgtctcgatctttatttgctcacgatttgttttgcaccctctctctcggactcgtttatatttctaacgctaacccggcttgtagttgtgcttaagtttataaatttcagattcgccctattcacccccctctaggcgactttcacagtgaaaaggatgaaagtaagtcttggccaaagctgctccctagctgttgctatggataaacttgtgtggttcctaatgcttggactatatttcctttatatagtgcagttatatttacctattgtgtgcctttacctat

SEQ ID NO: 1018 - DNA, 11903 bp, Zea mays
  Intron number 2 from transcript GRMZM5G866027_T01 (locus G RMZM5G866027) derived from phytozome v7.0 (chr-ID 9; pos 1 1921375 to 11933277 reverse strand)
tcaaaagagtcattcggcttctttgctggtccaaagtctcgtgagttgttcagcccgtgtctctagagtttggactagtctaatctgaccttttctgcatcatactcatacagccccttacttctatagacaggtctgtagtgatgcccggatattccaagaatacccgacttttttttttacaaattttagtttacatatacatttgatgtatataatttgtatttacactattatctgtttctggctataaatgtatatagttaaatactatctgtttctcaccggaaatcagcccacaggccaatagatccggcctttccgcctcgctcccaataaggtttacatcatatgaaatcgtgtttatagtctctaaatttattaaatgatgcaccaaggtagtcgatgtagtcttgaaatgaaactacagtacacctacaccatttaataagtttagagacgtctgatgcactacttaacaagttttaaattttataaatatatttttaaagtttatgagcctaagtgacattgattggtaagttcaaaggctacttttccgtttaatgtttttaatataggataattgtgtcagtgcccttgtttcaaagtataaatacatatttgtttttttttggactttgcatgtttaaccttgtttttctaaaacgaaattgttgtatgaccccactctgttaattgtacttaacggtgttaagtcttgataaaagaaagagtataattgttttgaaaaatagggacaaaaacacaaagttaaaaaaagacgcaaagctaccgttacaccctaaaatagggatattcgcacgattgtccttaatttatttgtttagatacggtgcactttttatatcgatttgattgaagtttgagaaatttgatatagaacaatgccaaactaagctatgtatatacgtagtttattagaatggagcgagagcgcaagaggatgagcattaaacatctctacggtcctattgcgacaacttgatcgattatatgttcacgttgtttttgaacgatttttatcaaaacgattctcataaaagtggattgaaaagttggatgtttgacagtctgtggcagcttatggcaaccaaaattagcaaaaaaaaaccgaaacactatgtctcgtgtgttcttttactcacataatatgtgcttttattgttaatttggtataaaaagttgtttattatagttgtaaaattttttaaaggaactctaaactgagtggaagtagcactcctgtcatcctgtgcatgagctaggtgccgccgtgccggtttctaatgttacttttttttccatccgctgttgatcgtgttttgctttctgtactcaatcaaactctctgttgggttgtatggtgcttcggagtttttttttttattcgctgaagcctctgctcggtgacagcaaagggccctctacctcctcgtgttcttttttatacccattaattttgtacttgtcctatatattagatgtctgaattttattattattattattatagcgcaagtaaccatgcacaggtgacaggtgaggcaaatagaaaacgtcgaagcaaccagcggcagctgcgctatacctatacatgttggagacggatgtgcgtctttaaattagcaatctccctttaattgtacaagttgtcccttgcgagttgttgtcaaatattcagaaaactaaggtgtagcaactcccttattttatcggcgtgctgtgtcacgagttctggtatcgcttgtgcaaggattctcttgattggcatcttctattctgctactggaattgcgagaagacacgagttgcatgcgctggctgggcagaggagggcaggccagggctccttccaagctggtatgcatagtatttggcatagtttttttttctaaagagttgttctaaaaatctagattcttagctgtcacaagaatctggatatcacgaagcttataggaagataaagaagtttgtacagatttctttcgttgcgacagcctcaatagattatgcatttacgttgatttagatgatttttatggaaataaatctcatagaaatggactaagaagcaaaaggtttggtggccaaaagccgattctcatggctagaagccgaaacataccggccctatatcatctccaccaactagtgccacttgccaggacgacgctcttgagttgaggttgagggggctagccacatttgccagacttttctctcaccctctctgtttctactcactggatatttagatcccttcattttaaagaaattagaattcactcaataaaataacttatttagtttagaatttgacattccatcactttccaaagttcagatataagtctatctcaaatttataggagggagaatgagaaataattttatacattagtaaaatttatttctactatgtaacttacatgacacttttcgtcacactcctctaatatcttgttaataatagtatacaaatatattttgcataaaactaaattagcttaattgatagatacctaaattattatttaatttattattagaatagaattcaattccaataatccaaacgacccgggtaaaagaacaggcgaacatggacatcacaagcctgacactcctacccggtgcaagtgcaacgcacgtttcactcctccgcgtctcacatgcgcctaccgcctaccatgatatattcccacgtgccgatagtcgatctctcaagtatcaggaaacaaaagagaacatcggcatgccaatcgccagcaccaccacctttgccgccggggctaagaaaggcaggtcggatttagcgagagagaaaggcatggttcagatttcaggagcaacatcaagagagagacacggaactaattaaagttggttccattcgcatttccagattcgctctatgcaaatcatatatccggataaaggaatccaagaacctatcaagcagcagctggccagctgcggcagcagtattatcgtcgtcgtcgtcgtcgtcgtcgtcgtctgttcaatcatcatcgctcaattatgcggcaagaatatcacagagagctgctagcagcctagcgcaattgccagttcatgtgacagctctgctctgctacatggagattggagatatgtataaaaaaaggagaagtttaagggggtgtttggtttgcccctactaaaatttagctcctatcacatcgaatgtttgaacctccgttcggggtattaaatgtagtcggattataaaactaatttctcagctgaagattaaaaagtgagacgaatctagtacagttggttgggtctatatttcatactcctatttgaaagtcaaacgcttgatgtgactcggactaaactttagtccacagaaccaaacaccccctaagtttctaagcaaacctttttcgaacaatgaaaatcggtagcaagtggacctctctctgtacttgacatatgatatgatcttttacaaaatcatttgtacacaccttttttttttctctttctcgttatgctatcatcgctggaagtaaaaaagaaaagagcatcaaacaacaggaaggagaaagaaaccttaaatcgcagcagcgaggagcgggttgaggacgaccgtggtgatgaattgatgatggagaattggagatggacacagcactcaaaattggtaggagaccttaactgcagcagaagcaaccatggatggatgcggacgtcgatgatggaggatagaacccgaaattggccagcaaattcccttgatacatcagggatcagatccgtgtattgtatccaagggaacgccggattgattggagtcccacactgcctgcagccaagggagggaggccaaactgagacgagatccgtactttggtcccaactcccaacccgccgaaatggtggtgtggtcatgacgggggaggagcagcgaggggctgcgggtgcgggccggcgacgaaggggtgctgcagcagctgcgcggccgtgaggcgcttggccgggttcttctgcaggcagcaggcgatgaaccccctgaactcgcgcgaggcggtgggcggtggctcgggcgggtcgttgtagcagatggcgcacatgagcgcggcccagtcgccctgcctgccgaggttctccccgaaggggaacctgcccaagtagaactcgaggatgctgaggccgaagctccagatgtcgccggcgtagccgtcgtagctgccgtcgttgaggtcggtgttgatccgctcggggctcatgtaggcgatggtgccgacggaggagttgcaggggtccatggtctggttgaggatgcggccgacgccgaagtcggcgatcttgacgcggcgcgccgagtcgatgaggaggttggagggcttgatgtcgcggtgcacgatgtggcggcggtggaggtacgcgatcccggacaggacctggcgcgcgacgtcggcgaggaacggctcggcggcgatgcggcggccgtcgagcgacccgccgtccatgtactccagcaggatctggagctccccgccgcgctcgtacatgccgtggcaccgcaccacggccgggtgctcggcggtgcggaggatggcgatctcgcgcgcgatctgccgccgcaccgcgtcgtcgtggttcccgtacagcaccttgagcgcgtaggggcgccccgtgccgcggtgccgcaccatccacaccgtcccgcccgcgccgctgccgacgcggcgcacgcgctccagctccgcgagcgggggcggctgctgctgctgctgcgccgcgggggcgggcgcggtgacgcccggcggggtgggccccccggcggaggcggcggctggcgggagagggagcgggacggcgagggaggtggcgacctcgcgctggggcatggggagggtgagatccgggcggcggcgcgcgcggcccggcgtgccgggctgctgggtcgggaggccgcccgggcgcatggcgtggtgcgtgggtcgctctgggcggggcttggggtggggaggagttcgttaggccgggtgtggtagtagtgatggcgtctgcgtgactccgtctggattcttctcctccccactgccgctcggggtttgtcgtgcggtgcccgtttattggagaacagtgcctgatcgctcatcaggttggagaacgggacgggacaccgaacgcggaggccaccgggaagcacaagcaatatcgagttcctgttcctcacgaggcgacgacctcgcctgacggtgacggcaaccccagcagctggaggacgagtggagatgcgacgcgatgcctcgttggagacgcaccgtggcgtgctgaccttcaccgtctgctgctgccgcgccgtaccgtgattaatgaagcatgctacgaatgattttgggggcactgtccgtccgactgttccccatgatacagttttggtaaataagacccgtacatgtagtacctctttcccgttcgtacacggtcctcctacgtgccttcctgacttcccaaggatttggtatccacaaaaattgtaccacgctagcgacacacgatttattttttgttattaataaaggcgtgctcgatatcaaggctgattattatctagctaatttttttaaactccaatcagctctaatgcatccacagaagagctaatagacgaactgattttacagctaaagagtcttcaacaaattattattcaaccagtttgtcaactatacattaattagcaacgcgtaacaattaagtagagaaacgtggataatcatgtcatcaccaagcaacaagcccccaatacacggcgcgcgcgtgttgattaaaacggtaaaaatctcaggttcaaatcatcctagttcagggagaatcttgcaacgcgcacctgcaacccaagcccgctatcacctcacgtgctcgaaattcgaacgatcagctaagcagaaaggttggacgacgcgacgtgtcaacacatgaagtctttggtgatctacctgtgatcattgactataaggcacaaaactctaccgaaagaagctgtaaaggtcatcgctgcacaccttccagaccacgtgcgttaaaagagttatacgcgatcacgcacctgtgtccagaaagatggcaaagatcaatgaactgaagaacctttcgacctcaccttccagtttctttacacggggataatgggggatgtcttcagaccaggggtggcagggtgagtgctagcaagataaacatgaacctgaccatgcggtaccagccagtggcgaccctgcgacattcgtcgctcttcggctgcaaactacagaacttcaacgaggatgatacaaatacactgtacttggttattccaatgatgacgcaaagccctaagggcatgtttgggttaagaggaatgaagagcagatgcaacagctttggctccggattttctgggacagatctaagggcttttttaaacacaggaattttacagaaatagcatagaaattttacagaaattagttcaaaaacacagaaaaaaaagaaagattcaggaaataatccttcaatacaaaagagccctaaggttaatcttagtaagagttttatatgagtttcatttacattaaataggttgctatgtaggtgtttctttacatgtaagcgaatttaagaagagaatctaaggatggtaatggatcacgattcaaatatttcttcacaataaagtaagtctcttattaaaatttagttcaaaaataaatatgattgtaaaatttagagcacggttaacaactctctgaaccgtgaatatccgtgtattgtagaatgaatttttacataatgaatagatatttcatcctagtttcatttcattatgtatgatatgacagcttcgagaagaccataaaactatctactaaagctggtctaacaagcaggcaaattcttttaaaaagagcattgcagatacttgtaataaaccttacattaattgacgtaataaatttcctcaccccacggcaacatgagtcgacgacgtcggaacagataaagaccaattcgccggtgtgccctaggtgcgagttgttacctgtcaccgagacggcgagacacgaaacacgagttcagaggctgcaatgctgcatgccctgggcttggggctaacgttaacagacatggactacgattgtttcattttaccaatccgtggattgctccaagcaacgtccacaaaagagggtcgcttaaatagtactaccagtttaacaggtatcagatttttccagacctatgaaacctgatatgacatgagtagtaatagagcaagaactgttgcagataacacaacttatatcgacaatgcagcagatgcctgctcagaagtgtcgtcctgtaagaaccacatgaaatgattattagaaccacatgataagggtgactcttcaaatgttattgcagtggaagcaaatgcaggaaactgaacattcaaatgacgatcaggtaaagctatatgctgaaccaaccagtattaggacatgtttgaatgcactagagctaatagttagctgctaaaattagaataaacatccaaacagtctaactaagggccctgttccaatctcgcaagataaactttagcagcttttttttagctacttttagtcatttgtaatctaaacaggagagctaatggtggtaattgaagctaaactttagcacttcaattcatatagctaaagtttagcaggaagctaaagtttatcccgtgagattgaaacggggcctaatagttcaactattagctatttttagcaaattagctaatagttagctagatatttgttacctagctaatttcactaccaatttttagccaactaactattagctctagtgcattcaagcacccccttagttaactaaaaggggttgcagctttgtacattgatatatacattacaagtgaagacttatttccaagaatattgtatgcgtgttaagtagcttatatttcatttcagatgtgcaaagtgcaaacatgcagtttaggccccgtttcaatctcacgggataaactttagcttcctgctaaactttagctatgtgaattgaagtgctaaagtttagttttaattaccaccattagctctcctgtttagattacaaatggctaaaagtagctaaaaaaaagctgctaaagtttatctcgcaagattggaacagggccttaatcaagaaatcagtttgtgtaggtgcaagtatggggacatgatagaactaaatagcctagaaaacaaaaggaagcttactaaaagctccaagcaaaataacaagtgctagtcatagtgtgtcccatactaatgcaaaaataaagtatcagatgaagggccactatgtagatggatacttttgccttgggtgcatacaccagaataaaatctagcataatgtctcatttgggcatgcaagcacccaagattaattggaagtaacaaagcaatattgagaaataagatgtgcagaacactagtggctgttgtaaatccaacaggtcagtataaatgatatgcgcttcaacacaacaaaataaaaggtgaatactgaatagtacatatgaaaaagttaaaaggtgattataaacctgacacagttctctggattacttactgtgctattgtggccttcactgttatctcaatcatagcttgggccatatgtggctacaggtggcccatatgagtatctccattgatcacatgctgagcatttgtcaagtttagtgctgttctctagagtacaaaatttacaagaccaagttgtgtacttcgcctttgcaattttaggttttgttgtaccacaaacttcacagattggtgccagaggctgcataggttcaaatttcgcagtgtgttagagaaaagcatgataataaccttaagtaaaatgtgtagtaggaaaaaaactatggaagaagtcaagactatatgtaagactaaaccacaagtatacaacaacagcaacaacaacaaagccctttatcccaagcaagttggggcaggctagagttaaaaccccaatagagtccacaagtatattccaaaaaaatgagaaaagtatagttaagcaagcaaatagcctacccaaacgtgcttgggacaaaaaggctttgttgttgttgttgttgtatagttaagcaagcaaatgtgactacaatgtaatgttttttctgggacaaaagaaacttccaacagcttgcaaggatggaactctgttggtgattttggtagcttatattgaaatttggcttgtgtatagtcaaattaaatagaggtgatgaccactgaccagtacactagtctcctagttagagcatctccaagagctccccagaaaatgactcctaaaaatcagttataaggggcatataaaaaattattggggtagaatttaaccatctctgcaactccaacagttcccttaaaagtggatataaatattttaaactaggtctggtcagtcttggacccacgttgatatgttctatggcgtattttttcttccgcggctttgaagtttgctcaacgaccaaaattgcgccgccatcaaagttcgctgatggtaggcgggcaggcatggtcggtgagggaggaccaacggtgaggccaagtgacaacagagggctggccgacgatgtaggtctagtagagggtcgtgcgatggtagatgccggatagcgggggggcactgccagcagcggacggcgaggttgtgtgggtggcagcatattgtgtttctgggaagcccaaaaaattcctcttttgtagctacaaatcagggagttttaagggctatgaaaaagttgggagcactatagggaacctgttggagacacgtttttgtatttttccaaaaaaaaaccttgatttaggggagattttggggtagttcttggagatgctctaagtcatgaaacctgcagatagaaactctctccatatatcagaaaaggcaggtttcccaaaactaaagaggcatacagttatcatgcagttcaatactaggccatgtatgttgctattatgaatggagttatacattacaggaaatgccaaacattttgatagttcaatctaccccttgacttcgattatccatgatgtgacttgcaaattactataagctcaagaaaaaaaaatgagaaaatataggaggaatttgcagtaattacaagaaaggtactaaaaactacatgttaggtgcttgtttggcaggggcagtaatgttaattccccctttctggcttcattcaagatctggagctaacctgccagacaaacacccacacggacagagtaaatctacagatagagttgtggagctgtggaacagtaaaacagagctgaaactgaactcttgagctctgctaaacaggccctagagctgtacatccataccctcaccaacagagcttgctcagaacttatcaacaaggaccacaataaatacacatctaaagctcaaacatgcatactctaatataaacagaacatttaactaagatgctacagtgttatcgtgttcaacatatgcatacgtgtaaacgaaatggatcaattccaaaggtcatttaaatggatcagaatgaaaaatatccatttgtcctactataacatataagaggtttctcctataaattttatatagagtaaaaaatgaaccctaatacatgaataaactcacagttttgtagtgaaatggattttatttcggcactataaaacttgcctggttcagaagtgtgcaagcaccacattcccactttgaactatcaagtgcatcacttgttgtcctatcatctcgtgctgctatgtgaattctagaagaagtgctgggctgtgcagaagtgttggagcagctacccttgtctttttcatcccttgtcaaatttggcgactcttgaagaataataacatcatccgaatcatcaatagcagattgatcatgtgatccacaccacaaatcatcatacattcttctttcagccgccattgcagcagcttgtactggactaagtgcactcataatttcactgtttccacccaactttcttggtccagaaggcaatagagctccattccttgcccgcttctgtgcagcagctaacgtagcttgccgcagagatggtggtggtggatgtacagtaaatccaccaactcgccttcccgtgccatcaaacccttgtcctgttccagtgataccctttgaaacaagttcttcgcattcctggcagatttatcataaacaacagaaggatcattattaaaaatatggcaccacatgagcaaaaccgaaattgcattcaagagcacaaaactgaaacaaagaaaactacaaatgatagaactagatgtacttggtcgcatacaaggtacaaagacacaacaaagcttactcaagtacagtcaaagtaaattacagattcactacctcaatcttacatgttaccaaatacaaacttagttaagatcaatttagtgattgaaactgtgatcctgaaacatatcagttgtgtttgtttttgtaaggatttcagcacaagtaaaactccattccaaagaccttgtcaattgccacaactttcttacagatatagtccagtgtcctcactacatcttcattctgatttggattccctcattttgcgttattttttggcaaacacaggtaaaggtcttctccccactgcccactccactcccaacatctccagaatgtacaaaccattattaatagagttgtcagttcacgatagatgtggagtaataatcatatatattgatagagacaaagttgttcccatttaattaagtttggatgttgcacagagaaaaaaaaaaacaagt

SEQ ID NO: 1019 - DNA, 483 bp, Zea mays
  Intron number 5 from transcript GRMZM2G398288_T01 (locus G RMZM2G398288) derived from phytozome v7.0 (chr-ID 9; pos 1 31376466 to 131376948 reverse strand)
cttttctggtacgttcgtcccctatatatacctttatcgttgtttgaacctctggtctttgtagatcccttttttgtgtgtgtacttaagcattcaaattttagaattttgcggttacaaagtataatgctgttttcctttgctactttagaagacagttggtgatggttgattgatgatgtgaattgatctttatgtgcatgcccatgcccatgcccatgtatgattaattgtagagaattgatttgctcctagttatattcatatgtggtatctcatgaatcttgatatgttgaatgtttgacatgtattttgttgattcaatgataaacatgtagggctttccatctttcagtagttgttccctttgagatccatcagagtttactagtaaaatcacatatatcttgattttctgaaagtttggtttatttcctcatctgtgtaggtatatcctatatacggcttattctgcaactctgg

SEQ ID NO: 1020 - DNA, 20325 bp, Zea mays
  Intron number 4 from transcript GRMZM2G008663_T01 (locus G RMZM2G008663) derived from phytozome v7.0 (chr-ID 1; pos 2 19726240 to 219746564)
aaaggtatatcctcatatgatatcacaatgatttagcatttgcacttcaggaattatggtactccaattaggctgctctcacaatattattattacttatgagtatgaagggtttggctgctgctcctgttagttgttatcctcgctattttactcttttcactatttcttagaagaagcctctccgcatttgcgggcgaagacttgccccaatttatcccttgcccagaccccactcatgtcggagcctctggcttcgggtctgcccttaactaatggtaaatgataaaacataacttcttttctgttgtgctttgaccctgaattatattattaatatgattgacaacctggttatgcaatagtaaactgtattttgagttagtcaatgcataactgacattaaactatcatctcctcctgatatgtggatacaatggcaaatagctaacctctagttactatttacaaaagaatacactatgatgttctagaaatctaataattgtacttcaactagaatgaaatattttgtagaccatagcaaagcgcaaaccttattgaaagagaatgagattgcatggaattagtaggttgattgattgagatacctagtgtacatatatataggggtgaggaggtcttgtggtttatagaaacaacaacaatcagatctcaattctctctaaccaaatatacacagggctggtcggtagttaatgcctggcgtaggactatagatgtccaaatgggtgggccgtgccggcccggctgagcacggcaaggcccgacacggattgggaccgtgcccgcccgactcggattagctagcgggccatgccatgccggcccacgggccccaagcgaggcccaggcatggcccgctaggttaataaccgtgccgggccgacccacggcccgacgggcccataacagtatatgacgtttaaatgataaaatatcctaaaaatatgcatatttgagggtttaaaccatatttattagctctaaatatttatttacacccatataactaacaaaaaaacacatgtttcttgcattttatactctatattcaagtataacatatgtatttatatgaaaaaatagaaccgggccgtgccgggcctagcccgtcgtgccacacctccggcccaggccggcacgggcccggttcacaacgtgtcgtgccaggtttgggccgggccaaacccgtgccgggtttcgggccgcccggcaagcccgacccgtttggacatgtatacataggacccacacatgcaagccatatttggctatctaacatgcccccacagttgaagcatcggtagaacagacgtttagactggaccaaacttctctgaagactgacaaaggcatcatcttggtaaagatgtcggtgaactaagatatcatagggacatagagggcacgaacatcatcaagtgcaaggcgctccagaacaaagtgtagataaatctctatgtgcttggcgcggtggacatcatcaagtgtaacgcgctcccggacaaagtgtagatcaatctctacatggtgaagatgtcggtgaactgagatgtcatgtggacatggaggacacgaacagagcccacagattgtggcccgtgatgcgagcagaacggtggcccactgaccaagcgcaggtacggggtggggagtcgagacaactataatgtgactaagagatgcactagaggtggttaatctagggcgtcgggtgacgcacgtggctgtgtgatggtgccgtaagccgcacatggccttacggtagatgcatcaaacacaatgatggtgcaaaggggaccaacacaagattagtgaaatcctccaggaaatcaaaggacactcgtctaggagaaggatcctcagaaaagggaaaggactcttcaaagatcacacgacgagagatgtgagacgatctgcgtaaggatgaaggcaaaggtagcccttgtggtggggggagttgccaagaaagacacaagacagagaggggcaagttttgagcagcggtggcagtaaggttgtgataacacttgcaacaaaaaacacatagatgctcatacaatggctgagtccccaaaagggagagatgtgagtaagagtcgcaacccaaaacgtgggaggaacactagcttggaagaggagggagtgaacaacattatttgtacaatggataatgcgttcaacttgactgttctgaggagagttgtaggggtaggacatgcgccagtgtatgccgtgggagaggaagaacatgcgagcgctggggttatcaaactcgcgggttgtcacattgaacccccttgatggtgacaccgaaccaggtacaaacataggcaaaaaagttagaaagagtggagaaagtgtcatacttaagtcgtagcggaaacacctaaaggtaatgcgagcagtcatcaaggaccaaataatacttgtgatcatagacactagtaatgtgtgaggtccaaagatcacaatgtattaacttgaaaattatgagtggcatgtgatgatggcacatgaaagtgaagttgtgtatgatgaccgagccaacatgcatgacaaagagtgtcactagcacttttattacaaggaagacaaacattgtgctagcttggagaggactgcaggatcatggtgaccgagacgctgatgccaaacgaaggaggtggtggcaacatggaaggtggaggccgcaagttacaacgagtaaaggggactagagctgtcacacctgatgatctctctctgagagggaagaacgttcacataacaaccaaaagggttaaactctaaaaactcgacctgcggggggtaagacaaccctaagtattgtattaagaagaagaccttctcacacaggtcgagaaaacccctgaacccctgccccacccatacatagcggcgtcgaagcccatgtgaggacgaccacgatcgggactgaggcttagacctgtgctttggcgtgggacagaccaggggattttttaagcacatcctgaaattcgctcccacggggagccgaacccaggacctgaggagtgctactcagaccacctaaccaactcggctagaggccctttcgcaaaagggtcaaattctagaacggttattgctggaagtgaagtggctgacagaaatgaggttttaataaggttcgggggaaatgagaacattattaaaatgaaggctctgaggtaaattagcgacgccgatggtggtaacgggaagtaaatgtctgttaccaacaataatgtgagggggaaaaagaagtgagggtgagtataccagcgtcgactgtcatatgaaggtggcactgaaatcaaaataccacccattttatcgtggtctagaaattggcagcaagcctatgctgatcctaaccgggcaacccatagctactgaggaggcacacctcactggtggtccatgtccttggggccgagccaagagagcatgcgactgcggggctggctcatgcgccatccggatccgtggtctaggccacatctaaatggacttggaccacacttgccaccatgcttgttgcgcttggcatcatggcctttagagtccacaatcgcttactgttggggtttctaggtaggcggtgtagcaggggcagaaatgatagttggggagggtgcgagtccattggggcctgtggttgtggtgagcgccacggtgtgagctatcttcgtcatagccatctcctcgggctgtaggtcgtgcctcgtagaaatgtagggagggggttggtcctccgaagatgaaaactgagggcagtgaagtgctcgttgaagccacgaatgatgctggggatgagcgtgcattcagtgatgggcttgctgggctcgctgagcttgcagaggtcctatgtcatgcacttggagcgtcggtagtactcggagaccgtgatgtaaccttgggaggagcaaaattcttggttggcgaagagcacacatgtcatgcggttcccaaggaattatgaattgatggcgagctaggtggcgtgggtaccagcgccatgctcggagatagcgtcgccaaggtcattggaggtgctgtcggtgagccacgttcacatgacaaagtccatgcacgtccaattgggagattggggcgcgactgtggcagagagaacgtgctgctgcagggaaaacttgtcgacaatgaggaggaagaaatcctgccatctcgcaaggaaggcggagttgaggccgagggtgaggggcatgaggacacatatattttgcacgacaacttcctatgcatgtagattgaggagtgctgtcgcctcgtggtgaaaaagggccttgaggagaggggggtcgctggcgtgagtgccagtgttggtgacgatgttgtcgatggcatcatcatcgtcctgtttgggctcgactgtcgtgtgctcacgagtagcgaggttgagggtggcccgaaggcacgcgtcagccgcattgcgcttttgctgggcaagccttgctctcggcttcttgggcgttgtgacaaccctcccaagttaccaagcccatatgcaccaatccttgccattaactgcctcagatggctgtgcacgtgtaccgggtaacttaacaaggctatcgagttcatcaactcgaactcatcatcccaaggatctcccacataacatgtacattacagcaattacatttgatacacacattggagatagagcggaagactttacaaaatagattttacatttccatagctcaagttttacatgatagaaagagttgtaattatttcaagtcctgatagtacacaaagtgcataacttattacaacacttgggaaaggtgaagcctttccataaaaaatacacctaagcattaaaaccttcaaggcctccacaagaagcgactatcaagagctacagatagcaagaacccttcctgcaacaacatagggaataaaaccatgagtatgcaattactcagcaagacttacccgactaaaggaaaaaactctcaagggtatgctggatttgggactcaaggtaaagcttatcaattatcgaagacctttttggcagaaaagcttactactagttgatccctaagccaagttttatttcacaagttaggtatttacctaaatctagatttttcctaatctagttcaagcacttggcctatactagatgcattttatccatactcatatttcacttgctaactacgatgatggtcatcgggatgaatctccataaccgaggagcaatgacgattcgaaccgattataaccagctggggatctctaaccacacgacatatgtagcacttaacccttgcatatgccaaccgttcccacggagtcgtccactacataaacaggtccgcgccatccgagagcacattaccctaccaggcgtgctactatgccaggagggtacatgctactctcgccatctctccacttccagtgcgcgattgtctcttcacgtatgtaatagccgggttctagcttaccctgtcccataccagggtatgtggctagttgcaaagtctcaaccacaacaggccagtcagcggtacagtccttaatcgacacagacggacgaccttgtctgctcagcgtctggtcttgatttattcaaaccattttcccatttttggtactcgacaggggtactcttttcagatgatgaacccatccggagccctgatgaactcatcatcataagttttctttgacttttgaatcaaaaagcccataaccaatgttacacattattctttttgaaaaacaaacgatttttgagtttctaagcagtaataattctttttataaaacagggattcaggaatttccaaggaatggtaatgcatcaattgtttatcacacaactcctatcacctaatgcatcatataatgtgataaaacatttaaaacacaaggaaggggcaaatgcaccggggcttgccttattacaggaggagatctgagatctatcacgataatccaccactggatcagcagaactggagcaggctccttcacaaatcacttcttcttggtactctacatgaaattccatgattatgaatggctgtgcatatgctactagcaaggaaggtattacgaagcattacaaaattataattacaagctatcaccacaagccataactaccagggagcttcttatccttagaactcatctaaccatccaaaacttgctaagcaactccatttttttactaagtcattaggtgctttaatcacccaacgataaaactctttttcctttttgaccaacaactagtttgccaagcaaatcttgtccaaacagttccaaactttacccaagggttcatatgctcaagataagcttacacatattttcctataatttttagtgctctatttttattattaaaattcacataagctcatttaaattactttttattcacctaaaaatatctagctgctacaaaaatctctaaaatatttttaccagaaagtgcttgattttatacacctaacaaaatttgtcctgaaattttatcattttctatgatttctggcttaatttccaatctcagacaaaagaaaaggcaaaatactgaacagttctgggccccaaaccagcccagacggcccgtgcaacaggacaagttggctcatggccggcagcccgcgccctgcgctgactcttttgtgcaaaagccctcgcaactttgcctaatcaacccgagaccaaatcactatttgcgtgggtcactgacagcaacacataagccctttggtttttcttctttcacagaaactcggccacgactccgccgcggggagctccggcgagcccatgctggattggccacggcggccgacatagtctatggcgacggcatcagcacacccatgaaccgaagcaaactcagtcacgtgctcaacccaaccgcgaagattctagacctaggttaccgacgacggttgcagaagggctggaccgacgatcctactctcgtgaccaccgcgaggtagagcttgaacgaagggcgtgggaagcttcaacaacttatgagggtctcggtgctcgcgttaagtcgatcggggacaacgtaggttaattggtccacgcggaagctgtccacgacgccaaattgagacgtcgcaaccccgttctatgcaacatgcaacagtagagctagaaattccaactgggtgagcttcactaacctttggagagcacggaacgagaaccacatgagcatgcaacggtctggaacgctttggccacggcgaggtggtggtttcggtggtatggtcaccactcaccaggctgggcgttggctgtgaagaacaagggcaaatcgacctggggattgagaggggaactcaagccgcaacacaaactgcagaggtaccaagggaccagctagagctcacgaacagcagggttctctggatcagcaatcaagtaaaagcaataagaaagttagggcagggttccctgaacttagccaacacttgatgaagagggactccaagggtgccagcactgcatggctgatacacgtggatgcccaacccaaatagcaggccacccacaagctcaacacagaaacaccccccgtcccagactggagacagtgaacaaagtgaataaggactctattgcacagccccacaacagtccaagccttgatattttgcagtatggagagaccccagatcttcagggatgtatctcaactcgagcacatgggtggagtacagcagagagaggatcttgttcagtttctcaaaccaaactctgaagttaactgaaacaggactgctgctccattccactcattactgtttaagcccttggatctcacatatccccctaacaacagaccagacttacttgaccaaaattactctccaaaccaagccctatcactttggtataacaccccagggctaaaaacttattgcacaaaaactatgatgccctaaagtagagaaaaaccaacactgacagctcaatctcaattgactgaaacaacccataccgaactgacattgagttgtgtaacataattttctccaattccttcccagtaacaagcccaactctttatataaaaattgttcaccttataacaatctccaacattgctatgtacttcttaatctagaacctgatggaatggtcgcaagagtgccccaaactgggtaccaaacactgaactttaagtttcagttaactgaataaaattcagtcattagcgtcatgacggtctcgctcccgccctctgaccttccccctcccgacgcctcgtttcccccctccactggcctctcgccggctcttattccaagaccggcgaccactcctcttccttccccggcgtcggaggtttatccccttggtgttcaacatggtggaagatcgaaggagcagcgctggcgggaggacgacggagtttgtgcctcctctgctgtgtcactagtccagggagacgtggttaggaaatcctacaaggaggccctggtttcatccaagccggccgcttccagggttgatgatggatgggtgagggtggttcgtcgtcgttcgagcaccttgaagccccaccccagaccagtcccggtggatttgcgcgggaaatgtttcaactgtttctcgtctgagcatcgcgcggcggagtgccgaaatcatgtgcggtgttttttctgccggctgccgcggcaccgtgtgggcgtgtgcccgcgccggcggacgaccccttccatccccggacgcaatttggtgtggcggcctgtggctaagaaatctttagatgtattaggttacggtctggatatggctggcggtcaggtggctgggtctggtcctgctgctggtgaaggcgcgaagaagagaactcgtcgtggtcagaggaagtcgggcactgggggccggttggctccttcgcctgccatcgacctggctaggccggagtgctttgtcgggcgttgtggaagaatcgatcgggctgaggaggagctccgtcgggctttgattgtcaatgttgtcggacagaagattctggctgtgccgcggaggtgcgtgatgcgatcgcctcgaggttttgccttgaagtagggtcgctccgcctacgtcgtgctgcgccaaattctttcctcgtcttcttcccctcaattgccttggctgatcgggtggtctccggggggcaatcccttcatgccccttcgctcaggttgcatatttgaaggtggtctcgtcaggctttcgctgttgtaagtggtcggccgctggtgcccattggcgttgagctacgtggaattcctgcgcatctctgggggattgagtctgcggaggctgtgcttggtgcttactgtttgattcatggactgttacccgactcagtcgcggaggaagacatgtctgttctcagagggcctgtttggttgcctgcatggctgagcctggcttgtatctagtgagcctggctctgactggacacatgcaacttcttgtgtttggttgtctgcatgcgatcagtctggtttatgagagatgttgtttggttgccgatatgaatatttgttgtatgagttaaaaatgttattaaataaatgaaaattgtattagtagacagtaattatatgttaaaattatttaatagacgctaactacatgttaataaacactaattatatactaatcttaatcacgtaatttttttatttaaaatatacatagcatgtgtggtctagtttcgttcgtaaaaatatcagaaacacagatatgaaatcggttcggtaattaaatcttttaattacaagatataacaaaaaaaccaacaaaaccaacatctcgctgttggaagtggtcggccgctggtgcccattggcgttgagctacgtggaattcctgcgcatctctgggggattgagtctgcggaggctgtgcttggtgcttactgtttgattcatggactgttacccgactcagtcgcggaggaagacatgtctgttctcagagggcctgtttggttgcctgcatggctgagcctggcttgtatctagtgagcttggctctgactggtctgactggacacatgcaacttcttgtgtttggttgtctgcatgcgatcagtctggtttatgagagatgttgtttggttgccggtatgaatatttgttgtatgagttaaaaatgttattaaataaatgaaaattgtattagtagacagtaattatatgttaaaattatttaatagacgctaactacatgttaataaacactaattatatactaatcttaatcacgtaaattttttatttaaaatatacatagcatgtgtggtctagtttcgttcgtgaaaatatcagaaacacagatatgaaatcggttcggtaattaaatcttttaattacaagatataacaaaaaaaccaacaaaaccaacatctcgatttgcgtgctggagtaaacagtcggctcagtcaagcctggccgagcgcgtgcaaccgcgccgggcctgactcgcggtgttttgaggttcgtgctggcctgtctcttgcaatacagcgaaccaaacaaacactgcattttgtatatgcagatacaattgcatccacagggaagggaaccaaacacatggagaatgaaggtctggtgccggtcacctgagctgctcccggcagtagtggatctccatgttgaagagccggttgtctttggagaggatgggagttggactcctcgcacgttggcgttccctgtttcggtggtggttcttcgttcggatggggattcagattctggtgaggattttccttcgccacccccttcgggctttgccgatgaagacaatgatcatgaacattatgagcgacggccaaggcggccggtgcgccctgcgccttctgctcgggttccaattcatttacgactggggcaacgcagtcgttctggacaggtgaatgacagtctcagggctatttaggctgttgacccggatatggtggaggtgggatcagtggatgccccggctctctcggtagctccggttgaggagctggaggcgcccggtcaccctccagggttggcgttggatctgacagaagatttgggtggttcgacgcaggatgtcatctcaccggttaggccatgcttggaggttcctttggaggtggtccatgtgaatgatttggaggtggatgtctcagctgggcagcatggattcgggtgctcccatttggtggttgatggtagttccgttattggctctgtcagggcgagaaggcttgggtcttgtcagtcttccagggctgatagatggaaatctaagccacctgtgtttaaagtttattccagaagaagattatctcaggctcagattgttcaagaagaccttttgttgcaatatgtggtggaaatgattccacctttggaagagttcaagtctgcggtcactaagccttctgatggcctgttaccaccacctcccccccgaagtaccaaaagaagaaaaaaagcaatgccaagtgattttcgaccaaggaggagtaggagagtggctaaattcccccggagtttggttcaatttcggctgctcaagtgtgtaggcgtctgggtttttgtgatgataatgagaatatttctctccaggatgccagcaattatgcaaaattatttgatactaggctttcgagtgcacacatcgctgctttggcgactttgtttggttgggaggtgcctcaagtggggatggactgattggtggtgcctggggcagcgatggcagtagttttttttgctgtttccaatggagaatagctgttttcttatttggaatgtgagggggctcaatgatcgtgccaagagagattcggtcaaaaccctggttcttgatgtcaagccttctattgtttgtctacatgagaccaaattgtgttctatctcggactttgatattctgtctattcttgggtctggtttcagtaattttgtttctagtctagcccaggggactagaggaggtgtgttaattgcttggcatgacgggtctttggtctctgtggcttcggtcgtgaagaatttctctgtctctgtccaatttcaggaagagtctggttcttgctggtggttcacatgtgtgtatggacctcatcaggataattttaaacatgagtttattcatgaattgagagcggttcgtgatgattatgtggggccatggtttttatgtggagattttaacatgattctccgggaggaagataagaataattccaacataaacaggactatgatgcgtatcttcagagggcttgtcaattctttagagctaaaagagattcctttgatcggtagaagattcacttggtcaaatcagagggaagagcctactcttgtgaaattggaccatgttttctgcactgcggactgggaggattattttccagattgttctcttcacagtaatgctactactgtttcggatcgctgtcccctaactcttagagttagagagggggtttggggaagagaagatttcacttcgagagtttttggcctaagttccctggttttttggaggtggtgtctgccttgtggaatctacctttgtaggattcttgccccttggagaggccatctctgaagtttaaaagattagccaagtgtttgcaatcctgggggcataaagaggtgggtaatgtcaatatctagttgggtcttgctcgtgaggtgttgcatagactggaaatggcgcaagatatcagatctttgtccagggaggagttttggttatggagacagctgaaacaacattgtctggtgcttgcgtctttgcaaaggacggttgcacgtctaaggtcccgaattcaatttctgaaaggagatgccaatactcaattctttcaccgccaggcttgttaccgtaaaaagaggaagttcatttcaaaacttgaggaggatggaagggtgtatacaaatcatgacgacattcaggtggtactagacggtttctttaccaaccttataggcactgattttccaaggagtgttactattgatttattgggttgccataggactgcagcggatctcagtgagctggatagccctttcttggagaaggaagtaagggatactattgctgacctgccttctgataaagctcctgggcctgatgggtttatggggaggttttacaagacctgctggaacattattaaggaggatctgttggctgccctgatttttctgcaccaaggaaatgcccataaacttggattgttgaattcagcctatcttattcttctccctaagaggttcgatgctatgtcagcctattagtcttatccacagttttgctaagctggtcaccaagcttctggccaacaggttgggtcctcgtcttcatgagttggtggcagccaatcagagcgcttttgtgagagggagatcaattcatgataattttatgctggtgcagcagcctatttagtctctacacaagaggaaggttgcgaggctattcttaaaattggatatctccagggcgtttgattcagtgtcatgggccttcattattgaaattcttattcatcttggctttggtccaatttggcgtaatcttatttcctcactaatgttcacgtcttctacgcaagtacttaatggttcgcctggagatcgtatcgctcatcggagaggtcttcggcagggtgatcctctatctcctatgctgtttgtgatggttatggatgtgcttaacagtctgttcagagcagctgaaagcagggggctgttacaaagtttagaggaagctggggttcgtaataggctttcgatctacgctgatgatgtagtgtttttttgttaaacctatggttgaacacctgaattgtgttagattgattttggattgctttggtgaagcaacggggttggtaacaaatttgcgcaaaagttttgctataccaattaggtgtgatgggctgtatttgcaatgcagctcgggatcctttccgtgcagctatctggggctgcctatctctgataagaagctaaaaaaaagggagtttatggtatgggttgataagattgctgaccggctccccaactggaaggctcgtttgctcagtctggctggcaggacagcgttagtgagacacgtgctttcggcaattcctgtttatatccttatggccatgagtgttcccaaatgggtgatcaaatccattgataaaatccggagggggtttctttggaaaggaaggaagaaggtcaatggtggaagctgtcttgttccatgggagatagttacaaggcctctgaaatatggcggccttggagtttctaacttacaatacaaaagttgggctttacaggtgaaatggttatggctgcaaaaaactgattcgtccagaccatgacatggaatgaatcttcctattcagcagcaagtcagacaatttttcaatctttcggtcttaactatggtcggaaatgggaccaacactcttttttgggtagataaatggttgaatgggaaggctatctttgatattgctccagatgttgtctgtgtgatggacagtagagtcagctctactaggacggttgctcacgctatggataattggcgatgggtaagggatattgggagtcatctttctctggttgggctgcagcagtatttgaagttatgggatgtgattggagaggtgacactttcacaggaggcggacaagctagtttggatgcacacggcttctgggcagttctcctcaaggtcatgttataatgccttcttcttggggtccatctcctttgagccttggaaaagattgtggaagactcgggctcccccttaatgcaagtttttcctttggttggctataaggaataaatgttggactgcggacaggctctaaaggagaggtttgcaatacccggtgtgttgccccctatgtgatcaggaagcaggaaacaattcagcatatcctctgcacctgcagtttttctagggatttttggcatctcattttgtcgtccatcgggcttggcaacctcactccgattgttgctgaacagtcatttgctgagtggtgggggaaggtttctaaaaaagtgcataagtgcaaaaggaatggcttcaatagtgtaattattcttggggcttgatgcttatggctcactcgtaataaggctgtttttgatggagtgagcccatccattagagcgattaagaggttgtttttagatgaattgatcagttagaataaggcaggagcgaagcatttagacagtttggggattattgtcaccttaaatagggtctagttgggcctgtcaggcttcccctcccctgtggtttcaccttgctggggtgctggagaggaggcttgagggtttggtcttcgtttgccttttcttttctgccctcagggtgttgtatttcggtccattttggacctttgctctctcaatataatgatgcgcagctctcctgcgcgttcgagaaaaaaaataaaataaaattcagtcacaatcactctgacagggaatgtttggggtgcaatttactcccagttctgtgtaacaccaggtctcccttgcttcataaaacttgttcctctatacttagtctctatctctactatatggttctcagtctaaaacctaatagaatggtcacactagtgctctaaacagggcaccgatcactgaaattcagttatctgttaactgaacaaaagtccagtcagtgcaaactgacagtccatttttgggtagctttaactccacttttgtgtgtgattaagcccaactcacttaaaggaatttgttcactataacatggtcttgaattcctctacataaaccatggtccaaaactgcatagaacaggcagcacacagccccaaaacttcactaaaaacattgatttcagattcagatactattcccaatctgaaaaattcagaagtctgacagcccctctttggtcacctttttcttctagttccaaatacttctaaggccaagtggcttaatcaaattggtgctccacatgttgctctacaagtttggtacaatgatctttagctagaaccccatggattccaagccaccaaagcccaaagttggcattacacacacaaattcagactttagtttttcactaagtctgaaaatccagaattaaacactacacttttggaccactctttctaccagttccaaattgattcaggggtatgaaccttactcaaacttatacaccaacatgtggtttttcacttttatacataaactttaacccatagctgcatggatcagccaccaacaggctttcaaagttgcttcagaatataaaatcttcagtttcagattttgcagtctgaattcatattctgacattcccactttggaccagttttacacctagttttatatagttttagggctaccacatttcataaacattgttctcctatagttactctacaggtttgttatagcaactgttttcaaagtgttacagggatccaaaaacaaataaacaaaactgttttaggttgatttcaaactgacccaaatctgaacttttgcaaattacttcaaattctcccacaccatttggagagctccaaatatgaaaattgttcacttttccaagctccacaactttgacgtatggacttttagcaaaacatagctagatcttaaaatccacttttgggctagtttagagttgaaattggacttgatctgcttcaagtgtttcatcaatttattgcatcctactaaaaacaaggtcacccttaagctgaaacccaactttggtgtatagagctcatgtccaaattgtcaatggtttaaaagttgtttgcttgtactagatttcaaacaaggcctatgaacttctcttgttctcttcgaaacgacacaacctcacccttttgcaaatttgttaccctaattaatgcattctaggtgtatcaagcaagttaatgcaagtgcatatgatgacatgccaaggttttagttctcgtaacactagaggtgttacatgcgcgagcaaaagcgacagcgtgggtgagttgtgccgtgcctcgttggtctctttagtggtgcgggagtccgcgagttggatatcagcggcgatggtggcgtaggcgacaaggtcgttgaggtcgacagtggcgccggagggaggatcgttgggtggggtcaccatggagcagtagcacatattcgtcgaaaacaacatgacgagagatgagtatgtggtgggtggcgaggtcaagacatcgataccccttgcggtcaggggagtaaccgaggaagaggcaatgagtggagtgaggagataacttatggggagcggtggcagaagtgttgtgataacaggcataaccgaacactcgaagatggtcattggagggggctgtgccatatagggtgaagtggggtgtgggatgactcaccgccttcgagggtaggcggttgaggagatgtgtagcagtgttcagggcctctgcccagtagttggcagggagagacgtctggaagaggaggcaacagatcatgttggtggtggtgcgaatgatgcgttcgaccagaccgttttgggaagaggtgtaaaggtacgagagagacgcaactgaacgtcgtgggagaggaagaaggagcgagaggtgttgttgtcgaactcgcgaccgttatcacattgaagggcacgaatcgagcgacagaactgggtggagacccaggcgaagaagtgggtgagggtggcgaacgtgtcagactttagccgaaggggaaaagtccaaagaaagtgagaaaaatcatccaaaatcaccaagtagtatttatatccagaaagactgagtacaagagaagtccagagatcacaataaactagatcgaaggcctactcagctctagaagaagtagtaaatgggagacgagtatgtcggcctagctgacaagcatgacagaggccctcaaaatgtcccctactacatgaaatatctaaactattggtgagcttggtcatgacgttgggtcctagatggccgagacgacgatgccaagtggtggaggaggtggtggagattaggacgggaggggaggatgcgccggtggagaaaggtcagagtgtgtagaggaaccccgagctatcacactgggcgagggggtcctggtggtcagatccttcatagagaaaccaaaagggtcaaactcaatggaacaagaattgtcggtggtgaaacgaggatcagaaagaagatcgaggagggatgggaggaatggggggtgaggagcgggataacgtgcccgcggtggaggtggtgtggtaggacgcaccggaatcgaccacccagtcggagggaggtggtgtcatcgccatggtgctgaaagtggaggcgagggaggttggatcccatcctcaagccagcggggttcaaggtgtcgggtggggatccccggaggcgggagatggggcggagccggagtcgtcgggggcacgcctagggaggcgctgtcaggagggccgacgtaggaggacgggaggcactcaaggcttggcccgaccacatggcgatggtcccggtccaggggttgtagaattacggccatgcctggccgccaccccggccggaagaaccaccttgggtggagccgctactcccacggccaccctttcggggacgacctccatcggtggtggtggccggatgaggggctgcagggacggcgggggtagtgcgggtaggagcctcagtcgacggagggtgaggtgcttggcccttcgaaggtgcatggcgaccgggaggaggactgtagagggcaggggcgggagcgggtgcctcagtatccatggtaagctcctcaaggagaagctcgttgcgcacgacatggaaggtggggaagggcatagtcctcttgacgagagccttcaggtggccctagcgggggttgaggccacgtagaaggttcgtcactaaggtacgatcggcgatgggcttgtcgaggtcgcggagagagtccgccatgcccttcatctggcggtagcttctcccacagagagatccccttgagagaactggtggaactgggtgttgaggtggagcgctcgagcctcccggttcccgaggaactgcccctcaagagcgagccatgcccgacgagcggtgtccgcctagtcgcggatgatgtcctgtagctcaacggtgatagtgctgttgagccacgagaggaccacaatggagacagcggggtgacgtggtcgggtggggcgtatcgctgaagcgtgagaaccacctgagcccgccaacgagagtagtgggaggacgtcgtgtccaacacaacggatacaagggaccgaatgttgtgaatctcgacggcctgagcatggagggcggcgatggtgtcgtcgtcgagtccggaggcgtggggagcctcgggagcgaccgagggatcctcatgggtgactggtgggcgaccgaggaggtggcgctgcgcggtggccatctgggcgatcaacgtggcacccatggcacattcttgctccaaggcgagagacacgacatgttcgcgctcctgggaggcagggacggtcgcctggatggtggcgatggccacgacgagcgcggaggaagcggatggaggagcgaggactcgacggtgtcgacccacgcaggagcgacgagagtggggtggtggacgaggaatcctggcggggaagatcgggtgtgctgttgttgcgcagaggaggcaccgggaagcctgatcgcgatggggaggagactggccgccgagaagggttccatggtggggaggatgccgatggggaaggtgctgcccgcggcggcggcgtgttggccagcggcgcccgcgtcggtgaagtggtggctcagggatagacgacggagaacaagggattcctcaggaatctccagccttggtgaaatccgcgatgccacctccatatctggtccaggagctttgtttgatggcaaggataatatagctttccaaacttcctccttagagaaggggctgtcttaacgtttactgcaaggttacaatacatataataggattgccaaaagatttatgcaggctcttaagttgcatatcaaaaattactttggattactaggagatattgtcatattgatactagaactgtccacgcatcaaagtttcttaatttattgattttttttgtcttactaataaacctcttctttttgggattgtaaatgtggcagttttagaaagtttgtaacattattggaacaagagg

SEQ ID NO: 1021 - DNA, 9529 bp, Zea mays
  Intron number 2 from transcript GRMZM2G085615_T01 (locus G RMZM2G085615) derived from phytozome v7.0 (chr-ID 8; pos 1 15341787 to 115351315 reverse strand)
atattgagcgacaagatcaccgctgatagtcgcctagagggggggtgaatagggcgaaactgaaatttacaaatataaacacaactataagtcgggttagcgttagaaatagaaacgaatccgcgagagagggtggaaaacaaatcgcaagcaaataagaagtgtgacacgcggatttgttttaccgaggttcggttctcgcaaacctactccccgttgaggaggccacaaaggccgggtctctttcaacccttccctctctcaaacgatcccacggatcgagtgagctttctcttctcaatcacttggaacacgaagttccaacaaggaccaccacaagtttggtgtctcttgcctcaattacaagtgagtttgatcgcaatgaaagaatcaagaaagaagaaagcaatccaagcgcaagagctcgaaagaacacaagcaaatcactctctctagtcactatggcgttgtgtggaatttggagaggatttgatctctttggtgtgtctagaattgaatgctagagctcttgtagtagttgggaagtggaaaacttggatgcaatgaatggtggggtggttggggtatttatagccccaaccaccaaaagtggccgttgggaggctgtctgctcgatggcgcaccggacagtccggtgcacaccggacatgtccggtgcccccgccacgtcatcactgccgttggattctgaccgttggagcttctgacttgtgggcccgcctgggtgtccggtgcacaccggacacctactgttccttgtccggtgtgccagtatgggcgcgcctgacttctgcgcgcgctgcgcgcgcaattaatgcaccgcaggtagccgttggcgcggagatagccgttgctccggagttgcaccggacagtccggtgcacaccggacatgtccggtgaattatagcggactagccgttggagattcccgaagctggcgagttcctgaggccgcttctccttggcacaccggacactgtccggtgtacaccggacagtccggtgaattatagcgcgagtgcctctagaaattcccgaaggtggcgagtttgagttggagtcctctggtgcaccggacactgtccggtggcacaccggacagtccggtgcgccagaccagaggtgccttcggttggccctttgctcctttgttgaatccaaaacttgatctttttattggctgagtgtgaaccttttacacatgtataatctatacactagagtaaactagttagtccaattgtttgtgttgggcaattcaaccaccaaaattatataggaactaggtgtaagcctaattccctttcaatctccccctttttggtgattgatgccaacacaaaccaaagcaaatatagaagtgcataattgaactagtttgcaaaatgtaagtgcaaaggttgcttggaattgagccaatataaatacttataagatatgcatggattgtttctttcttatttaacattttggaccacgtttgcaccacatgttttgtttttgcaaaacccttttgtaaatccttttcaaagttcttttgcaaatagtcaaaggcaaatgaaataagattttgagaagcatttttaagatttgaaattttctccccctgtttcaaatgcttttcctttgactcaacaaaactccccctaaatgagaccctcctcttagtgttcaagagggttttgatatatcatttttggaaacactacttccttcccttttgaacacaataggaaaatcaattgataatattcaacactaagtttttttgaaattggttgaaattggtggtggtgcggtccttttgctttgggctcatactctctccccctttggcatgaaccgccaaaaacggaatcattagagcccttaaagtgttttcttcccctttggtcataaatgaatgagttaagattataccaaagacgaagtccggtccttttgccttgggctcttactttctcccccaagaatggagagttgcttggagtgacggcgaagtatgagttacgtagtggaagcctgtgtctttgccgaagactccaattccctttcgatatacctatgacttggtttgaaatagacttgaaaacacattagtcatagcacataaaagagacatgatcaaaggtatataaaagagctatgtgtgcaatctagcaaaagaaattgcgtgaatcaagaatattgagctcatgcctaagtttggtaaaagattgttcatcaagaggcttggtaaagatatcagctaattgatctttagtattaatgtatgaaatctcgatatctcccttttgttggtgatccctaagaaaatgataccgaatggctatgtgcttagtgcggctatgctcgacgggattgtcggccattttgattgcactctcattatcacatagcaaagggactttggttagtttgtaaccgtagtcccgcagggtttgcctcatccaaagcaattgcgcgcaacaatggcctgcggcaatgtactcggcttcggcggtggaaagagcgaccgaattttgcttctttgaagcccaagacaccaaggatcttcccaagaactggcaagtccccgatgtgctcttcctattgattttgcaccccgcccaatcggcatccgaataaccaatcaaatcaaatgtggatccccgagggtaccaaaggccaaacttaggagtataagccaaatatctcaagattcgttttacggccgtaaggtgggattccttagggtcggattgaaatcttgcacacatgcatacggaaagcataatattcggtcgagatgcacataaatagagtaaagaacctatcattgaccggtataccttttgatccacggacttacctcccgtgtcgaggtcgagatgcccattagttcccatgggtgtcttgatgggcttggcatccttcatcccaaacttgtttagaatatcttgagtgtacttcgtttggcttaggaaggtgccttcttggagttgcttcacttgaaatcctaagaaatacttcaactcccccatcatagacatctcgaatttctgtgtcatgatcctactaaactcttcacaagtagattcgttagtagacccaaatataatatcatcaacataaatttggcatacaaacaaatcattttcaagtgttttagtaaagagcgtaggatcggcctttccgactttgaatccatttgcaataagaaaatctctaaggcattcataccatgctcttggggcttgcttgagcccataaagcgcctttaagagcttatagacatggttaggatactcactgtcttcaaaaccgggaggttgctcaacatagacctcttccttgattggtccattgaggaaggcacttttcacgtccatttgataaagcttaaagccatggtaagtagcataggctaataatatgcgaattgactcaagcctagctacgggtgcataggtttcaccaaaatccaaaccttcgacttgagagtatcctttggccacaagtcgagctttgttccttgtcaccacaccatgctcatcttgcttgttgcggaaaacccatttggttcctacaacattttgattaggacgtggaactaaatgccatacctcattcctagtgaagttgttgagctcctcttgcatcgccaccacccaatccgaatcttgaagtgcttcctctaccctgtgtggctcaatagaggaaacaaaagagtaatgttcacaaaaatgtgcaacacgagatctagtggttacccccttatgaatgtcgccgagaatggtgtcgacagggtgatctcgttggattgcttggtggactcttgggtgtggcggcctttgttcctcatcctccttgtcttgatcatttgcatctcccccttgatcgttgccgtcatcttgaggtggctcatttgcttgatcttctacttcatcaacttgagcttcatcctcattttgagttggtggagatgcttgcatggaggaggatggttgatcttgtgcaattggaggctcttcggattccttaggacacacatccccaatggacatgttccttagcgcgatgcacggagcctcttcaatacctatctcatcaagatcaacttgctctacttgagagccgttagtttcatcaaacacaacgtcacatgagacttcaactagtccagtggacttgttaaagaccctatatgcccttgtgtttgagtcataaccaagtaaaaagccttctacagttttaggagcaaatttagattttctacctcttttaacaagaataaagcatttgctaccaaaaactctaaaatatgaaatgttgggctttttaccggttaggagttcatatgatgtcttcttgaggattcggtgtagatacaaccggttgatggcgtagcaagctgtgttgactgcctccgcccaaaaccgatccgaagtcttgtattcatcaagcatggttctagccatgtccaatagagttcgattcttcctttccactacaccattttgttgaggagtgtagggagaggagaactcatgcttgatgccctcctcctcaaggaagccttcgatttgagagttcttgaactccgtctcgttgtcgcttctaattttcttgatccttaagccgaactcattttgagcccgtctcaagaatccctttaaggtctcttgggtttgagatttttcctgtaaaaagaatacccaagtgaagcgagaataatcatccacaataactagacagtacttactcccgccgatgcttatgtaagcaatcgggccgaataggtccatgtgtaggagctccagtggcctgtcggttgtcattatgttcttatgcggatgatgagctccaacttgctttcctgcctggcatgcgctacaaatcctgtctttctcaaaatgaacatttgttaatcctaaaatgtgttctccctttagaagcttatgaagattcttcatcccaacatggggctagtcggcgctgccagagccaacccatgttagtcttagcaattaagcaagtgtcgagttcagctctatcaaaatctaccaagtatagctgaccctctaacacacccttaaatgctattgaatcatcacttcttctaaagacagtgacacctatatcagtaaagagacagttgtagcccattttgcataattgagatacagaaagcaaattgtaatctaaagaatctacaagaaaaacattggaaatagaatggttaggagatatagcaattttacccaatcctttgaccaaaccctgatttccatccccgaatgtgatagctctttggggatcttggttttcctcataggaggagaacattttcttctcccctgtcatgtggtttgtgcacccgctgtcgatgatccaacttgagcccccggatgcataaaccttcaaaacaagtttagttcttgactttaggtacccaaatggttttgggtcctttggcattagacacaagaattttgggtacccaaacacaagtctttgaccccttgtgcttgcccccaacatatttgacaactactttgccgaatttgttagtcaacacataagatgcatcaaaagttttgaatgaaatgtcatgatcatttgatgcactaggaactttcttcttaggcaacttagcacgggttggttgcctagagctagatgtctcacccttatacataaaagcatgattggggccagagtgagacttcctaaaatgaattctcctaattttgtcctcaggataaccggcagggtataaaatgtaaccctcgttatcctgaggcatgggagtcttgccctttacaaaattagacaatcttttaggaggggtattaagtttgacattgtctcccctttggaagccaatgccatccttgatgccagggcgtctcccattatagagcatacttctagcaaatttaaatttttcattttctaagttatgctcggcaatcttagcatctaatattgctatatgatcattttgttgtttaattaaagccatatgatcatgaatagcattgatatcaacatctctacatctagtacagatagtgacatgctcaatggtagatgtagatggtttgcaagaattaagttcaacaatcttagcatgtagaatatcatttttatctctaagattggaaatagtagcattgcaaacatcaaaatctttagccttagcaagcaatttttcattctcaattctaaggctagcaagagaaatgttcaattcttcaatcctagcaagcaaatcatcattattatctctagggttgggaattgaaacattgcaaacatgagaatcaaccttagctaacaaattagcattttcatttctaaggttgtctattgtttcatggcaagtgcttagctcactagatagtttttgacatttttctatttctagagcataagcatttttaaccttaacatgctttttattttccttgattaggaagtcctcttgggtgtctaagagatcatccttttcatggatggcactaatcaattcattaagtttttctttttgttgcatgttgaggttggcaaaaaggttacgcaaattatcttcctcatcactagcattatcatcactagaagattcatatttagtggaggagttagattcaaccttcttctttttgccgtcctttgccatgaggcacttgtggccgacgttggggaagagaagtcccttggtgacggcgatgttggcggcgtcctcgtcgtcggaggagtcgcttgagctttcgtcggagtcccactcccgacaaacatgagcatcgccgcccttcttcttgtagtacctcttcttctcctttcttctccccttcttgtcgtcgcctcggtcactgtcactagatataggacatttagcaataaaatgaccgggcttaccacacttgtagcaaaccttcttggagcgggacttgtagtctttccctctcctttgcttgaggatttggcggaagctcttaatgacgagcgccatttcctcattgtcgagcttggaggcgtctattggttgtcgacttggtgtagactcctccttcttttcctccgtcgccttgaatgcgacgggttgagcctcggatgtggagggatcatcaagctcgttgatcttcctcgagccttcgatcatgcactcaaaacttacaaaattcccgataacttcctcgggggtcattttagtatatctacgattaccacgaattaattgaacttgagtggggttaaggaaaatgatagatcttaggataaccttaaccatttcgtggtcgtcccacttcttgctcccgaggttgcgcacttggttcaccaaggtcttgagccggttgtacatgtgttgtggctcttcccctttgcgaagccagaaccgaccgagctccccctcgatcgtttcccgcttggtgatctttgtgagctcatctcccccgtgcgcggttttgagcacatcccaaacttccttggcactcttcaacccttgaactttgttatactcctctctacttaaagaggcgaggagtatcgttgttgcttgagagttgaagtgctcgatttgggccacctcatcctcatcatagtctttatcccctacagacggtacctgtgcaccaaactcaacaacatcccatatacttttatggagtgaggttagatgaaatcgcattaaatcactccacctagcataatcttcaccatcaaaagttggtggtttgcctaatgggacggaaagtaaaggtgcatgtttagaaatgcgagggtagtgtagggggatcttactaaacttcttacgctcttggcgtttagaagttacggagggcgcatcggagccggaggttgatgttgatgaagtgtcggtctcgtagtagaccactttcctcatcctcttttgcttgtccccactccgatgcggcttgtgggaagaagatttttccttcttctctttgtgatgagaagaagatttcttctccttccctttgttggaggagctcttcttcttctccctcctcttggtgcgggactcttccgatgaagtgctcccgtagcttgtagtgggcttttcgccggtctccatctccttcttggcgtgatctcccgacatcacttcgagcggttaggctctaatgaagcaccgtgctctgataccaattgatagtcgcctagagggggggtgaatagggcgaaactgaaatttacaaatataaacacaactacaagtcgggttagcgttagaaatagaaacgagtccgcgagagagggtggaaaacaaatcgcaagcaaataagaagtgtgacacgcggatttgttttaccgaggttcggttctcgcaaacctactccccgttgaggaggccacaaaggccaggtctctttcaacccttccctctctcaaacgatcccacggatcgagtgagctttctcttctcaatcacttggaacacgaagttccaacaaggaccaccacaagtttggtgtctcttgcctcaattacaagtgagtttgatcgcaatgaaagaatcaagaaagaagaaagcaatccaagcgcaagagctcgaaagaacacaagcaaatcactctctctagtcactatggcgttgtgtggaatttggagaggatttgatctctttggtgtgtctagaattgaatgctagagctcttgtagtagttgggaagtggaaaacttggatgcaatgaatggtggggtggttggggtatttatagccccaaccaccaaaagtggccgttgggaggctgtctgctcgatggcgcaccggacagtccggtgcacaccggacatgtccggtgcccccgccacgtcatcactgccgttggattctgaccgttgaagcttctgacttgtgggcccgcctgggtgtccggtgcacaccggacacctactgttccttgtccggtgtgccagtatgggcgcgcctgacttctgcgcgcgctgcgcgcgcaattaatgcaccgcaggtagccgttggcgcggagatagtcgttgctccggagttgcaccggacagtccggtgcacaccggacatgtccggtgaattatagcggactagccgttggagattcccgaagctggcgagttcctgaggccgcttctccttggcacaccggacactgtccggtgtacaccggacagtccgatgaattatagcgcgagtgcctttggaaattcccgaaggtggcgagtttgagttagagtcctctggtgcaccggacatgtccggtggtgcaccagacactgtccggtgcgccagaccagaggtgccttcggttggccctttgctcctttgttgaatccaaaacttgatctttttattggctgagtgtgaaccttttacacctgtataatctatacactagagtaaactagttagtccaattgtttgtgttgggcaattcaaccaccaaaattatataggaactaggtgtaagcctaattccctttcaaccgcacagttaatccttctccgaaagatatatttagct

SEQ ID NO: 1022 - DNA, 1064 bp, Zea mays
  Intron number 19 from transcript GRMZM2G096389_T02 (locus GRMZM2G096389) derived from phytozome v7.0 (chr-ID 6; pos 161961819 to 161962882)
tgggagctgttgacgaattgtacaaggtatgcctgtttgcttatgcttgaaacgtagaatccacaaactgtatactgccatgagtctgaatggtttatactcccctccattccaaattgtaaagcatttttctagatgcatagtttttgttttgcatctagatacacattatactttgactagttagtttcccgggcattcggtctctcgggttacgatttccggtttacgatttcctgtgcgccactctctggttgggccgttgtagagtgaacgattgatgtcggctcgttagatgggaggccagagttcgggattttctcggccgaaaccaatgtttcggtctcttcttagccatcaatgggttatgtgcatccttgagtgtcgaccctaggcataataccagagtgcggtctttctctccccggccaagtttcatataggcaggcattgcttagataagatagttattcaaacacgatccaaaattatagattaattgagtgcgaatggtgaggtatgtggtgtggggtcaaacaagacaaacttttctctcgtttttttcacgctcgcaagattaggtacggtgagggtggaggtattagactatagatgaccaaatgagttgtacctagagggtcgacctaaggtacgacctatttaatagtgccacaacccggcacgatatgatttaaagtgggcccgtgccgtgtcacaattcagtaagtgttgcagtggttaggagtggtagatttttccttgcgacatgggttcaaacctcagtgagtgcatgattttttataataaaggatgtgcatcctagagaagtgccagaacgtcatacagtttggaagaacatagagggagtagtaaactattctgcagtattttgtttaagatttttttctgttatgtatctgaatttattttgaaaaaactagaggaactagcaacgctgactctgtctgtaatcacctataatgctacgtttttttttcgttcacaaaaaaaaattgctacatctttgtgacacggtggtggttgattctgtgagcagactaaag

SEQ ID NO: 1023 - DNA, 907 bp, Zea mays
  Intron number 1 from transcript AC233954.1_FGT004 (locus A C233954.1_FG004) derived from phytozome v7.0 (chr-ID 7; po s 13485701 to 13486607 reverse strand)
ctggtagcggtgtgaggcgctgttgccaggttctcggttaattatcccagggaatgtccggtgaccaaacaaacccgggtaattctctcatggaggtattttctgacaaggaagtaaagtgacaaggaaatctccccctttggtactttttctgggttaattaccctttggctcccaaactagccctcaggagcccatcccctcctccctcaaacgacgccgggtgacaagcaggaaaagtagtaatgacgacatgcaaactgaataagattctgtattttgaatacgattctagagatgcacgctctgttcatcaatgctgctacgttttgaaacttcaacatttcattactgctacgaatatatgtacacagtaatataacctctaagctcctcatgttgctacatttgtaaacttcaatatttcattactgctacaaatctatgtatggttccaattgactatggtagcttccttgctttctgttcttgtcttacgagtctgagctaaagttttatttattaaattgtgatgcaatgttgcatcaatgctggacttcggcatttgaagtttacgtgcactctggtttttatgttgtttactgtccatctttctcctaatcaataaaatgctttgattactattgacataatgtgaacttcgatttatatgttgtttattatccatatttggccctatccatgaaattatttgattcatgttcatataatacttagaagaatgttatgtaagcctcaaattctctaatttgagttgctatccagtttaacacattaattcaactgtctaaatgtatcgtttaaaaaaactcgcgcaaagcgcgagcaagttactagtaataaatgcatgaattgaatggccaggtttaccactctagtttcgctg

SEQ ID NO: 1024 - DNA, 17635 bp, Zea mays
  Intron number 14 from transcript GRMZM2G032821_T02 (locus GRMZM2G032821) derived from phytozome v7.0 (chr-ID 1; pos 75405999 to 75423633)
tacctctgccagaaggttcacaagggagaagagaagtaaaatcttcatacctttctcatgcctttctttaactcaataattgtgtccaaatgcaaccaatgtttttatcagtatatcctgttatttttccctaacaaatacatctcacattggctacatactttcaaaaccacattgagattcagttagactactgtcaaattgaaaacctaacgtgttagtgtaacttccgaaactgggtgagatgtgttagagtacctattagggtttcggtactccccatgtatatttactgttttgcccccattgtaacaggctcggcccatctaactcaggctatatatccatctcccaaccctttgttagggttagggttttcatcagtcaacatggtatcaaagccaatttagtttttccctccctcccggccacccaccaacgctcctctcgctccccaccgggttttttccaccgacaaccccgtgtggacggaggctgccccatccccgctggccactgcacctgcgcctgccactctcgtcgccgccagcgccaccatccaggctgccgttgccgcctcccaggagcgccagcgcgccgcgtgtcaagggcgtcgggcccgagggtaggaggaccgcggctccgaaggtcgtagccgccgtccgtgttgccgaccgggttatgcccccaggaacggcggtcttcgtcaacgggttatgccccctgttgccgagtagagagaggtaggagactgagataaaactttcttgtcctcatcatgggcgcttacagggggtatataaggccataggccagggctactaaaggaagccactaatcactcttattcccttctaaatctatcccagattattaaaggaaagccatcaatcactaatcactcttattcccttctaaatctagcccggactaataaaggaaagccatcaatcacagatcactcctattccttctaaatctagcccggactaataggaaggccatcaatcacttttattctttccagatctagccgctaggcctggctgcctgctggatcaggcgctgcctgctggatcaggcgtcctgcgcgctcagccgcgcgccgcacgtcgcgtgccctgtgccgacgtgtgtacgtatttccgtacatcacatctctcccctcctcgagaggcagctcgtcctcgagctgaaatagtgggtatgaagcgcgaaatgtgtccacatcctcccaggtagccgatgccggcgaggctccccgccagcgaatgaggacctgccgaactcccctgagcagccgcatcttgactgcttgctctggctctggaataactgcgccgtggcgaaccggaggtagagctggaggctcttgcggaggcgcgccgtggaacttcttgagaagccccacgtggaagacgtcgtggaggcgagcttgaggaggcagggccaggcggacagccacggcgttgatgcgctcgacgacgcggtaagggccgtagaaccgcggcttcagcttgccagccgacgagtcgggcatggaggccgtcgggcgctggcgtagacgaagcagcacccactcgccgacctgtatgtcgatgtcccgatgtagacgatcataatgatgtttctggacagcctgggcctgctccagccggtgacggatatctgccaggaactccacgcgctcctccaaagtcctggccaccgcaggcacccgcgttgccccctgctcgtaggagcgaagtgagggagggtcgcggccatagacgacgcggaacggcgtgtcgcgcagggacgactggaaagcggtgttgaagatgtattccgcccatgggagccagcgcaaccagtcgcggggtcgatctcccgtcaagcacctgagatacatgatgatgaccttgttcgccgattcggactggccgtctgactggggatgaaatgccgtggtcatctgtagcttggtaccgctcaagcgcatcagctcggtccagaagttggaggtgaacaccgagtcccggtcagagacgatcgactggggaatgccgtggagacggacgatgtcggtgaagaatgcctgcgccacagactcggccgtgtacgggtgcgccaggggaacgaaatgtgcatacttgctgaagcggtctatcaccgtgaagatgacggtcttgccgcggacgcgaggcagcgcttcgacgaaatccatggcgatgtccgtccataccccttgcggcatcggcaggggcaacaacaagccgaccgggtgctgatggtcgggcttgttgcgttggcagactgcacagccacgaatcagatcctgcaccacacgtttcatgtgagaaaaatggaagtcgcgccggagtcggtgcagggtgcgctgtacgccctcatggccttcctcgtggaccgccaccaagatctcctggaccagcggggaggcgggcggaatgtacagccggcccgcatagtggacgaggccgtcggttagcgcccagggccgtgacctggcgccgctgctgatgtcgtgctggagggccgcgagcgtggggtcgacggtgtgtgcctgacggagccgatctatgaagtcgaagcgtggtccggacaaggccagcaccaagccctcctccggtgtgtcgcggcgtgagagcgcgtccgcgacggcattggtatgtcccggcttgtactcgacggagaagtcgaagccgagaagtttgcccacccagtggtgttgtggtatggtggacagcctctgatccagcaagtacttgaggctgtagtgatcggtcttgacttcgaatcggcgcccccaaaggtagggcctccaatggcggattgcctggacgaggccgatcagctcccgctcataggcggctagggcgcggtgacgaggcgccacgggccgactgaagaaggccacggggtggctgtcctggaccagcaccgccccgaagccgtgggacgaagcgtcgcattcgacgacgaacgtcttggagaagtccggcatggcgagtaccggggccgacgtgaccgcctccttcagagcggcgaaggcagccgccgtctcgtccgaccacaagaacccgtctttcttgagcagggcggtcagcggcgcggcgattgtgccatagttgtgcacgaatttccggtagtacccggcaagaccgaggaaaccgcgaaccgcgcgggccgaccgcggctgctgccagtcgcgcaccgcctgcaccttggcggggtccatggcgactccggccgccgagacgacatgtcccaggtacgcgacggaggaggccgcgaaagcgcacttagagcgcttgacgaagagctggtgctgctgaagcgcgccgaagacagcacgcaggtgacgaaggtggtccgcccatgtgcggctgtaaatcaaaatgtcgtcaaaaaataccagcacgaagcggcggaggaaggggcgcaggacgtcgttcatcatggcctggaatgtggcgggagcgttgcacagcccgaacgccatgaccaggaactcgtagaggccgtcatgtgtgcggaacgccgtcttgtgcacgtcactcggccgcatgcggacctggtggtacccggatcgcaagtcgagcttggtgaagaagcatgccccgtggagctcgtccagcagctcgtcgacgactgggatagggaatgcgtccttgatcgtgagcgcgttaagcgcccggtagtcgacgcagaaacgccacgatccgtcaggcttcttgacgaggaggaccggggacgagaacgcggagtcgctgcgacgcacgatgccttgtgcgatcattgctgcacattgtcgctccaactcatctttgtgggctgccgggtaacggtacggccggaccgctaccggcagtgtgcccgacttgagtacgatgctgtggtcacgcgcccgcggcggtggcaggcccgcgggctcggcgaagaggccatcgaacgtggtcagcagctcctccagcaaggcttcgggcgccgtgatgctgtcgaggcgcggtgtgcgccgggcggccacgtcctcccagcagatggggcggccatggcgtgtgaaggccacggtgcgcgtggtgaagtcccacaccatcttgcctagcgtgaccatccactgggtgccgaggacgacgtcgtagccggccagtggcatcacatagaggtcgacgcagaagtcctcgcctgcgatggtgatcggggcctgacggaaaacacccgggcaggcgatgcgctcgccattcgccacggtggccgtgaggcgtgggctggtctggacagcaagccccgtgcgtgacgctgcggcctcggcgatgaagttatgcgtggagccagtgtccagcagggcggtcagcgtcacggcgcccacttgcacgcgcacctgcatggagtcacaaatgggcataccagccacagcgcgaagggagaacaatggtgcggaggtgtcgacggcgtcagcctcctgggcagcgtcctccagctcgaagccgtcaatgtagaagacgcggcgacacacccgattgtgcccgcgggagtacggctcattacagttgtaacacaagccaagacgacgacgttccgcctgctcctccgtcgtaaggcgcttggcagccccagccgcgccgcgtggaggaggtgccgggagggccagctgctgtgctgggggaaccggtacgggaagcaccggaggcgcgccggccgctggcagcgctggccgcgtaggtagagcgggcagggccgcgcgcggggccgcccgaccgagtagggggttgagccggtctagctccaccagttccagcatcctggccaggctcatggctgcggccagggactccggcgcgtgaacgcggacctgatggctcagcggcggcagcagcccccctgtgtacagttgtacgcgctggctttcctgcagccggccagcacgcgaaagaagggcctggaagcggttggaatattcttccaccgatcccgtgcgtcgacactccgtcagctcgaacagcggcgctgatctcagcgctggtccgaaccggaggttgaggagttccttgaagcgaccccagggcggcgtgccctcatcctcctggagttggaggaaccacagctgggccacgtcgtccatgttgtacgatgccatccataccttttcctccggcatggtgcgttgatgtcgaaagtacgactcacacttgttgatgaagatcagcgggtcggacttgccgtcatagcgcgggaactccatcctctggaacttcggcgggtgatccgtgcggggctgcccatcttggtggccgccgtagtcggtcgcggaggcgaccttctcctgcatgatcaccatgtcggactgcatcttggacatgttggtggacagggtttggagcatctgcatgacgtcggccatggagggttgagcgccgtcacccatggtgatgaacctggacgtagcggtggacggggaggtgggggctggtggtggtggtgcggctgaagggctgggggtggtggttggggatcgccgacttcctgataccaggttgtcaagggcgtcgggcccgagggtaggaggaccgcggctccgaaggtcgtagccgccgtccgtgttgccgaccgggttatgcccccaggaacggcggtcttcgtcaacgggttatgccccctgttgccgagtagagagaggtaggagactgagataaaactttcttgtcctcatcatgggcgcttacagggggtatataaggccataggccagggctactaaaggaagccactaatcactcttattcccttctaaatctatcccagattattaaaggaaagccatcaatcactaatcactcttattcccttctaaatctagcccggactaataaaggaaagccatcaatcatagatcactcctattccttctaaatctagcccggactaataggaaggccatcaatcacttttattctttccagatctagccgctaggcctggctgcctgctggatcaggcgctgcctgctggatcaggcgtcctgcgcgctcagccgcgcgccgcacgtcgcgtgccctgtgccgacgtgtgtacgtatttccgtacatcacacgcgtccctggctttggacaatgagcgggccacgggcgccgccctgaccgctcagctggccaccgcgcagcgcctcatccacgggcattccccgacgggtcttgacgcaccactgcccaccctagaggccccccacgcctctggactcgacgccgaccacatcgccgctcttcacgcccaggctgccggcctccacaacatccggtccctcgtctccatcgtgctggacccgacatcctcccactaccctcgctggcgggggtaggtgctactcaccctgtggcgttttgcactcgtcgaccacgtcctcgacgacatcgtcgccccgccgtctccggcctggtccctgatgggcgccttggtactctcatggctccacgacaccatcaccgtcgagctccaggacatcatccgcgaccaggcgcacacgggccgccaagcgtgtctcgctctcgaggaacaattccttgggaacctggacgcttgggctctccacctcgacgctcagttccaccaattctcctagggggacctctccgtggacgagtactgccgctagatgaacggcatggcagactccctccgcgatctcggcgagccagtggcggaccgtacaatggtgttgaacctcctgcgtggcctcatcccccgctacggccacctgaaggctctgatcaagaggaccgtgcctttccccacctgctatgccgtgaggaatgagcttctcctcgaggagctcaccatgaccttcgaggctcccacaccggcaccggccttctacagcaccacccctcgcgcccggcgtcttccggggggcagcctccccgcactccgtcgaccgggacccacactcggccccctattgcatctcctccggcccctcgtcaacattccaccaccgacggcagtcgtcgcacccgcaagggcggacgtgggggcggtgactcctctcgtggaggttccaccagccggggtggcggccagagttggccgtcgttctacaacccttggaccggcaccatctccatgtgtccgggttaggcccccagcgcctcccatcctccggcgccagcgccggctctcctgactacgccgcccgcctacagcatgcctccatacggtgtgccaccaccgactcgggcccctcctacgagaccatctaccacgacaccatggtcctcatttgctgctggctgggaccctgccgccctcgcctccgcctacagcaccatggcgttggctccaccaccttctgactgggtcatcgactccggtgcatcctatcacaccacccccaccacaggcatgctctctcgctcacaaccacctcccacacaccctacctcgatcgttgttggaaacagttccactctttcggtcacctctgtcggtgcctcggtactcccttgaccgttctacctcaacgacgttctcgtagcccctcacatcactcataatatcctctctgtcccgtgggttcaccaccgacaattcatgttccattgagtttgaccctaccggtttttctgtgaaggatctggccaccaggacccctctcgcccgatgtgacggcgtcagtccctctacacgttctagccatcgtccactggcatgtctccacctcccgtcctggtctccaccaccacctccaccacttggcatcgtcgtctcggccacctaggacctggcgtcatgaccaagctttccaacactttagattcttcctgtaatagggacattttgagggcctttgtcatgcatgtcagcttggccgccatacccgtctcccttttactacatcttctagggctgagcaggcttttgacctggttcattgtgatctatggacctctcctgtactcagtctctttggatacaaatactatttggtgattttggacgatttttctcatttcctatggacttttcctcttcgcttgaagtctgacacatttaccaccctcactcacttcttcgcctgggtttccacccagttccgtcgcccggtccgtacactacagtgtgacaatggccgcgagttcgacaaccacgcctctcggccgttcttcctcaccagtggcgttcagttgcttctctcgtgcccctacacctccgcccagaacggccgggcagagcgcatgattcgcaataccaccaacatgattcactgcctcctcttccaggcgtctctccctgctagctactgggcagaggccctacacacaggaaccaactcctcaaccgcctcccatcgaaggcggtgagccaccccacccccacttcgccctatacggcacgaccccctcctacgaccaccttcgtgtgttcggctgtgcctgctatcccaaaatttccgttctggctcctcataagctgtctccacgctccatccgctgcctctttccttggctactctcctgaccacaaggggtatctctgtcttgacctcaccacctattgcatcatcatctctcgtcatgtcgtcttcgacgaagatgtgtttccccttgctggctcctccctgcccaccgatctcgactccctccttgagtccgatccgagtacccatccctcccaggcacctcgcctcgcaccgttacccgcacctcgtgcagcgtcaccgcccgtgcctgccacatgcggcttttatgcccccactcgcacgcctacctgcgccacgcgcggccccgttgaccctgcccgcgccacgcacggcccagtcgacctcgtctgcgccgcgcgtggccccgtcgaccccgcctgcgcctcatacagccccgacgactccggccccgtcgacgagcgggacccgcttcgccgacgcagccattgtctaccaccgtcgtgggagcgctcctccctcgacgcgcacgggcccgggcccctcgacaaacgcgtcctgattcgccgaccccgcaatcgtctatcatcctcgcgggccggccacgcccgtggcctctgagccgtcggtgtaccacccggtcgccattcaccgcgcccccgggcacactcacaccatggtgactcgtcgtgtcgccggtgtccttcggcctgtcgacaggctgatcctggccccgacacatccgctactccaccagacgttccccggtcccctcctccgtccgcaccgccctcgccgaccctcactggcgtcgggccatggaggagtatgcgaccctgctggccaaccacacctgggacctggtgccttgtcctcccatcaccaatgtggtcactggcaactggctctttcgccacaagttgacttcggatggctccctcgaccgctacaaggcccgctgggttcttcggggcttcacccagcgccccggcgtggactacgatgagaccttcagccccgtcgtcaagttcgccaccgtcctcgccgtcctctccctcgccctctcctggaactgggcgatccatcagctcggcgtcaagaacgccttccttcatgccactctgacggagactgtctattgcagccagcccaccggctttgtcgacgccgccaacccggacctggtctgccggctgaaccgctcactctacggcctcaagcaggcgccgcgggcctggtacagccgcttcaccacctatttggcctccatcggcttcgtcgaggccaagtcggacacatccctcttcatctaccgacggggcgaggacatcatctacctcctctacgtcgacgacattgtgctcacgacatccatcgccgacctcctacaacacacgatcatcgccctccagcgggagtttgcgatgaaggacctggggcctctgccatgactgccgaacgccagccccagggtctcttcctgcaccagcgtcagtacgccatcgacattctggagcgggctggcatgtccgactgcaagccctgctccacgcctgttgacacccagacgaagctctctaaggacgacggccctccagtcgccgacgcaacgtcttacttgagcttgataggcgcactccagtacctcaccttctcccagcccgacatcgcctacgccgttcagcaagtgtgcctccatatgcacacaccacaggagccccacctcaccgctctcaagcggattctgcgctacctccggggctcactcgactatggactcctctgaccatcctcgacgtcggatcttgtggtctacaccgacgctgactgggccggctgccctgacacgcgtcggtccacctccagctatgccgcgttcctgggcgccaacctcgtctcttgggccgccaagcggtagcccgtcgtctcccgctccagtgccgaggctgagtaccgcgctgtggccaacggcgtggcagaggcttcctgaatgcgccagctcctccacgagctctacagccccctccagcgcgccaccctagtttacagtgataacgtcagcgccgtctacctctccactaatcccgtgcaacatcagcgcacgaagcatgtggagatcgacctgcacttcgttcgggagcgtgtcgcaacaggcaacgtttgggtcctcagcgtccccacaacgctgcagttcgccgacatcttcaccaagggactaccgtccagtgtattcctagacttccggtgcagtctcaacatctgtacatgatagagttgtggctgcgggggtattagagtacctattaaggtttcggtactccccatgtgtatttactgttttgccccatggtaatgggcttggtccatctaactcaggctatatatccatttcccaaccccttgttagggttcgggttttcatcagtcaacaagatggaccattggaacatatctggtatttgttatcatctataggacttgtaataagacagctttttaatcagtgaaaattctgtagaatctaccttagatgttaaagagacatagtcaatattatgtgggtccgcgcatgtgatgggtgccatagcagcatatagcccatagccccataaacagtccagcatggccaaaggtgagctggtcaatcagattagtgattgctgtttgctttgaataaagttgctaggtatggttggtgtgctctgaatctctgatagatttgactagttaatttgttaaagtttgatgatgttgaccatgtaacgttcgtgaataaaggaatattttggtgccccccccttccccccagtgactccagtctccactgccatggctgtccggagacaaggctgcaaggctcatccgttgagcatttctgctggcttttattttatgagctgatgtgtcttgggctcaagctcattcttttctcttctcataactattacagctacacaagttccataaatttgactgcactattctttcctcgtagtaaacgagaccctgcatcccatttggttgttctctccttgcctatgctttcatccatgctttgcactactaatattggccaagtgaaaactagaagagatgtctcaatctgtcaagggcggtattgcccaaggtaggaggacctcggctacgtagatcgtagccttgacccgtggttgccggcagggttatgcccccacgccgagctacccgtcgacaggagaagttctcctggtcgcgggtttagagaagagaggaagagacttgataggtaattcttgattgatttccaagtgcccccatacatggctatatatagccggcggcttacacaaatggagaaggttctccttgattgaagatctaatcaaaataggaaggatactaatcagctagctactttctctcctagccaatctcctatatttgctgcatgcacaatcaatcaggcggtagccttctatgtttgctgcatgcgcaatcaatcagatggctactttccatcctagccactcacctgctgcgcatgtgcttttgctgcctgctcagctcggcgcacatcgcgggctctcctacgcctggcgtatgtgtggccgtacatgacatctctccgctcctcaagaagcagctcgtcctcgagctgaaaggttgggaatttgtcggtgaaagtgtccatgtcctcccaagtcgcagatgcaggcgactgatctttccactgcaccagcacctggcgtacaccacggttgagccgggttcggatggccctagctggctccaaggtgactgccccatggtgaagtgggggtagtggcggtgtaacctgcggtggtgtgccgtgatactttttgaggacgcccacatgaaacacgtcgtggatgcgagcgcgggctggaagctcgaggcggacagcgacctcgttgatgagttccagcacacggtagggcccatagaaccggggcttcagcttgccggtggagtcagtggcgagggaggcaggggagcggtgtcggagacggagcagcacccattcgcccacctgatacgtgacggcgcggtgtccctggtcataatacttcttctggacagcctgtgcctgttccagccgatggcggacatcagcgaggaactcttcgcgctcctccatggttctagccaccgccgcaacacgtgtgtcccccggttcataggaccggatggacggaggctcacgcccgtagacgatcttgaaaggcgtgtcgcggagagagctctggtaggcggtgttgaagacgtactccgcccatgggagccattggagccactggcgaggacgatcgctcgttaggcaccgcaggtacatgatgattaccctgttcgccgactcggactggccgtccgactgagggtggaaagccgacgtcatgtggagactggtccccatcaaccgcatgatctccttccagaacttggaggtgaacacgacgtcgcggtccgacaccaaggactgcggcaccccatgaaggcgtacaatctctgcgaagaatgcctgagccacggactctgctgagtaggggtgtgccagtggaataaagtggcagtacttgctgaatctgtccaccaccgtcaagatgacggacttgccgcgcactcgtggcagggcttcgacgaagtccagcgccacatctgtccagactccctgcggaattggtaggggaaggaggagtccggccgggtgtaggtgctctgacttttggcgctggcaggtagggcactcccggacataatcttggaccacctgcttcatgttagggaaatggaagtcacgtcgaaggcggtgtagcgtgcgctggaccccttcgtggccctcggcatgcacagctgcgagcagttcacgaagcagcggtgaagaagggggtaggtagagccggcccgcgtactggaccatcccgtccaccacctcccacggcgcgcgcttggtgccggcctacacctcgtcacgaatggcagtgagtgctggatcggtgagctgtgcctgacgaagacggtccaggacgtcgaaacgcggtgccgagagggccagcagcgccccatcgtccggcgtgtcgcggcgggagagggcatccgccaccacattggttgaccccggcttatattcgacggagaaatcgaagcccaggagcttgccgacccaatgatgctgcggaagcgtcgcgagccgctggtccagcaggtacttgaggctgtagtggtcggttttgacgatgaaccggcgtccccaaaggtacggcctccagtgtcgaactgctaggacgaggccgatgagctcacgttcgtaagccgccagcgcttgatgacggggtgcgacagcccggctgaagaacgcgatggggtggcccccctggaccatcaccgcgccgaaaccgtgggacgatgcgtcgcactcaacgacgaatggcttggagaagtccggcatggtgaggacgggggccgaggtgaccgcgtccttgagggcgacaaacgcctccgcggctcctgcgctccaagagaatccatccttcttcaacaaggccgtcaatggcgctgccacggtaccgtagtggtggacgaacttccggtaatagcccgtcagtccgaggaaaccccgtaccgcccgtgcggatcgcggcgtgggccagtcccggatggcctgaactttggccggatccatggcgacgcccgcctcggagatgacgtggccaaggtagccgaccttcgtcgcgccgaacgcacacttggtgcgttttaggaacagctggtggcgttggagctcctcgaggacggcgcggaggtgtcgaaggtgttctccccagctcttactgtagatcaaaatgtcgtcaaagaacacaagaacaaaccgacgaagaaacggtcgcagcacgtcattcatcaaagcctggaacgtcgctggggcgttgcacagcccgaacggcatcaccaggaactcgtagaggccgtcgtgggtgcggaaggccgtcatgtggacgtcccccgggcgcatccggacctggtggtagcccgagcgtaggtcgagcttggtgaagaacttcgcgccgtggagttcgtccagcaactcgtccaccaccggaatcggaaacgcatccttgacggtgagcgcgttcagcgccctgtagtcgacgcagaaccgccaggagccgtccggcttcttgacgagaagtactggtgaggagaatgccgagtcgctgcgtcggacaatgccttgctcgatcatggcggtgcactgccgctcgagctcgtctttgtgtgccgccgggtatcggtacgggcggaccgccaccggcagcgctcccggtttgaggatgatgcggtggtcacgggagcgcttgggtggaagaccgcgtggctcggtgaagacgtggctgagggagtgaaggagggcgtcgaggaggggctcctgggctggctggagctatagtgtcggcgtcggtggcgccgtgactgcgcggacggccggcttgatcgaggatgcgaggccggtccagcagacagcgtgtccctcgcgctggaactgcatagtccgcgcggcgacgtcccagacgatgggcccgagggttcccaaccactgcgtgccgaggacgaggtcgaaacctgccaagggcatgacgaagaggtcgacgtggaacgtgtcgccctgcaccctgatcggcgcgtcgcggatgacccccgggcacgtgacgcgctcgccgttagccacggtggcggtgagccttgggcgcggttggatgtgcatcccggagcggtacgctgcacgctcgccgatgaagttgtgcgtggatcccgtgtcgaggagggcgaccagcacggcggtcccgaggaacgctcggacctgtagcgtgtcgaaggttggctctccggccacggcatgtagggagcagatggggccctcctccgctgggacagcatcgcccgcggcgtcgactgccatctccagttcaatgccttccacgtagaagaggcggcgacaggtgcgattgtggccgcgggaatactgctcatcgcagttgaagcacaacccgagtcgacggcgttcctgctgttcttccacggagagacgacgacccggttgccgctcgtgtgcggctggcgcagcacccgccggtggtgccggtagcgcaaggagtgggggcgcctgctgaggtttaatggcggccggtagagcgcgatgcgccggcttggccagggctgccgccatcttgtcgagctccatcagctccacttgccgagcgaggctcatggccgcggtcagcgtctccgggttgtgaagccggacggcgtggctgaggggtggaagcagacctcctgtgaagagttggactcgctgggcttcgtcgagccgcccagcgcggaagaggaggctctggaagcggttggagtattcctccaccgtccccgtgcgtcggcactccgtcagctcaaagaggggcgccgagcgcagcgctggtccgaatcgcagatcaatgagatctttgaaacgtccccacgacggcgtgcctttgtcctcctgaagttgcatgaaccattcctgggcgacgtcttcgaggttgtatgacgccatcccgacgcgctcctcggccatggtacgctgctgacgaaaatatgactcacatttgttgaggaagaggcgcgggtcagacttcccgtcaaaacggggaaaatcccacttctggaacctggggggccgatccggttcacgaggaggctccatgcgattgccgccaccaacgccagatgacgatgatgccttgtccttcaaggaagccatctcgatcttcatctccttgatctccatcttgagctccgaatgccaggatttcatcatctccatgaggtcggccatggagggctccgacatggtgttggagtgaccggtggaagtggtggaggctgagggcgagggtagggttgagggctgtttagtggctgcggtggtggaagttgatggttgtgaagaagacgaggatcgtcggcttcgtgataccaggttgtcaagggcggtattgcccaaggtaggaggacctcggctacgtagatcgtagccttgacccgtggttgccggcagggttatgcccccacgccgagctacccgtcgacaggagaagttctcctggtcgccggtttagagaagagaggaagagacttgataggtaattcttgattgatttccaagtgcccccatacatggctatatatagccgacggcttacacaaatggagaaggttctccttgattgaagatctattcaaaataggaaggatactaatcagctagctactttctctcctagccaatctccttctatatttgctgcatgcacaatcaatcaggcggtagccttctatgtttgctgcatgcgcaatcaatcagatggctactttccatcctagccactcacctgctgcgcatgtgcttttgctgcctgctcagctcggcgcacatcgcgggctctcctacgcctggcgtatgtgtggccgtacatgacacaatctcatcaaaatagtaatgctgtctatgtcacttttatttattgagtttatctgtttaccctctagattatataatccagcttagatgagttaacaggcaaacaaacaatacatattattaggtggatgatataatctagatacctagattatgataatccataagcaggtcattagctgcttatataatccataagctggattatataatcctagaaggaaacaaacagggcctaaggccctgtttgtttcaacttatagattatataatctaaattataatctagattatataatctggattatttgctctggattaaataagctaggtgctactgtttgttagctcagattatttggactcggcttattattcatatgcatacaaatacaacaatatcctttgttgttttacttatctgagaacgcctatgtacaactggatggcaattgaaagtaattttaatcaacttgccatgggtagtgggtctttcataaaaaataagctgaaataagcaccctttgatgagcttataggattatcataatctcaagtgctagattatataatcttatcagataagttgcttgtttgtttcctcaatagcttatttatattggattatataatctacatagattataatcccaaacaaacagggactaagtctatttaattctttgcagcta

SEQ ID NO: 1025 - DNA, 213 bp, Zea mays
  Intron number 2 from transcript GRMZM2G032528_T01 (locus G RMZM2G032528) derived from phytozome v7.0 (chr-ID 7; pos 2 2682644 to 22682856)
aatatgtatgcctcattatcatttagatttggtttttaatttttccttcatataatgactgtagtaacgatggtgtttgtagtttggcctctatactcctaagctgcttgcagttactgaagatgattatgtatgtatcattgttttcgttcgatttagttttacttttactgaataccatggtgttaatttctgcaggagtctgacccccgc

SEQ ID NO: 1026 - DNA, 10618 bp, Zea mays
  Intron number 4 from transcript GRMZM2G097620_T01 (locus G RMZM2G097620) derived from phytozome v7.0 (chr-ID 9; pos 6 827200 to 6837817 reverse strand)
tccgattccgaattcatttcccctcgtaagccgactatccttttcatggaacatcttttgctgacttactatagcttttctccatatatatcaaattgttggtattccagtttatttgatcatctgcctctgcccttgaagtaaaagtatattgggtctctgattgattggttgtgtgttagctcacattttgttaaaatgatcttgttacattcttcagaataaaagtaatgattagtcatccctggagcggaaaagagtcgaaactgtacagatttagtggatttcctgaactctttggacagcctgaagtcaacccagtctgaagacagatggttaagctgttcaattgggctagctttaactgagattgacatgtgataacctattaataagttaacatgttcagtttatttatgagtctaactctatataaatgataaacgaagagtaccagtatgagataattataaattgccacaatttatatgcatcaatagatgtcattgaagcatatgtggattgaccacctttcctcaatagcttggactatatataagcaatatttagaatatactgctccgtcagactcagcatctctactctggaaaatctagtattttagttggttgttgccactgaataacatatggagtaaaccatcattgcatagcagcggcaggctgtctgccattctgttccttctcgtctccagatctgatgaaacccccggatagtctcctctgtcctagcagactccgtgacttcacctccttgtggcttgcctttgcatctgttaaattcccaatgtgacccgtccatacttgtggaccacctgctggaggcactggtgtcgatgctgtcctttcattggcaccacatcctctggtcttcctgtcagcatggcctgcagctgcagcattgcaacatttgtgtttattctatgctattttgttcctcacagttggaatggcaaaccctaacccttattgagggttgggtctggcccacacaggggtgagactgtgattactgtgggaaaccctaaccctggattagggttgggtgttgtattaatagacttagttaactgggccagacccattacaaaggggtgagaggataattacacggggaaaaccccaaatcctaaatgggtatcctaacaccccccacagtcgcaacttacatatgttgagattggatcgaatgtctaaaaatacactcgatggtaaccccttggtgaagatgtcggcgaactgcagcgtggtggggacgctgagaacccgaacatcacctgcagcgacacgctcgcggacgaagtgcagttcgatctccacatgcttcgtgtgctgacgctgcacgagattggtggagaggtagacggcgctgacgttgtcgcagtagacgagggtggcacgctgaagggggctatagagctcgtggagtagctggcgcatccaggaggactccgccacgccgttgggcacagcgcggtactcggcctctgcactggagcgggagacgacgggctaccgcgtgtgtcggggcagcccacccagttagcgtcagtgtagaccacgagcttcgacgtcggggatggtctgcataattttttgtgagtatcttgatatttgtcgaagctatgtcatggcgctaagtttttaataactcaacacacgacctttgtctaattatttgagtagatgtgccttctgagccaccatatacacctaatcatggatggacgagacatagtttatctcttttaatatttatctctttggttggcggtgcgttgtatcacatatgcacataatttattttgaagtatgaattttgtagtctttcaggataatgcaagatcatgaatcaacatttttttgtcatttacgaatatacttagtgtgtgatgctatattttattcagtttgagaccgagatatttatcttataaaaatatattataacgccatactaaattgcgacatgcacaattaatttattttccatccatgagcatcaactcaacgaacaagacttgatttcatcatttttcttgcgctttagcatttatgcataacgtaaatgaatgcactatatgaatgttggcttgctttagtctagccgaagtgcgaatgttttataattcctgattttttattgccttatttttatttaggatgtaacatagtgcatccatagtgtttggaatctatgcatgattttctggtatttatttattgtagctctttactattagcatcatgcaaatgcatatatgttaagagcaagaggtattttatttcacatgtttatttctatggtatggcaaactatgctacaatatcgaacttcattatgatgtatgaaatcgagcattgtcgtgtaaacaagtcactatctattttattttgcaatcaggcatacgtggatggcttttcagggtacaggggatacttgcatgcttgtgcatacatgtttgttttatatgcatgggaccaagtaatattttttatgtgactagatccatacttaattattaagtgtttgaataaccataggatttagagtctacgcttacctttgtttaattagacaaagctttagatacacacactaattaatttggaatgaggtccatgcaaatagcaccgtagactaggcatgaacgatacaagtcattgcaataacacatatatactgatgatgttataacatgacacatctataattatattttgctagtatatacttggacattttgtttacaacctgctatttgtgatacatgcaaatatttgtaattgccataacgtgtactgttatgtatgatactgtagatagctttaccgaactgatttaatgatgcgactatatgaaagcacgagtgctagacaaaatgtgtcattctgtgggcttaattgaagtaagatgcaagttttgatttatttatcatgtttatgcgggaggcatgttagatggcgcaatatacaatgtagaatgtaaatagttttatatagaaaaatatcaactagttagagatcatacatatactgggacataaccaactgaaagtcgcctagagggggggagtgaataggcgaaacctgaaatttataaacttaaacacacactaaggccgaggttagcgttagaatcaaattcgagtgcggaagattgattctcttgctatgagttgctcaattaatgcggataacgtttgggagcaaactcaaatgaatattagcaaggaaactttagagagaggaaagagggcaaacaaatcaagcgaagatcaatgcgagtgaacacggagatttgttttactgaggttcggttccaaagaacctagtccccgttgaggaggccacaaaggccgggtctatttcaatcctttccctctctcaaatggtcacttagaccggatgagccttctccttaatcacttgggtcactaagaccccgcaaggatcaccacacacttaggtgtctcttgctagctttacaaagcacttatgagaataagaatagagaggagaaagcaatctaagcaacaagagcaacaaaaggacataaataatcctctcacaagtctctaagcactagagttgattttgggagcttggagtggattgaatgctttgaatgtgtcttggagtgttcggctttgctcttgcaatgaatatggagttcagaaaacttgaatgccattgaaggaggtggttgggggtgtaggattgtaaagtggatgatattgcatagagaatgggtataatatatagactcaaccctaaccctaatgggtcggcagcccaacagtggtgtcggcccacacacactcacacacacatagtctaacatcctcccgtagtcgcaacgggggcaccacacacgatgaaaccggagtagagtccgaaggtacgagccgacgggttgaaatccccccgcagccgcagcgtcgtgatggtgcgaatgttgcggctggagtagagaccggtgtgtgctccaagaagacgatagcccctggatgccgaggtagccgaagtcgaggtggtcgcggtcgggagacacatcagaagtctgatcttcgggaagggtcgacgttcgagcgtcaacgatcggcaggacaacacaacaaaagggcaccgacaggacgaccttcctgcttcttcgatcatccgggcgtcaacgagccccgccagggaggccgacagcagcgcacgcgtctgcgccggtcatggtgtctgcgcccacggcagaatagaagggggaaacggctgatccggccgggaaggccacgacagcgaaggatccagccgggaagatgcgatctagccaaagggacgacagattgcgccggaaaggtcgcagcaacgtggatccggccgggaaggccgcgacggcgacagatccaacgaaggcgatgaagggggtgggcggcgaggccggtccagccggacaggggcctgtgtcggacctggcaagggatgatgacggcgccggcgatgggagaagctcgaaaggttggcgctacttggtgtcagcgcgggcagttaggtggccagcgcgatgagggcggcgcgcgcagggcgcacaggaaggccggggggcgctgcccgtgggagtagcggcccgcagggcgcgcaggaaggccacggggcgctgcgcgtggggggcactgacgccgaggaggggcgcaaacgccgcggaggggccatctgagcagtagcagccagcggcgggaaatccggcgcgtgcggccctggcagcgacgcagcgggaggcgcgccagggagggggtttggtgcgggcgttggcggcgcaatccggcatcgagcagtaacagtccgaggccaaagcaggagcagagtcgaggcggcgcgggcgtggctgggaagcacgaccgccggagaagggggagaagtgggccggctgggggaggaggaaggcgtcgaccggagaaggggatggacgcggccggagggagcccgagaccgccggctgggggtggcggcggccaagcccaaggcgtcgacgaccatacccgcgcgatgtggcggcccctggacggcggcgcattccagcgtcggtgggaggaagctccgcggtcatggcggcgacggatcgggtggccggtggcgctaggaggcgcagaggcgacggactgggctaccggcggcgcagggagtcgcgggtccaggcggctgagaggcgggcgcggtccggtggcggcatgccatgcgacgacgacgtagatccgggcgccagggaggtgcatggcggcgggcgagcaggggcgccgggagagggagctgccggcgactgaagaaggtggtcagcggctgggaacttggagccggcggttgggatggtggccgccccccgggagggaactcctgggggcggcgacgttggagcaggccgacgactgatggggtaggaggccaacggctgctgtgggaggtgagaggaacgaaaccctaaacctaaccctttgataccatgtaggattgtaaagtggatgatattgcatagagaatgggtacaatatatacactcaaccctaaccctaatgggtcggcagcccaacagtggtgccgacccacacacactcacacacacatagtctaacagggggggggtatttatagcctccaaccacttcctagccgttggctgtttctgctggcgatgggcacaccggacagtctggtggtgcaccggacagacactgttcactgtccggtgcgtgccacgtcagcacgcccgttgggggtttggagcgacttgaccgttggaacccttgtcttgtagatgcaccggacagtccggtgccacaccggacatgtccggtgtgctctgacttctctgctctgagctctgccgcgaactgttcaccactgttcacttttggcagacgaccgttggcgccaggttaccgttgctctgttggctcaccggatatgtccggtgcacaccggacagtccggtgaattatagcggaacgcgccctggagaaacccgagagcgagctgttcgagtgttgttcggcctggtgcaccagacaccattggtagcacactctcaagtcctttgctccaaatttacttgactccacaactgaatttctttcttggtttgtgctgaaccttatcacctgagataaatgacatcttggcaaactaattagtccacttggtttgtgatggacgtcaaccaccaaaatcgattataggaaatgattaagcctatttccctttcaccaaccttttaagtaacttgatgtgtagttttatttacagacgcaccaaacattcaaggaggctattgcagtgtaaaagtcacttgggctaaccctaatgggtagccatatagtataatacatgggccacatgggcctagccacatgggcctaccatatatactctaacacccccccgcagtctgaacatccgtcgcagcggagttcacagactggactcaaagactagactaaagactagactcaaaacaggaagagtacattacaccataggatcccccccacagccgcaactagccactaccgatgttgaggctggagcgaaactcggcgaaggtcgaggacggaaggcccttggtgaagatatcagcaaactgggaggtggtcgggacgtggaggacctgaacagcaccgccggcgacataatcacggacgaagtggagatcgatctctacatgcttggtccgctggtgctgcacggggttggtggagaggtagactgcgctgatgttgtcgcagtagaccaacgtgctcctggagaggggactatgaagctcggcgaggagctgccggagccaggcagcctccgcgacaccgttggccacggcacggtactccgcctcggcactcgagcgagagacgactgactggcgcttcgatgaccaggacaccagattgccgcctaagaagacggcgtagccggaggtggagcgccgagtgtttgggcacccgacccagtcagcgtcggtgtagacgacgagctcggaggaggtagaccggtgaagaagtagcccgtagtccacggtgccccggagatagcggaggaggcgtttgagagccgcgaggtggggctctcgggggtcgtgcatatggagacagatctgctgcacggcgtaggagatgtccggtctagtgaaggtgaggtactgaagagcaccggcaagactcctgtacccggttgggtcctcaacggggtcacccgtggcctcagagagctttgcctgcgtgtcaacaggggtagagcagggcttgcaggcaatcatcttggcccgctctagaatgtcaagagtgtactgccgctggtgaaggagtcctgaggggcgagactcagcagtgacccccaggaaatgatgaaggacgccgaggtccttgaccggaaactcccgctgaagcgcatcgacgaggtggcgaagaagtgactgactagaggcagtgaggacaagacaatgtcatccacgtagagaagcaagtaggcagtctctgctccatgatggtggacgaacagagacgtgtctgacttggcctccacgaagcccagtgtcaccaggaacgtagccagtctggagtgccacgcccggggggcctgtttaaggccgtagagggatctgttgagtcggcagaccatgtcagggcgagaggagtccacgaaccccgccggctgacagcagtagacggtctcggtgagggagtcgtgcaggaagacgttcttgacatcgagctgatgaactggccaggagcgagcaagggccagcgagagcaccgtgcggacagtggccggcttgacaaccgggctgaaggtctcatcgtagtcgactccggggcgctgagtgaagccccgaaggacccaacgagccttgtaccgctccaaggtaccatcggcccgccgcttgtgagtccagatccatttgccggtgacgacgttggtgccgggcggacggggcaccagatcccacgtctggttggcgacgagcgccgcgtactcctcctccatcgctcgacgccagtgggggtccagcagggcggtgcggacagagggggcgccgagttttcgagtccttcacagtaaggccagaagagtcaaactcgacagaacaagaattatcagtggtaaaacaacgaatagaaagaagattgtggaccaaagaaggagcgacaagaacatcgggaattctaaaagagccaggtgagccggcggcgcccacagatgtgacaggaagacacgagccatttgctaccatgatggatgaagggagagaggaaggagggcgaacagaggtgagtataccagggtcgggagtggtgtggtaggtagcaccggtgtccgcgatccactcgggacccattggcggtgtcagagtgggagtctggaaggcagccagggcggctgtgtcccaaccaaccagcccggacggtggagcagacgtcggtgtgggccatgacgaagcggcaggcgatgtccagggtgacgaggaggcgaaaccaaaccctgctggtgaggtgaaccccagctgcgcagcagcgaacatggccgccgggggacgagcctcagaaccgggcccctggaacggccacatggagatgcgttcggaccacgggtggcggaaagtgggccaaggcgcaccctgctgaggtcctggcgacgatgcgtgggtacgggcaccattgctggaaccactaccaccaccaccaccaccgcggccaccacgtcggcgacggccaccaccgcccccgctgccgcccccgctgccgccaccgcgacccccgccacccttgctcggccaggacggtgccggagtaggtggacgagtcgggtaggggcgtcgagcgcgacgacgcacgatccgacaaggcgaggaagaggcgcggcggccagagagctcggctcgagcgccggctagcgcaaccgaggatggtggcgacggcctgggaggtcccagcggccaagacaatgcgtagattcgaggagtccggcgaccagggccggagacgaggtacagggcgagatcgacaatggggaagggtagccaaaggccaggctgtgggtggtgcaagcccggcgacaatagggtgggagagagagaaacaggctctggtaccaagttggaatgggaagctctaaccctaactcagggttgggtgatgtattaatagatcaaggattgggcgatgtattaatagatcaagggttgggtctggcccattacacaggggtgagactaattacaagggtctaacccaaaaccctaaacgggtaataactgggcctggtggtttagcaattggaactccgacatcctggccaccactgctcactctagctgtctgcgtttggcttgtgaactagagaagctgggaaggaacagacagcgactgggtgaagctttatcatatatttttcttgtttatttttctagggagaaatttatggtttggctgttatatcctgaagattgttatgaggggtgagcgttgtttgttatatcctgattcctgaatccgtgatgcttagtgttctgctttcttatcctatatatagggggtgtttgagatggcttcaggtttcagctccagtgtggatttgtagtttataatatcaatttaattagttttaatttttttaatctaaacaataaacaaaacaacttatttaaatgttttctaaaggtttaaggctctagctctatgattttctagagcacctaatgacctgctccaccaactccaccaaatttcctggagctcgaactatctcaaacagggctatagattccctagcttagtttccttgcctttctcaggcttctttttgtgttgtacaacttcttttcttttctttcaataaaatcttacagtggggaaggtgtataaaaaacgtttaaagtgttgtccttattcattgtactgctattgaagcttgtagtgtaaaattctaaaaaatacttaaccacaatcacaagtagtttatacttaatgtaaaacatgtcactccttcggtcaacaaattaaaatgtgttgccacacaaggtattgtagtgagccaggctaggagaccatggcggagtataggaagtttttttaaaaaaagagcagtttgaacactgactgcaatttatgcaggctgcaactcaacgttataggtggcttttggtgagatctccttttatccgtggcactgtggcagtctacgggcatacaactagttggattagtttgtgctcaatgcatgtttgctcttgcactcctgtgtgcgcttgtcctattgggcctagtaataatagaataaaacttgatatttgtatcacttgtaacttgttactatgtgtattatttttattcttggcgatttcttcatcaacatatcagttttcatcctggtttatgctaattaaacttttgatcatttgatggcctttgtgttactccttatcgttcttctaattcattataagtgaaagtgcttgattaaatggtcttaactttgttgctattttgtttttatggtaaaccacttgcctgtcgatttaattcatagcacacattttattctgaagggtggttactgaacgtcagcgc

SEQ ID NO: 1027 - DNA, 5651 bp, Zea mays
  Intron number 6 from transcript GRMZM2G146041_T01 (locus G RMZM2G146041) derived from phytozome v7.0 (chr-ID 5; pos 2 1039365 to 21045015)
agtctctggaaaaatagagaggcgttactttgaaggtgtgcaggtattttcttagccatagaagtgaaagaaacgcaacaccaggatattaaattgcttgtcttgacctctagtatcaatgggttgtatatttatataggaagaaacctctaataacaagaggaatcctactcggttataacatcctaaccaactttgactctaaatgaactggacgcatgcagtcctgttctgttttatctttaacctctaatctgagtcggtttctaatctagcccaagaggatcgtggacaactaaggttgtagcctatgtataacatattctaacgtcccccttaatcataacttgcataagttaagattgtctttgaatgaagctaacttcaacatagccagtgccttagtaaagccatttgcaacttagttctttgtagatataactctgacctccaaaattcctttaactactctttctctcacaaaatgaaaatcaatcttaacatgtctcagaggaccatgaatccttggatttgatataagataggtagctccaatattatcacacccgatccttgcaccaagaggacaaggaatctttattttctttaaaataaccggattcgcatgagctctgacgtggcattagttatggctttatattcagctttagtgaggctgtgggctcttgcgagcactccaagatacccgatttctaccaagatatacttcaaagcctcgtattgagtgtctatgtcatctacccaatcggcatcagagaactagagaagacactcacaagcatggagggagactttacagttttgagaccatatccaagagttaacctgacatttgtgagaatcctcgtcactatagtccaattatcattagtgggcgcatgcaagaattggcacaccttaatgattgaaaaactcaagctggatcgtgtcaaagtctaaggcaccaaaaatgcttctgtaccttattgcatcctctaactctattagttcaccttctacaatccttaacttcttctgaagtattgagcggagtcgtaggcttgtaattcatcattccaactctaccaaacaaataggaagcctatttagtccgagacaagtgaataccatcaccgattttttgtatctcaattccaagaatgtaatgcaacctcccctaggtccttcaatgaaaattctgaactcaaatcttgaaaagtagcatcactagcatccgatgaatagctagcaactataatgtcattaacatagaccaagagatatattgagacatttcccttcctataaaagaataaagaacaaagaggtgtccacctttgaatcttgaaaacctagatgcaacaatttatcactaggtactcggctctcagagcttgcttcataccataaatagcttacacacatgattgagctgtgacgtgctctcaaatccaccaggtggctgcttcatgtagacttcctcctccagaatgccatgaagaaacgtattatgaacattaaattgcctcaatatctatcctctagaaaccgctaaggatagaacaattctaatagtagctactttgaccacaagactgaaagtcttctcataacctatgtcatatcgtttcttaaaaccctccgctactctggttccatgcacagaaggaggctggggtactgtgcgcagcaggagtttggtggtctggtgttatgccttttaggcattgtactttggtccattttggactcttttcttctcttaatttaatgatgtgcagctctcctgcgtgttcaagaaaaaaaaaccctttgccactagcctgactttatatatatatatatatatatatatatatatatatatatatacttgcagtcaataacattcttggcctcatcagcaggaactagatcccaagtgttattttttcatcagcgcatcaaattcagcattgatggcgttcttccaaagttccaattgtcgtcacctagagcttcagacatgtcttgaggttcaccggtggtggtaaaacaaccatatttaatgagtaatttttccatcttgtgatcttgtccgaggacgctggtctatgtaaatagtgagaacgggaggtcggtggggtgatggagttgttggtcctgatgaaaccgtgcactgatgtcgagtcatctgaaggttctgttgcactactttctgctacttaagggaccggtagagctcgatgatgttgctgcattgtgatcaggcgcatcagagacatgatctgtaagactttgatgtgttgtttgatctgtacaagatttagcttcatttgtcctccttttggttccttgctggtaaaacaggtgaggtgagacaacttgtttttgtgcagacacgcagtgctggtctggttgctgtatctacgcaccaccctcctgaacttgggtagagcttgtacaacatcttctagcctatcaccaataacacttcatgattttcattagtagtattgtcatatgaatcattagacaacgagttcccatgttgtcaaagttcgatgaaggtaaaagggtgcaagacaacatattgatttggcccttagtctagcatcaacattagggtgaagcccaacaaatggaaaaacttcttcatcatatcctaccaaaatgtacgagacaagttattcatcatgtccttccagaatgtatgagacaagttcttcatcatcattagtcttctttgcagatgtcatatgatctacaagaaatttcatcttggcaatatatttagccactgttatgttaccttttcttgtggttgctagggtaatctgtgtgttcatggttcgagctcttgactgctacgtgtaggacttctgtagttctgaccctatctcatgaggtgtttcgtagatgtaggttgtgtgatatcctggctccagtggatggtgacatcctggccaaggcttaatagaattaatagagtactcataccaacaaggtgcatcttcttttttggaagcctatctcgaaagaacctctgggttaagcgtgcttgacacagagcaatcttggtatgggtgaccgaccgggaagtcttctcgtgtgcgcatgagtgaggacaaagtgcataaaagacttgtgttggtctgtgaggatggtttgtggtcctagagggctgccaggagtaagtaccgctggtacgggagtagacagggtgttacaagatggcaacctgacccatggcttcccgagtcatgaatgtcatgaggaagccaaagacctgttgttggagcgtgacccatcggatatacaccgggttgacgtcgtaggtcatcttgccatcctgcttgacgacgaggatattctcatcgggcggccgggcgctacagccatgccatctaggtagccttgtagctttttttttttagataatggaaaaatcatccgaccttggcctcaaatgaggttacggccatttattacaagggacggaagcatattgccaaaactcctcctatgaccacttcagagaaccccaactagccaaattaaagaacttcagctatcgaaccacagctactacataattaaacgcaacgcagacccccatccaaaattgctaaagaactgtagtagcaccctcttcacattacgacatgaagactttattaactcttggtcctcccttctaggctgaagctgagaccagaagcggcaccaatatgttgccctgaaggttacctgcacacatgatttaggagatgaattattgaacaccacatcatttctacttaaccaaatagcccaacaaattgccgatgcaacggttaatagtaggtttcgaactctgggaagcctcccgctcgcccaaaccccaaacaaatcattaacatcccgaggaggtctcaaccccgtgcttatctgaatcaaccgccaaatgaatgacgcatacaaacaactgaaaaataggtgctttattgtctccggtctactacaaaagcaacatatcttattcccattccaatgcctcctagccaagttatcctttgttaatgttacccctcttttgaggtaccacataaaaatcttaattttcagaggaagcctaagtttccaaaggtccttattatgcacccccaacccattgttaagagatgccagatacagagacttaaccgtaaacatattctcatcgggcggccgggcgctacagccatgccatctaggtagccttgtagctgcgcgcctctaaggatgggtttgcactttccttgccctaggagagacgtcggtactgtggaattggatgtcgtcgtgggatcttattgctggtgaggtttatgtcatcttcctcttgatcaggacatcaactaatagatgtaggaggtggatctgattgtcatataagaaacacgacactgagatattatattgcttgccttgacctctaggtctatagggttgtataacccgcctattacaaggctttgtcccccttcttagttgcaagggggcagccaagaaggagactggaactaggctttggccccctaaaagctaaaagccaaaccaaaggactggaactaggaagcaacttttttcaaaagctgactttctcgcagtgtaaaactgaaagcacctctagacctgcttttagcggctttcggatggaactatgaaaatatatatggaaaaacttttagcggcttttagtgggttctaccaaacaattttatgatttttaacagctcatagcttacaacaacttttttcacagctcacagcccacaacaacttttttcacggccgcagctcaaccaaacagaccctatgtatagcatattctaacaagaagtatcttgatagttgataccattaaatggaggacataaattgctttccagggcatttgcattggtacaattttgagctggcttggaacaaaagatgatgaggatggggtttatttactcaatattcttggatagacgtagtcatgaattaatttttttgtccattctatgtggcacgtaactttacagctacaccaaaaaggatcatgttatgttctttttgtgttctgctacgactgtgtttgcccaagttaatcattgcatttggttcagttccataaacattttccatgttttccaaaaaaaaagctctaacagtgtaagaaatatgtgtttttcattttcttcttatcttcagagatgtgttaggattgagacatttgataaggacttcatacgtttagaaatgtttcaaatttctgactgttatacacctgctttttggttccaaggcccaatcaggatgttaagtgtttgaaattcatacattgatgcttcatacctcggtgtattgttacaagtgacactgtaatccacagaataacattacgcataattgttgttagatgacatttgagcaaaaccaagcatgtcaccaccaaacgaacttcctatgcagttttttttctcacatcagcatatgttagtttgagattttaagtttgggctgttttagctgttgtgggtgtggcagaccaggtgcaatctcgactgcacaatagtttaattcggattggccttttggtagttgtaagttaacagcttactgactagatatctggtgtccattttggataattctgatttagg

SEQ ID NO: 1028 - DNA, 8528 bp, Zea mays
  Intron number 3 from transcript GRMZM2G315074_T01 (locus G RMZM2G315074) derived from phytozome v7.0 (chr-ID 7; pos 3 0156352 to 30164879)
gggcctcaacgccaaggaccagattgttctgctaggtaacatactgaaatttctctctactatgtctttatattagttgaaaaatgcaaggcatgcacctgtcccgatgcatgattgatactgctggatctcgcccggttcttgaatgcagtggcagaggacgaatttttttaggtatggctctacacaactgggttgtataatatttagcacacaaccaatcaacttgtagaacaattcgcgatatatataaagaaatagaacattgtctaaaatgagactaaattgctacaaaacatgtaactgtcatacttctgattttgctatatatgtcttggagacctaggcaattgcatttgcctatccttattcttttgaaatgccttcttaatattttgaagatcaagccctttgaacagttccctctcaatgtagatcaccattaaatcgttaagccaataatcacccattttgttgcgcaactcagttttgataattttcgtggcagaaaaaaccctttcaaccgtggccattgctactgggagtaacaatgctaactcaatgagccgatagaccaaaggaaatacaatatccctgccaatttcaaccattgtttttgctaggcttgcaagatcatgacaagctttgaattcatcaactcttcgcacatgaacaataaatgtcagtaactgatctttgattaacttgcgatcatcaaaagagaaatcctccaaatatatctccgtaagacgagcaagcttattcacatcaaacttgctgaatgaatctcttggatcaagacaagcaaaacgagtaagcaattcggaggatacctcattgaatcgatgatccaactctgctataagagagtcaatagcagaatagaagatgtcaacacgataaaaatgatcttgagtgatattatttcttcctcttcttgactgaccaaatcttggtattggaccatccatatctggtatatcaataccagcttccacacaaaaagctttgacttcttcaaacaatggatcccaaccttcacttcccaaatcattcaaacgaattctcacatcaactaaaaacatggcctgaacaatattttgatccttcttttgcaacagaagtgacaacttatttgtgatgcgaaggatttgcaacatcatcttcatgattaacacaaaacaaaatgactccatattagcaaccaaacctccaccccttgatggatttcgctgtccttgattcacaattcctagaacttctattattgactcccacattgtttcaatacgaagcaaagtcttgtagtgagatccccatcttgtatctccaggtctagccaatgaagtttcttggttttgtcctcttccagatgaaatctcaccatcattcaatttatccactagaattttacgatgtttatcaagcaatacatccatcctcttgcaagatccacagacattgttcacaatcaaggtgacattcaaaaaaatcctcaatagctgggcaacatcttacgacagaaacaacaaccaactgcaattggtgagcaaaacaatggacatagaaagcataggggttgtcatcacgagttagcttttgaacaccattgaattcacctctcatatttgaagctctgtcataaccttgccctcgtattcttgcaatagctaaaccgtggtcactaagcacctcaaccactcctttctttattgcctcagatgtagtatctttgacatgcttcacacctagaaacctttcaatcacttgtccttttttgttgacatacctaaaaatggtacactcgttaaattagaaactttgtaatgatataattgatcaatgaaacataaggtataaaattagaaatgtacctgataactatggccatttgctctttgaccgatatatcacgagactcatcaacaagaatagagaacaaacaatcactcatgtcttcttttattgccctcgatattgcctcggcgcaacaacttgcaagttctttttgaattgttcccgaagtcatttttgcattcttaggacaaagctcatcaaatgcctttctcacttcctcatttctaattttgtaccactcaagagtctcaagaaaattccctttatttagtgaagtaatcgtttcatcatggccacgaaatggttcaccttgcaatgcaagtagacttacaatacccaaagaagtttccaatcgagtttcatacttcacaagtgcatctttgctatgagttatgactttatgttttaaacttgatctttgattatcaaaatcctcaaaagtcgatcttgcccgattgtgcaaactactcggaccccccaacatgttttctaaatatcaacaggccattcttccattgcttgaagcccgtttttgtggaagtgtcatgacataatttctcatctttgcaatcatctctaaaaagatagcaataatagcaataagcactatccttcaccaaactatattccaaccaattgtgttgcttaaaccaatgttcctgaaatgaccttttatcatgtgctttgggaaaattatgaccaatgggttgtgttggacctttttttatgaatgccctcctatcttcacttctaatattaggagcaaattggtcaattggaatgcgaataccgggatcagagataatatgatccatatgaaactcattgactgtactacctgttcctctgacatcttgttcatattggacctcttcattgtcctctaattgagatccaatagctcccttcactattggtggattgtccacctcttggccaactccactcacatgagtacttgggtttgtactactagaagcccgactaaaatagctcttcaaatctacaaattcgcgacttcgtcctctttccctttgatttggcatcattatcatctgcaagtttgtgacaaacatcaacattcaaacaatcaaattatccaacagacaagcaattgtttgcttaccacttacaattacaggcgtgggcgtctgccgtgtgccgactactgtctggtggctggtgtccagcggggtggaatccggtgggggcgtcaggtcggactccggtggacggagggacgcagtccggtggccgacgggctggcaggtggagctcgacgcgtcgcgcgggacagggacggggcgaacgacggaacaggcagatgacactcgacgccgacagaagcttggcggccgtggctcgggggtcgggactcggggctcgggcagaccgcagatggcctcacggccagccgaccaggcacagcggcgtcgcggcttaacgtgggtgagcaggtgaggcttcaggcggcgactgtgttctggagacctgagggagtgagggttagcgatggattggctgggacttggagccgcttaggctgggccggcggacctgctaattttttttggtatggcttgggccataatgggccctccgcccctgcttgtatgcaaatgtaatatttttgattgtctgctggttatatatatatatctgtctgtgctgaaaaatggaagcaaaacgtctcattttttttttgcaatttggctcttttttcgaaacaatttcatgtttggacccctgaataacttaatgtcatttttggaccctttactcggcgtcatggctcatggcgctgaggtaacacatctcggcgccatggcctatggtgccgaggtatctagtgcgctggcgactcagatggtggcctagcacgctgatgtggcctagctcggcgccacagatcgtggcgtcgagctaagagatggcttccgccgtgtaagcataactggcattggcaggtacaagattattgattctcgtgctgaaaacatccatttgagactttgggtcacatcaaatggaacgggaaaaaatatcacgttaacaaatgcatagaagttaaggctttgtttgggagtaagtggaatgaagagaattgaggtgactagaatccctcactatttaaaattgaatagtaggggattctagctccctcaatcccctccattactcttgcttccaaacaagccctaagagaaacgaaagcatacatggtcctatctccctcattaaaataagcattcacaacttcatttagatcgtgaccatgttcctgagtaaaaaaaatcggctatccgttgtagctgatgagtcgaaaaggcaatcatatttgtagtaaacaatgattatgtgtaatatctgcttcttcagtcatactacttgacgaagaataacttattatttaatgaagttaaaaccactacgggttaatatgccacacactgaatagtaagtatttccttattttaaataacattctttccgtataactggcttgaacaactgacggatagaaaacatttaatattcaacaataaaataccattgtgtcattgtgtggctggattggattgctctgcggctgcgacaaaaagtggaaccaaccatcattgcatgcatgcagatgcttgatgcttttggtcatgactcatgagagagaatggtcaatggtgtgtgtatggctgtgcacatgcagatgcacttagtctgttggacgcggggacctgaattaaccggttggctgttgtgtgtgtgcgagtcaagcgtttgaagtgttggcagggagctcggcgccatgatctacggcgccgagctcggacatgtaggcgccagcaaagcataaggggtccagggcattcagtatcttggcgccataagtcatggtgtcgtgacgtgttacctcgacgccatgacctatggcgccggcaaatggtctaaaaacgacattaagtcgttcaggggtccaaacgtgaatttgtttcagaaaagggccaacttgtaaaaagttcggcaaaatgtccaggtctgtggccctgtcgtgtttcgggtctcctcgggttcgagtctgggtctagggctttcccagtaatataattcatgttttcgtcgggtctttaattcgagttttgggggcgggtctgcggacgctgcacctgactcgaacccacaccattgccaactctagaaagtgactaaggcttctgccaaaagtcacgatatgccgtttgaccaaggccgtgaggcgaaggaaaccataaaaaaaaccaagcaaactagaaaatgcgtgaatcaacgaacacgtaaactaccccataacatcagaagggatttgccaaaaaaaagtttaagaaacgtttgaaatcatttcgaatttatgtctcaagaactcacggttgtcttaaatcttatgcttgttcaaatattgtagacttcaatgtacttaaaggaagcgcaaaattctagtaacaagctgacgtgcccttactaaatttggttggagaaggatccttaatggcctctaggtaagggttgacttttggggcaacacctcacttttgattgaggtagtcttggctctcaaagataagagaatgtcttttgtggcatcttttgcgccaatgaaacaacattcataacatccatagagctccggattctctgaacattcaactgatctttcatcttctcaataaacttcttaaacttcatcgtgtgcatgtgctccatccgcatcatcctcgtcaccatctacttcctctttggcctctttctccactgggtctgcttctttttctttattatctgttcgctccttgatttcttcatcttcttcgatttctctgtcttctttatctacttcaggatatcaatcctctgataggtaagtaaaaaaagatgagagccttcatctcctcccctctctgcaaattcatgcaatttcttacattgctcccttctcccttatcgttttctcgaccgcttgctgcctgctttaagcctttcagagaatttcattctattataacagtcgtctgaatcctcaatcattggaggattctcctcatctacacctttagtacaagcatctcgtagaataatcctgatctctctgaaaactgctattgatgttcttacgttaacaccttcaagatcttctatccatggagtagctaacccagcaagtatgtttttatatttttcatgctctttttttcaataatacccatattctcggacccagaatgagttttttctatttagaactgacccggatgagttttcgactatgacatccaatgtaggctggtcagaagtcaaaaatgatctgcaaactgcattgtagacacattggatacgtgctgtctcagaaatatgaactacgaagattccaatagcacgtttgatatccctggacttttttcttggcaattgtatagactctcaaacgaatctcttagagcatcagggcccatcctagtttgcccaacgtccgtatctggattgagaaacctatagttctctgcaatatatatatatatatatatatatatataacaatgacatcttatagcatttaactttctatttcaaatgttccatacattccacccctccaacccttaaaatacaggtttcttcccgccagtaacaaagtaatatatcgctgcttatactcaatggtaagaaaaaatgttccacccgctggagtggtatagatcatgcgatcaggatcacaaatttttgatatgtcaaaatgtaagccatattttagccatcatgcacggatgacctcaatcccacacccaacattttttagagaatgattttcagttccatcatcagatttatctaagtatatggtggcttttttactcacttctatatccttgatgatctgaatcgatcgcacctcaaacaaaagaccatctaacagatcagttattttccaggttttctaaaagatgaatatagtcaatatgtcttttgcttagaaaacctgaaaaatatttgatctgttagatggtcttttgtttcaggtgcgaccgattaagataaagaatatggaagcgagtaataaaaccatcatatgcttagataaatctgatgatgaaactaaaaatcagtctctaaaaaatgttgagtgtgagattggaccatctgtgcatggcgcctgaaatatggcttacgttttgatatatcatgaatttgtggttctgatcgcatgatatataccactctatccggtggtacattttatcttaccattgagtataagcaacaatatattactttgttactggcgggaagaaacctgtattttaagggttaaaggagtggaatgtatggaacatttgaaatagcagtgtcaaatgaaaggtacatgctacgagatgtcactgttatatattgcagaggactatatgtttctcagtccagatacgaacgttgggcaaactaggatgagacctgatgctctaagagattcgttcgagagtctatacaagtgctaaggaaaaaagtacagggatatcaaacgtgctattggaatcttcacagttcatatttctgaggcagtacgtatccaatgtgtctacaaggccgtgtgcagatcatttttgacttctgaccagcctacattagttgccacaatcgaaaactcattcgggaatatgagtattgtggtaaaaagaatatgaaagatataaaaaacagacttgtaaggttagcttcttcatgtgtagaagatcttgaaggtgctaacgtaagaacatcaatattagtttttagagagatcaagatcattctacgagatgtttgtactaaagatgttgatgaggagaagcctccaatggttgagaatctagacgactattataatagaatgaaattctctgaagtgtttaaagcaggaagcaagcgataaaaaaaaagacaagggagaatgggtcaatgtaacaaattatatgaatttgcagagaggggaggagatgaagaccctcatctttttttacttacctatcagatgattgatatcctgaagtagataaagaaggcaaagaaatcgaaaaagatgaaaaaattaaggagcaaacagataataaagaagaaaaagaagcagacccagtggaggaagagactaaagaggaagtagagggtgacgaggatgatgcggatagagcacatgcacacgatgaagtttcagaaagtttactgagaagatgaaagatcagttgagtgttcagagaatccggagctctatgaatgttgtttcattggagcgaaagatggtcacaaaagatattctcttatctatgagagtcagaactaactcaatcaaaagtgaggtgctgccccaaaagtcaacacttacccagaggccattaagggtccttcctcaaccaaatttagtaagggcaagcgagtttgttactagaattttgcgcttcgtttaagtatattgaagtctacaatatctggacaagtctaagatttgagacaaccgtgagttcttgaaaaataaattcgaaatgatttttattttactactgtatacgatggttagattgatgttggtaactgactaactgttatgaatactgcgatatatatttctatgtgctactgatcttatgatatgttttgtgtttatctttcggctgtgc

SEQ ID NO: 1029 - DNA, 4715 bp, Zea mays
  Intron number 4 from transcript GRMZM2G048371_T02 (locus G RMZM2G048371) derived from phytozome v7.0 (chr-ID 1; pos 1 25074573 to 125079287 reverse strand)
aagctctggagttgagggatggtggctctgactatttggggaagggtgtctccaaggtttatcttatagctgactgcttgttattaattaataacttaatttgatcttctgttgtaaagattatgttaactgtagaaataatctgctcacctcttgcaagtctctgcacgcacatatgtttctagttatgtatgctaagttattaacattggttactattgaaatctaggtatttagctgcttgtagtgatttgatcaatgacccatgcagtggtctatcctaagtttacagctaggtgtgcactgtcatattttgttttgtaagctaaaacttgtatctagagcgcctacttattttctcagtttctttgtggtttgatttgccatattgatcctatgttctctattacaaatagagtacttgtggcgttctgttttacttctcggttccaaactataagacattttgatttttctagatacattgtttttaccattcatctagtctaaacagtgtacatctaagtgcatagcagaaatatgtacccagaaaaccaacatgtcatagtttggaatggagggagtagctttgttatgagcagaaaaaaatcaaatagattgacatcacaagattggtgctactagattcatcacgctagactgatgtttacctataacatgattaatattgactgatcattggacaaattgtcctagttgcaggtccatatcgtctgaatgatagacataagtgtcttaacataatcatgtacaccttgtgtatttggctgaaaatggtcggtaaccatgtcttgtatggaaatgatcctcagtccattgggaactcaccatatttacagttgaaactatttagagactatcaaaatggtgcttatagaaattagataatcaaaactttggaaatggtcataaatgatgttacctttttttttcagaaatgattcctggtaaatgggatcttcaatttccgtgttcatccctagttgtcgaggtggtcttaacatgcgtttaagtgaacacttcagatgatatattttaatagatattgctagacaaagggcatgtttggtttgtggctaaatgtgccacactttgcctaaggttagtcgtccgaattgaataactaaccttaggcagaaaagttaggcaaagtgtggcaattgaggtaacgaaccaaacatgcctaaagtgccataatgaaacgtgtgctgatatcatagcacacatgccttttaaaccacatcaatgcatgccttttacaatccgttcggaagctattattagcagccgaacggaggctgcagcttttctgattctatgacacaaattactgtgaaaaacgctgcagcaacggccggcaaaataccagccaaacggattcttaggcattatctttcccaaaattattcataattggtagctgaaatcaatggcctgcatacctgcctttttaaaataatgttttacaaggaattaagcaagtatgtcaatgggtatttaaggtcattcatgatttgataaacttcagtttttgtaataaatcaatcgaacctttgccaaggctctgtttggtttgtgtcccctagtagttgtgccaaactttggtcaaggccaagacaatttggacaggttcagaataaatgacattggatggcaaccatgccaagtcttgccacgattgtcatatcaataattttctcctcattgaaagccctgttggataaaattacaaggaataccatcaagaaagctaatcgcaaatcagacatacctttgactgatggtattatttgaagttttataatccaagaattttgaactgcatgcaaccaatgtgtgtctgccacctcacctgtgggaaacagtggtggcctggccaaatcagcttgatatgcaaccaaacagcagccaagtcctgctgctggccaaacatttgacttggctcacattggcccataaccatgcccaaatttccatagaacaaatcagcagaaatacaatttatattccagaacatgagttgcaattgtaaatcttggtacctgtacaatgctgcaaacatgaatattgtagcattttgctaaattcattctttacttgtttaacttatcctttttctctcaggctgtgaacaatgtgaattctgttattggacctgctctgattggcaaggtttgcaaccggttccctcgttctattcttatagtctctcgttctattcttatagtctctcgttctattcttatagtcattattaaacgcggtattcattgcttatatcccgtttggtctgcaggaccctacagcacagactgagattgataacttcatggttcaacaacttgatgggaccaaaaatgagtggggatggtgcaagcaaaaggtattatctaatccaagtgtatgaaaccgtggaagtgaaagaactcttcttttttccagttgcagaattgttgtttaacagttggctttcatgatttgtatatccagcttggtgctaatgcgattctggctgtgtcattagctgtttgcaaagctggggctagcatcaagaggattcctttataccaggttcctatcttgctttattagtagtactcttagtttattcagttttaactatttaatctcttattaattttttatattttgtaattgcagcacattgccaacctagctgggaacaagcagttagtgttgcctgtccctgcattcaatgtcatcaacggtggttcccatgctggaaacaagcttgctatgcaggcaataccctcaaccaagatttaacattctttcttgtttgagttttttcgcattatgtttatgctctttccatggatgcaggagtttatgatccttcctactggagctgcctcatttaaggaggctatgaagatgggtgttgaagtttatcaccacctgaaggcatttgcctcgtatatcttgtttgtccttttctttttgtagtgtcaaagtatcataatttgatatcttttgttgttccttacagtccgttatcaaaaagaagtatgggcaagatgccacgaatgttggtgacgaaggtggttttgctccgaacatccaggttagtttctgatttcacagttggggacatctgtttttttatttgtttcactttactggaacattggtctttatgtaggtaaaactgaaaacgatgttttgttatgagagttaatctgtttcaatttcctgatactaggagaacaaggaaggacttgagctcttgaaaactgcaattgagaaggctggatacactggcaaggttcaccagatatttgttttgttcagtattcacctgagacttgaagtttgtcatatgtttttcttatctctatctgaatgctaggttgtcatcggaatggatgttgctgcttcggagttttacagtgacaaggaccaaacctatgacctcaactttaaggaggaggtagaccattgttttctttctgtgaacaagttaataaacttgccagacatgtccctaactaaacattctgttttttttgtagaataatgatggttcacagaagatatctggcgatagcttaaagaatgtatacaaatcttttgtgagcgaataccccattgtttcgattgaagatccttttgaccaggatgactgggttcactatgctaagatgactgaagaaattggagagcaagtgcagattgttggtgatgaccttctcgtcaccaaccccactgtcagtaccttgtttctttccttctaaagatgacaattaaaactccagtttggttgtcataagttacttatatcttaacattttttcagagggttgctaaggctatcaaggagaaatcatgcaatgcccttctgctcaaggtaaacttatacccatccaaccgttgaatgtgttgtctttgcaccagcattcatagttcacatttccgtacatatttagttatttatctttccatcttgtgcaggttaaccaaatcggatctgtgactgagagtattgaggctgtgaagatgtcaaagcgtgcgggctggggtgtgatgactagtcataggaggtaactatagtttgtgttgctacttcatgtttcttaggtactaattttgtgattttgtctggtgccgttcctgatgttaaccatctgctgttcgtagtggtgagactgaggacactttcattgctgatctggcagttggtttgtccacggtatgatttactttctgtgcatatctaggatagagaagtttcaatcattcctgttctgaaaacatgagacagtgccttcatatttctcaaaggtcttagcaaattcaaacttttatttgactgtaaggcgtagtatcatctgtctttttgttttctttttatataacagggtcagattaagactggagcaccctgcagatcagagcgtcttgccaaatacaaccaggcaagtgattcctcgagaactatactactaaaatctcagctttctgatagtaatttgttttgtgacttgtgacacttgatgcccatcttttgtgtcattcatgtctgttttgggtttggtttgagaacaatatttggtcatttgtactaatctgtgttacttttatgatgggagcagcttcttaggattgaagaagagcttggcgctattgctgtctacgcaggtgccaaattccgtgcacctgtggagccctactaa

SEQ ID NO: 1030 - DNA, 365 bp, Zea mays
  Intron number 2 from transcript GRMZM2G144742_T04 (locus G RMZM2G144742) derived from phytozome v7.0 (chr-ID 4; pos 1 35910173 to 135910537 reverse strand)
ggagaagccacgttctggcctttgctagtgcagatgtatgcatcaggctttttgagcataccatctatttttttagggttggtcggatatgaaattaataatgtttgttgagcataactttatgtgatttttttacaagtttaagctcaatttcatattcctatatcccaaccaggacaccataattgcttagtactcttcactttatgctttataatatcccaggttctggagaaagttattcaactttatttagtgccagttgctgaatccttattctatataatgcatcctctcttggtagctgaactgggttttttttcaaatgaatcaggcaccacaaggcaaaagaagctcaggtgaga

SEQ ID NO: 1031 - DNA, 1019 bp, Zea mays
  Intron number 1 from transcript GRMZM2G045049_T01 (locus G RMZM2G045049) derived from phytozome v7.0 (chr-ID 2; pos 4 205762 to 4206780)
gtgttcatagtgcaggtaaatttgtcttattaaatgtcttctacttctgtttgtggcactatgaaatcaattctagtagaacctttaacttcctgcgcactgttacatttccgtagaatcaacggttaggattgaaaatattattaacatgttattaagtttcatttagtagatccttattctctcctgcaaggttttttggtcaaagaagaaccttatcttttttttaacaaagtacgttgattgaacttttggttacgaattgtagtttgtgttggtctgttggaactcttcaaatagattaatgaccagttagcctggctgtcaaacagttacaaaatagcgagagcaccaatcaattagtccaaattacctaaggccccgtttgtttcgttggaattgaattccattttaataattataatttagacaaaactaattaagttcatatatttatatctgtaatatatttgtatattaacctaaatcatacgagagagatagttatatactacatttatgttatagcgaagcaagtataagagtgtgctataagttgtacatcggaaaaatagcatgtaaatctatagaatcgatttccatatctcaccccatgaatttgagatagacttatatgataactttggaaagtggtggaatgtcacattctaaaaaatagcttattctattagtaagatttcaattcctcaaaatgaaagaaaacaaacgggacctaatagatttaaaaaattccagagtctgtcaaagcaacatttactcttgatttaactttatctgctacttttgcgtatgatctataaagttgctgagcactttatcctctgtacccgctatagaaattgtgatgcagccagactatgagcttgcctttttttcatgctcagtttggcgcagcttgctgtattatgctaatagctgttctcagtttggtgcagcttgccatatcgtgcttactagttgggctatatgattttgcagggcagtgcccagctgtagcg

SEQ ID NO: 1032 - DNA, 3644 bp, Zea mays
  Intron number 5 from transcript GRMZM2G048928_T02 (locus G RMZM2G048928) derived from phytozome v7.0 (chr-ID 2; pos 1 66339281 to 166342924)
ctggtagatcaattgaacaagagttccaaattcaggtgttttaatacaaacatattccatatagttcttattctctatgctttcattgtcatttttgcgttttcttgggcggatgggtttgctcttagaatctagtgattctatgattttttcacttgttgcggatgcttgcataggcaagacctacggccgctggcccaggccagagaaggtacagctagcccatcaggctgcaaaaggggctaaaggagataaagcactagacagagaaataaatctgttagttgctgtctttagagatatggctggattacagctatatttgttagttacagatttgggatgtcaaggctataaatagagggctcttgcgacaaggctgaggtaatcaggtaaagaagaaagacccttaagcctgccgcaggtaggggttcctcccccttaaatctgttgtaacctttcctcttgagcaataaactccctggtttccaacaacttggtatcagagacatagatcctgcgcttcccagccccaccaccacccctgcaccaccgcctagccgccattatgttctccaccagcgctgccaactctgctactgtcgatgatctctccgcctagctgcaatgcctcaccaccaccatgcaggaagtgcttgacaagatcaccggcaacaccagccggcagacggacatggaggataaggtcaccgaccttccaccaaggcctcctccctcaaggctgatcagggccgtctccacatcgctgtcaacaacgtccagtcgaagcaatcggtagtcagcgacaagaagccatgcgagcagacccaactcatgttccagccggaatcctctacgtccgagggcaggaccgacaccttcatcaatgccgccactcacaagctgtgtttctccaagtacggcagcaaggctgcagtcgccgcacagtggtctgcggtggacggctttgctgtctattcaggctgcatctttgtgcccactgcctcctccatgtggctggccattctagccatgacgcacggggcagggcatgatggcgtctagaagactctgcatcatctacgcgcctcgttctacaacaccaacaccacaaagcttgtgaaagactacattacgaggctaggagctgcgctacttgtcagcgtaacaagtctaagaatcttcatccagtgccagtgggcctactacaacctcttgagccgccccgttcggtgtgggttgacatcgccatggactttatggagggtttcccttgcgtcggtgggacgtctgtgatccacacggtggttgaccgcttctccaagcgacaacgtcgtcaagctttatggtgttctatgctccattgtcaacaattgttttttttcgaaaacgcaggagagctgcatatcattatattaagaggaaaaaaggtgaggataggaaacctcatacaaagccaaacaaaaccacacacacacgcactctaggatagctagaaatacaatgataatgttaccaactgcactcatgaccaagaaagaaggtcgccgattagtgcgctggagcggaaaggatgctatctaatccactggctccagccctacaccagttgtgagactcctccttgacccacttgatgaccatggtagaacaaggctgctctccattgaagacacaacggttgcggtgattccaaatggcccaagccccaagaatgataaaagaattgaggccctttgacaaccccttatacgttggatcacccgggaccgcgacaactccttcccaccaaacctcaaaggaagaggtcgcaaggttaggagcaaggtgctgcaaacggacaattttcagaatctggaaccaaacgtcacgtgagaagacgcaggaaactaacagatggtttagggtctcctcctgatcacacaacggacagagatgagggtgaggcagcccctttcttgccagacggtcagttgtccagcagcgaccatgagccacaagccatatgaagaacttgcattttccaggtgcccaagctttccaaatcctctcccagggttcaaatgttgttgatccaaaaaagaaaccagtgtatgccgaattggtggaataaagacctgagctagagagtagccagatgtgcttatcctcatggtcctgttgtaaatcccagtgagcggtgagatcccaaactttgaagaattcagatagaacacttagggtgatagcaccttgaatgtcctgcacccatccccttgtagtgagagcattgtggacactcctctttttagccctagaagagaccgtcttgaccaggtgaggggccaactgacagagactctggccatcaatccatttatcagtccaaaacaaagtgtttttaccgttgcccaccaccgaggaaaccgctgccgagaaaaaggccttcactgaagggtgagcctttatattaaaggaagcccaaggccggccaggatcagttttttgcagccagagccagcacagcctaagagcccaattcattttttgtaggtccgagatgcccaaccccccaagctttttttggtctagtaaccttgttccaggctaccatacaatgtcctcccaaagcattcttccttcctctccacaagaaacttcttctgattttgtcaattgctttaatcacccaagtaggtagatccatggccatagttaaataaatagtcattgacgacaagacagcttggacaaggatcaatcttccagctttggttaacagatcagctttccagctgggaagacgacccgcaattttatcaatgagcggttggaggtgctgtttcccaagcctcttcaaggaaagaggcacccccaaatacttgcaggggaagctggcaacgacgcatggcaacaagttgtgaatgatatccagattttcagcagcacaccggatggggaagacgctgctctttgacatatttgttttaagcccagaagcctctccaaaaatcctaccctgtcttcaccagcactttctcgcaggaccttttccgtctctttggcatccagctgcgaatgagcacagcctttcacccgcaatctgatgaccagtctgaggtgaccaacataattttgggtgtctacctctgctgccttgcggtgcgggcgatcgtcggcgcagctggctacggcatggcattttgggagtgtgcaggggaatgcaagagagctttagactggggaagggagcggaaaggactgcttctgattagttgccacggtgaccgaaggagccaaactcgtctgggggagacttctttgatggaagtcctggtacaagctactgtccgtgtacagcttagaggcccttgatattctcagctaaccgattgctagagtaaaggaataagccctgtagggataaggataaggttccctggttattctctgctaacaactgtgtgaagcttacaataatctgcaagggaacttttatatagagccattgtatccttggtatagatcaacttgtgcaaggggaatggatagtttgcctatgatgttgaagcatcactttcatgtctgattggccgagccgaatctaaccgatttttatttgttgcacagatatcatcccttcgcaaggagttggacgaagcaaa

SEQ ID NO: 1033 - DNA, 2627 bp, Zea mays
  Intron number 1 from transcript GRMZM2G067929_T01 (locus G RMZM2G067929) derived from phytozome v7.0 (chr-ID 1; pos 1 24817397 to 124820023)
cactccactccatcctcgttctttgaatcgatctggtaaaccttggcctttcccccaaatcttcccgctgtccttccaccccctcgcctccataaccccacccactgtactgcttttgtttcacttgctttctgttgaatccatgctacatttgactgtgaattcaggaaatcattaagtataatcgaagtcccgttgatttctggttttgtaggacattatgatctgttttcttgatggtacataaactgagtttttatagttgttagatgcttgttgtattcgtttgtttagttcagactgcagaggttcaacaacagcaggcttagggtatgtgttgatcttaactccattttcattagcccattagaagcaatgtgttattttttggttacattattatcttttggccgtgaatggcaccaatacataattagttggtatgcacagacaactttgtaagcctgacttggtgatagctatggtattatgtaatccaccttagtacacaacactagctgttcatgcatttacttatctgtcatgatatactccaattatcctagtacatctaaataatctggtaaggtatattacatcattcatttgagttgtacactaataaacaaatgttatccatgtgtagagccttgtggtgaaatacttgtcacttgtgtccgtcatcttgtttgttggtttgtttatctatctttttgcaagctcgtccaagagccggccaaaagcaagcaagaagagatgttgatttacttataggttgtagttttaggtgtatctggtggttttgccagaggaactcttagtagtttgagctgagtgaaagcttttaagtttacaattactgaccacaccatgaattacaacgacgtgagcatcagttttgaaggtttagcaaactctggcattttctgactttcatgctgtccatcttccaaatgaagcccttttggaggcaaatctagttttatctgctctatgttatgtcaatactgattttgtatatttgtaagtgctgtggcaatactgattagttatgattattgaaaatatataatttaatggatatgatatacatatttatccttctttaagacactctatttttgtgtgagtgcagtggcaaatgttttcggctgttggccatgaatttatttagtattttatttgatctcatgagattagaacatacatctctagaagctttgaaggacattccttagtcgatatgcccaaatgatggttttcttgaccaggtgacatttgctattcaaccattaattactaagtaaccttgaagtataatttatttagtatgctattcagcctttactaagtaatcttgaagtataatttatctgcactgattgatttttgttctgtgctaccagctaaccagggtcattaaaatgtagtgttggccatttttaactatgtcagctcacctagaaaattttccttaaccaagcatcccatatacaacacaatgtcctctagagaaaacatttgaattctttgtcttggaacaatgtctcggtctgcaggtctggttctcaaatacaatcgtcaagtcttgcgagcatttctttgagcctcattctctaccaatgaagcactttcctgtcactagaactgaactatagtcttcatagtttcactacactcaatttgggaattgtatatcataattgtacttttcttttctttttctatatactaaattttcttgtttttattaacacaattgtgaaggcttatcattacacgtccatgtgtcattgtgctcacttggatcttactaaagacaaagtatgggctgagaaagttcattggcatttgagtttgcatggctggccttattttggtcgtattttctgatgtgtgttcttcttatcgagcaagtatgaacaagcttcattttttatacatatggaattgcactattacagttctgatgtcatactgaatgcattttcttgaaaaaatgataatatgaatttacaacaacgaatgttcatctcacagtatttacatagatgagaataatgtccatattacctcactatgacatggttaaataaaatttatcacaggaaatgaaactgtcagctatgaaaacccaaagccaactgctggaatacattgccttgtctttgtagtctcctgctagtttatccagcaaacagtttatgcataagggtcttcttttggttaattagggttcttttggtcagttatcatatgatcacttgttgctttattaggatcctgtctggggaatcttcatccttttcacccttcacctgtttttgtttcgaatacaaatttgtatgttttgaatgggattgctaaagtgatattacagttactttctgtcggtttaaagtctgatgataaatggagtgtggagtatggactactaccatttattcctactgcaaaatcatttaaaatggatatagttttggccatgttactacaattgcaacgatggataagttatccctgcttgttctttatgggtatgtgttctagattctagaagattaatgcttgaacccatctaacaatgttgtggctttaaccgatttcaggtgtggatctgatttgta

SEQ ID NO: 1034 - DNA, 23992 bp, Zea mays
  Intron number 2 from transcript GRMZM2G026900_T01 (locus G RMZM2G026900) derived from phytozome v7.0 (chr-ID 4; pos 1 09395293 to 109419284)
agaagtaagtcactactactgctgtagctttactgagttgcttcctcctataaacttatgcaccagcctatcctcttttaagttttaaccatcacccatgctaagggtcaccaaaataattgactagttcatgaattttgctcattggacaatcagaaacgttaaccttatttattccattataatggccttctttggtgtatcgttttgtttatcatcttaggagctgcacacatattgtgatcattggaccttaacatatatgcaaggcacacaccttctgttaatacgtgattatgtgcagtatccttcgaggaggaaacattggaaaatggcatatgaggaacagtagtttgtgatatacataattgagctcaaaagccaattacaagatctgctttagaagcatcttgaaatgcacgtaataaatattaatgaaatgagtcacctgacaataacatccgagtgactgttttctttctattttttttccagcaagaagtcaaacccagtaaatagttccatccaaatgaatgttctagtcagggtttaagctagagctgcgcctatcacattggatgatggaataagtcttgagcatctgtgaaggacagcgtgctgcaggactgaagggatagcaccccctttagcatctagaggacaacatgagctttttgactgtcctctttagtctcttttagcatctagaggtcaatcctgttgtgtagtgtggtagtgcagcctctagggctataaatatgtgtccccaacccttagatgggtatgacattttgagtagtgtgtgagaaataaaagaaaattgcaccaactcgtagtgtcatcctctcgatgagagttagagtcccgctgcttacaattgatgagagttcgagtcccgctgcttacaattggtatcagagccaaactatcctgcagcctaaacatctcttgttcatctccttcccgtgcctctccccacgcttagtcggcaacaagagctccaactgttccgccctctcctgctcagacgagcagcctttcgtctgagacagcctcttccacacgcaacgaccccttactagcccaccatgtccctacgctcggtcacttcgagtgcgcggcgccagcaggaggtcgagatcgccgcggcacaagaacgcgagcgagcagcagcagcggctgcagcgacaacggcgagggcagcacggctggcgacggcggaactggcggcagcgagagcggaagtagaagcagcggagacgacggatgctgcacgtgcggcggcagcagagcttgaggctctgcgcgacagtagagctggcagctctgcttctgtcgacgacaacaccaacgaagagctcaggctggcgagggaagcagcgcgagagcaggtggcacagtgggcagccgtgcatccccatgggggcgcgcgtggcggtagcccaataggcgccgacggcgctccgggcgagggcgcacgcggcggcaaaccagacgggcgtagacacgccggcggtgctctcggcggcggcgaccgagtcgacggagatcgcggcctctacaggcggcgcggctctccctccccggatcggtcccatggttgccccggggcccaggccattgtcagggacatcggtcccggcggtgggtggcctaccctcaccaagaccaactacgtcgagttggccacagtgatgagggtacggctccaggttcgccagatctgggaagcagttcggtacgacgacgtcgactaccacgaggatcgacgggtgctggatgcccacattgctgcagtcccgcccgagatgcagttttcgctttcccagaagcggactgccaaggaggcctgggatgccatcgctgcgacccgcatcggcagcgaccgtgcccgcaagaccacactgcaggcacttcgcaaggagtgggagaacctggccttcaagctaggtgaggatgttgatgactttggtctccgcctcaacactctgttgcagaagatgatgcagttcggtgacgacacctacgatgaggagagagctgttgagaagcttttccgttgcatccccgagaagtacaagcagattgctcgctcgatcgagtctctgctagacctctccacgatgacgatcgaagaggcgatatgtcgtctcaaggtggtcgacggcgacgaaccacaggctccctctgggcctatcactatcggcaggaagctacatctcacacgggagcagtgggaggcctgccagggtgacaagaggaagggggagtcctcctcgacacgaggccgcaaacgcggcaagccgcgcaaggcgcgtggaggcgcccaggccgggacgcgaggacatgctgagggtggtgctcgtggaggtgtccaaggcggtgccgtcggcaacaagaagccgccacgtgacgacgactgtcacaactgtggcaagcttggccactaggccagggaccgtcgacagccacgacgtggccatgccaacgtcgcacaggcggaggcggaggatgaggctctgctcctagcacatgcaagcatcgagctttctccagtggcaccggccgcagcggcactccacctttatgagtcgaaatcacgcgctttcctcggcgacggctccagcaaagacatgatcgaaggatggtgcctcgacaccggcgccacgcatcacatgaccgaccgacgggagttcttcaccgagcttgactctagcgtccgaggctccatcaagtttggggacgcctctggcgtagaaatcaagggcgccgactcagtcgtcttcaccgtcgcgtctggtgagcataggcttctcaccggagtctactacatccccgcgttgaggaactctatcatcagcttgggacagctggatgagaacggttcgcgcgtggaggtcgagcattgagtcatgaggatctgggacccctcttgtcgccttcttgccaaggtacgcaggagtccaaatcggctttacatcctcaatgtgaaggtggcacaaccttgctgccttgctgctcgtcgagacgacggggcatgacagtggcacgagcgcttcaggcaccttaacttcgaggccctgaagcggctcagtgccaaggagatggtacgagtcttgccgtgcctttgaccatgtggagcaattctacgatgtctgcgtgttgacaaagcaaagacgactcccctttccctagcagtcgagctttcgagccaaagagaggctcgagctcgtgcatggggacttgtgtggcccggtgacaccagccacaccaggaggacaacgctacttcttgctgctcgtcgacgacctctcccgctatatgtgggtgatggtccttggcagcaagggagaggctgtgaacgccatcaagcgtgtgcaggtcgttgcggaggcggagtgcgaccgcaagttgcgcgtgctacgcatcgacaacgacagtgaattcacagcggctgaattcgcgtcgtactgcgcggatgagggcgttcaacgccactactccgcgccgtacagcccgcagcagaacgacgtcatcgagcggcgcaaccagacggttgtggggatggctcgggctctcctcaagcagaggggaatgttggctatcttctggggagaggcggtggtgacagcggtctacatcctcaaccgctcgtccaccaaggcactcaacgggatgacgccgtatgaggcttggcatgggcgcaagccggcggtctctcacctacgggtcttcggctgcctcgcgttcaccaaggagcttggtcacatcggcaagctcgacgacaggagcaccccaggggtgttcattggctgcgcggagggctcgaaggcctaccacatccttgacccaggaacactgcgtgtgcgcacggcgcgcgacgtagtgttcgacgaagggcgaggatgggcctaggacaaggcggtggacgacggcatgactctgacgttcgacgacttcaccatcgagtacgtccactttgagggagccgggggagtaggcgacccttcttcgagtaggcctaccccaacccccaagtctccaccgactacaacgccacgctctccagctccggctacaacgagctcttcgccatcacgccatccgggccacgactctggctccagcgagctctccgtcaccacgtactccaacaccaacggtaccctctccgggaacgttctctccgatgccagctcgtgtcgagcatgacccagtggagctcgtgaccccgctctcccacgacgaggagcgcgtcgacgcgtgctacgacggcgagccgttgcagtattgaaaggtggagagccttctcatcgatccgtctgccgggctcggcgtctcacattcttgcggaagagttgcatcttgcatacgacgatggcgagcctcggtcttttgcggaggccgagaaacacgcagcttggcgtgccgcgatgcagtcggagatggacgcggttgagacaaaccacacctgggagctcgctaatctccctcatggtcatcgcgcgatcacctttaagtgggtgttcaaactgaagagggatgaagccgacgccatcatcaagcataaggctcgcttggtggcacgcagtttcttacaacaggaggggatcgacttcgacgatgctttcgcccccgtggcacggatggaatccgtgcgactccttgcgctgtcagcctaggagggatgacacgttcatctcatggacgtcaagtcggcgtttcttaacggcgaaggaggaggtctacgtacactagccgccaggttttgcgatccctggcaaggagggcaaggtgttgcgcttgcgcaaggctctctatggcctgcgacaggcaccgagggcgtggaatgccaagctggattccacgctcaaaggaatgggcttcacgtgaagcccgcacgaggcggccatctatcggcggggcaatggaggaagtgccctgctggtgggtgtctacgtcgacgacttggtgatcactggcgccaaggatgcagaggtggtagcgttcaaggaagagatgaaggccaccttccaaatgagtgacctggggcatctctccttctacctggggattgaggtgcaccagggagactccgggatcacacttcgccagaccgcctacgccaagcacattgttgagctggctgggctcaccgactgcaacccagctgtcactccgatggaggagaggctgaagctgagtcgcgacagcacgacggaggaggtggatgctacacagtaccgatgtcttgtggggagccttcgctacctcgtccacacacgacctgacttggcatactccgtcggctacgttagtcggtttctacagcgaccgacgacggagcatgagcaggctgtgaagaggatcattcgctatgttgcggggactctcgaccacggtcactactacccgaggtgccctggggaggcacaccttgtcgggtacagccacagcgaccacgccgttgacatcgacactagtaagagcacaagcgggatcctcttcttccccggcaagtgcctcattagctggcagttggtcaagcagcaggtggtggccatgtccagctgcgaggccgagtacatagcgacctccactgcttcgactcaggcgctctggctggctcgactgctcggtgatctcctcgggagagacactggagcggtggaactcagggtggacagctagtccgctctagcattggccaagaaccccgtgttccatgaacggagcaagcacatccgggtgagataccacttcatccgagactgcttggcagaagggagcatcaagacgcgctacatcagcaccaaggatcagcttgcaggcctgctcaccaagccccttgggaggaccaagtttcttgagctttgctccaggttcaggatggcccaactttctcacaagacgatgcccaagacttagggggagaatgatggaataagtcttgagcatctgtggaggacagcgtgctgtaggactgaagggacaacatcccctttagcatctagaggacaacatgagttttttgactttcctcttttagcatcttagcatctagaggacaacaggagctttttgactgtcctctttagtctcttttagcatctagaggacaatcctgttgtgtagtatgttgtgtagtgtggtagtgcagcctctagggctataaatatgtgtccccaacccttagatgggtatggcattttgagtagtgtgtgagaaataaacgaaaattgccccaactcgtagtgtcatcctctcgatgagagttagagtcccgttgcttacaattgatgagagttagagtcccgctgcttacattggactgtactaaaaacttgacctgtaggggggtaagacagcccccgagtattgtattaagaagatcttctcacataggtcgagaaaaccctcgaacccatgccccacccatacacagcggcatcgaagcccatgtgagaacgaccgcgatcggggctgagccttagacctgtgctttggcgtgggacagacgaggggattttttaactacagcctgaaattcgttcccacggggagtcgaacccaggacttgaggagtgctgctcagaccacctaaccaactcggctacaggccctttcaccacattggactctactagtaaagagatgggccttcttggttgatctctgcatcaatgggaatgcaggaaaagtttcttctcacccagagttcctagcagctttaaccctgttagctattttcttcagttgtcgtggttgccccactgttttttgttggagtgagagaacggatggagtgctttactgctttatgaagtttgatctctttcgaatgacatttatttggttgaacatttttgctgttatagaccataatatcacattgctgttacacagttatgagtgcatcgtttgatgcttggctggagtaaacggcctccaatagcttcttgcgaggtcatttgggagggtttcataacggtagtgtggttctgtctgttttcttttcagcttttattttcagtgctcttctagagtgatgtgtgtgtgtgtgttattggggatttcttccctatcttccaaaccttcttaacgaaatggtacacaattctcccatgtgtttgacaaaaaaaccactacatatttttgtgtcaaaacaccctttgtattttctatctttttgtggttgtggtctgtgcccttgccagggtgtgctacagtagaaaatctaagttcttgactaaacatatgtgatgtggattggttgtcaggtgttgtacaacaacaacaaagccttttagtcccaaacaagttagggtaggctagagttaaaacccaacaaaaaccacaaatggttcaggaacatgaatagccttttccatttgcttctattcaaggctaaatctttaggtctattctatcctttaaagtcttctactgcctcttactatgtcaacttcgaactttctttccttgcttctcttcccattactatcgcgccttaggatcccactacacactagtgcttttggaggtccctgttggacatatccaaaccatctcaatcggtgttggacaagcttttcttcaattggtgctactcctagcctatcacatatatcatcattccagactcgatttcttcttggatggccaaatccaatgcaacatatgcatttcccgcaacacttatatgctgaatatgacgtctttttgtggtctaacattatacaccatacaagataacatgtctaatcgtcatcctatataacttgccttttagcttctatgccaccctcttgtcatatagaacgctagatgtttgacgccactttctccaccttgctttgactttatggctaacatagcatggatccaaaatatggtaggtattctttctggacactacttgatcttccaaactaacatgtccttcctcatgtgtagtagtgtcatagtcacacatcatgtattcggttctactgagtctaaaaactttggactctagagtctcctgccacaactctagttttctatttactcatgcccgacttccattaactagcactacactgttcgcaaaaagcacacatcaagggattttcattttatgtcccttgtaacctcattcatcaccaaggccaaaaaggcaagggctcaaagttgacctttgatgtagtcctattctaaccaagaagtcatccatgtctccatcacttgtttgaacagtagtcacaacattgttgtacatgtccttaatgagtccaagtccaactacttcgttggaacttaaagtttgtctaaagcccaccatgtaatgttggtattttgtcataagcttctctaagtcgatgaaaaccatgtgtaggtcctactctttgtattgttcaataacttgtcttattaagaaaatgacttctatagttgaccttcggggcatgaaatcaaattggttcatagatatcctcgttattcttttcatacgatgcttgataactctctctagtaacttcatggtgtggctcatcaacttaattcctctataattggtacaactttgaatatctcttttattcttgcagatcgataccgatatacttctctactcgttaggcattttgttctaccgaaagatatgggtgaacaacttggttagccatactagatctatgtccccaaggcatctccatgtctcgattgggataccatcagggcccattgccttatccctttcacccttaatgcctctctaacctcagattcatggaccctacgcacaaagggcctcttgatgtcatcaaaagagtaatgtagctgaaaggttatgtcctcattctccccattgaacaatttgtcaaaatacgctctccatttatgcttggtctcatcctccttcactaagaggtgctccgtttcatcctccatgcacttaaattgcttgaagtctcttgtttctgtcttacagaccctatcgatcatatatatgtccttctctccttcctttgtactcacatgttggtaaagatccacatacactctaccttttgctacacttatagctcgctttgcagtcttatttgctatcttgtagttctctatgttgttcacactaatgtcatggtacacacatctatagtattctttattctccttaatagccctttctactttatcattccaccaccaactatctttacctcaccttcactccattttgttgctccacattgtgggaaaccctaaccctgtgttagggttgggtgttgtattaatagacttcagttaacagggcctggccgattacacaggggtgagatagtaattgcacgggaaaaccccaaaccctaaacgggtattctaacacccccacagtcgcaactatatcctgtacagatgttgaaactggatcgaaagtctaaaaatacactcgatggtaaccccttggtgaagatgtcagcgaacttgtcggggaccataattaggggtacccccaagactcctaatctcagctggtaaccccatcagcgcaaagctgcaaaggcctgatgggtgcgattaagtcaaggctcggtccactcaagggacacgatctcgcctcgcccgagcccagcctcgtgcaaggacggccgaccccggaggattcacgtctcgcccgagggccccctcaagcaacggacacaccttcgactcgcccgaggcctagtcttcgccaagaagcaaccttggcccgatcgccgcgccgaccgaccgaatcgcaggagcatttaatgcaaaggtggcctgacacctttatcctggcgcgtgcccttcagtcaacagagccgaagtgaccgcagtcacttcgccgctcctctgaccggcctgacaaaaggacagcgccgcctgcgccgctccgactgctgcgccactcggcagagtgcggctgacagcagccaagtccggcctcgagcgccataggaagctccgcctcgcccgacccagggctcggactcgggctcagccccggaagacgacgaactccgcttcgcccgaccccagggctcggactcgggctcagccccggaagacgacgaactccgcatcgcccgaccccagggctcggactcgggctcagccccggaagacgacgaactccgcttcgcccgaccccagggctcggactcgggctcagccccggaagacgacgaactccgcatcgcccgaccccagggctcggactcgggctcagccccggaagacgacgaactccgcttcgcccgaccccagggctcggactcgggctcagccccagaagacgacgaactccgcttcgcccgaccccagggctcggactcgggctcagccccagaagacgacgaactccgcttcgcccgaccccagggctcggactcagccctggcctcagccgacggtctccgccgcgcctgacccaggggctcggactcgacctcggccttggaagacagactcgacctcggaggagcctccacctcgcccaacctagggctcagaccgaccacgtcacaggaggcgccatcattaccctaccccaagctaactcaggctacggggaacaagaccggcgtcccatctggctcgccccggtacacaagtaatgatggcgccccgcatgctctatgacgacggcggctctcagcccccttacggaagcaaggggacgtcagcaaggactcgacagccccgacagccgtccttccgccaggctccagcgctcctccgacgaccacgacaccacacgaaccgggtgccaaaacctctccggctgccacgatggcatgtacttagggcactagctctcctccgctagacacgttagcacactgctacaccccccattgtacacctagatcctttccttacgcctataaaaggaaggtccagggccctcttacagagggttggccgcgcggggaaggacgggacggagctcgcgtaagccgctcgctccctcccgcgtggacgcttgtaaccccctactgcaagcgcacccgacctgggcgcgggacaaacatgaagcccgcgggtttccccttctacgcctgtctccctccggcttcttccccccttcgcgctccgtctcgcgccgacccatctgggctggggcacgcggcgacaatttactcgtcggttcagggaccccacgggttcgaaacgccgacagttggcgcgccaggtaggggcctgctgcgtgttgacgaacaacttcccgtcaagctccagatggacagtctccagcaacctttccagcccgggacggtgctccgtttcgggagtcttgagttcatgtccctcgacggcagctacgacatgatactccttcccccgccgcgcgacagcgacaatggcggccgacaacccgcccgccggcggcggaatcgacgacgtcttccccatgtggtggaagaacaacattcgggcttgtccagtcccctcccccgccgacggaggaggcggggcaaccaaggccaagcaggaggtggcacctcatcggctgtcgagcgagtcgacggcgccggcgccccaacagggggtacgtcgggcatcgacctcgcgtctgagacgaagacgagcgccgtctccccgcgacacgccaactccaagcaaacggacgacgccagcacgctcgcaaaggacttgctgggcgtcaccctcgtacctgagacgacggtgcagtctgcccctgacgtgacttcgtcaccgcccgtcgaccaagaggtaccgaccgattccctggatacgataccccgtcgaccaagaggtctcgtgccttttggattcagcctcgacccaccaagcgacttcgctttggtggatgctctcatagaggcgagtccaaaccctccggggtatcgtatgcggtcaccctgggaccggctggcagccgtatcgacctacgggccctcgggttccgaggaagatgacgagcccgacttttgttgggatttctccggacttggcaaccccagtgccatgcgggactttatgaccgcatgcgactactgcctttccgactgttccgacggtagccgcagcctcgacgacgaggactgcggcccaagtcgtgaatgtttccacgtcgatctagggggtcccgacgaaggcaaccatcttggtatgccagagagcggtgatccccctaggcctgtgcctcacgttgacatccttcgggagctagctgtggtccccgtcccggcggggggtcatgacccacagctcgagcaaatccgcgagatgcaggccaggctcgacgagggagcaggaacacttgagccgttccgccgggacatcgggcaggaatgggcgggctaacctccggccggagaagtgcgtcatctaccccagggcatccagcaccgcatcgccgacgatgtcagggtaaggccgccaccggtttccagtggggtcggccagaacctggctgcagcggcaatacttctccgcgcgatgccggagccatcaaccaccgagggacggcgtatccagggagagctcaagaatcttctggaggatgtcgcggtccgacgggccgaaagctctgcctcccgaaggcaggggtacccctcggaacatcgcaccgcgacttcccgattcatgcgggaagcctcggtccacaccgggcgcacgcgcaacacagcacctgcggctccgggtcgcctcggcaacgaacaccctcaccgcaaccgtcgaacccacctcgacgagagggtgcgccgaggctaccaccccaggcgtgggggacgctacgacagcggggaggatcggagtccctcgcccgaaccacttggtcagcaggctttcagccgcgccatacgacgggcgccgttcccgacccggttccgaaccccgactactatcacaaagtactcgggggagacgagaccggaactgtggcttgcagactaccggctgtcctggcacctgggtggaacggatgatgacaacctcatcatccgcaacctccccctgttcctctccgataccgctcgagcctggctggagcacctgcctccggggcagatctccaactgggacgacctggtccaagccttcgccggcaacttccagggcacgtacgtgcgccctgggaactcctgggatctccgaggctgccgccagcagccgggagagtctctccgggactacatccggcgattctcgaagcagcgcaccgagctgcccaacgtcaccgactcagatgtcatcggcgcgttcctcgccggcaccacctgccgcgacctggtgagcaagctgggccgcaagacccccaccagggcgagcgagctgatggacatcgctaccaagttcgcctctggccaggaggcggttgaggccatcttccggaaggacaagcagccccagggccgcccaccggaagatgtccccgaggcgtcaactcagcgcggcaccaagaagaaaggcaagaagaagtcgcaagcgaaacgcgacgccgccgacgcggaccttgtcgccgctgccgagtacaagaaccctcggaaacctcccgaaggtgccaatctcttcgacaagatgctcaaggagccgtgcccctatcatcaggggcccgtcaagcacacccttgaggagtgcgccatgcttcggcgccactttcacaaggccgggccacccgcggagggtggcagggctcgcgacgacgataagaaggaggatcacaaggcaggagagttccccgaggtccacgactgcttcatgatctacgatgggcaagtggcgaacgcctcggctcggcactgcaagcaagagcgtcgggaggtctgctcggtaaaggtggcgacgcaagtctacctagactggttcgacaagcccatcaccttcgaccagggcgaccaccccgatcgcgtgccgagcccggggaaatacccgctcgttgtcgaccccatcatcggcaacgtcaggctcaccaaggtcctcatggacggaggcagcagcctcaacatcatctacgccgagaccctcgggctcctgcggatcgatctgtcctcggcccggccaggcgctgcgccttttcacgggatcatacgatggagttgagtggaagcgttgtctttgccgaatactctatttccctttcaattctatgactaagtataagaatacacttgaaaacacattagtcatagacataaaagagatataatcaaaggtatataagtgagcgatgtgtgcaaatatatcaatcgaaattccaagaattaagaatgtttagctcattcctaagtttggtaaaagttgtctcatctaatggtttggtaaaaatatcggctaattgttctttggtgttaacataagcaatctcgatatccccttgttggtgatctctcaaaaagtgataccgaatggctatatgcttagtgcggctctgttcaacgggattatccgccatgcggattgcactctcattatcacataggagagggactttactaaatttgtagccatagtccctgagggtttgtctcatccaaagcaattgcgcgcaacaatggcctgcgacaatatactcggcttcggcggtggaaagagctactgagttttgtttctttgaagcccaagacaccagagatctccacagaaactgacaagtccctgatgtgctcttcctatcgattttacaccctgtccaatcagtatctgaatatcctaataaatcaaaagaggatcccttggggtaccaaagaccaaacttaggtgtatgaactaaatatctcaagattcttttcacggccctaagatgaacttccttagtatcggcttggaatcttacacacatgcatacagaaagcataatatccggtcgatttgcacataaatagattaaagatcctatcatcgaccgatataccttttgatctacggatttacctcccgtgtcgaggtcgagatgcccattagttcctatgggtgttttgatgggcttgacatccttcattacaaacttggtgagtatatcttgaatgtacttcgtttggctgatgaaagtgccctcttggagttgattcacttgaaatcctaggaagtacttcaactcccccatcatagacatctcgaatttttgaatcatgatcctactaaacacttcataagtagatttgttagtagacccaaatatgatatcatcaacataaatttggcatatgaacaaatcatttgcaatggttttagtaacgagcgtaggatcagctttgccgactttgaagccattagtgataaggaattctcttaggcattcataccatgttcttggggcttgcttgagcccataaagcgcctttgagagtttatagacatggttagggtacttactatcttcaaagccggtaggttgctcaacatatacctcttccttaattggtccattgaggaagacactcttcacgtccatttgatagagcttaaagtcatggtaagtagcatagacaagtaatatgcgaattgactcaagcctagctacgggtgcataggtttcaccgaaatccaaaccttcgacttgtgaatatccattggccacaagtcgggctctgttccttgtcaccacaccatgcttatcttgcttgttgcggaatacccacttggttcctacaatattttgattaggacgtgtaacaagatgccatacctcattcctcgtgaagttgttgagttcctcttgtattgccagcacccaatccgaatctcttaatgcatcttccaccctgtatggctcaatagaagacacaaaagagtaatgttcacaaaaatgtgcgacacgagatcgagtggttacccccttatgaatatcgccgaggatggagttcacggggtgatctctttgtatcgcttgtggactcttgggtgtggcggtctttgaccctgttcttcttgatcatcttccttgtcttgatcattgtcatctcccccttgatcattgtcctcctcttgaggtggctcatcctcttgatcatcattttcatcatcttgagcttgatcctcgctttgagttggtggagatgtttgcatggaagatgatggttgatattgtgcttgtggaggctcttcggattccttaggacacacatccccaatcgacatgttccttagcgtgacgcgcggagcctcttcatcgtctagctcatcaagatcaacttgctctacttgagagctattagtctcatcaaacacaatgtcacaataaacttcaactagtccagtggatttgttgaagactctatatacccttgtgtttgagtcataaccaagtaaaaagtcttctactgctttaggagcaaatttagacttttaacaaaaataaaacatttgctaccaaatactctaaaatatgaaacatcgagctttttaccggtgaggagttcatatgatgtcttcttaaggattcggtgaaggtagagccggttgatggagtagcaggcggtgttaattgtctcagcccaaaaccggtccggagtcttatactcatcaagcatggtccttgtcatgtcaagtagagttctattcttcctctccactacaccattttattgaggtgtgtagggagaagagaactcatgcttgatgccctcctaaagaaatccttcaatttgagagttcttgaactccgtcccgttgccgcttcttatctttttgattctcaatccgaactcattttgatcccgtctcaagaatccctttaaagtttcttggttttgagatttttcctgcaaaaagaatacccaagtgaagcgagaataatcatacacaattacaagacaatacttactcccgccgatgcttatgtaagctatcgggccgaataaatccatgtggagtatctcaagcggcttgtcggtcgtcatgatgttcttgtgtggatgatgggtaccaacttgctttcctgcttggcatgcgctacaaaccctgtctttctcaaaatgaacatttgttagttctaaaatgtgttctccctttataagcttgtgaagattcttcatcccaacattggctattcggcgatgccagagccaacctatattagtcttagcaattaagcaagtgtcgagttcagctctattgaaatcaactaagtatagctgaccctctaacactcacttaaatgctattgaatcatcacttcttctaaagacagtaacacctatatcagtaaatagacaattgcaacccatattgcataattgagaaacagaaatcaaattgtaatctaaagaatctataagaaagacattggaaatagaatggtcaggtgatatagcaatttttccaagttctttgaccaaaccttatttccatccccgaatgtgatagctctttgcggatcttggtttttctcatacgagtagaacatccttttctcccctgtcatgtggtttgtgcacccgctatcaataatccaacttgagctcccggatgcataaacctacaaaacaatttagatcttgttcttaggtactcaaacgacctttgatcctttcacattataaacaagcaccttgggtaaccaaacacaagtctttgagcccttgtgtttggccccaacatatttgacaactaacttgcctgatttattagttaatacatatgaagcatcaaaagtcttaaataaagcaataggctcatttgatccagtaggagttttctttttaggcaatttaacatgagtggattgactagagctagatgtctcattcttatacataaaagcatgattagaatcagagtgagacttcataaaatgaattctcctaattttgtgctaaggataaccagcaggatataaaatgtaactcttgttatcctgtgccatgggagccttgctcttaacaaaaaatggacaatctcttaggggcattaagcttgacattgtcttccttttcgaagccaatgccatccttaatgccagggtgtctcccattatagagcatgctcctagcaaatttaaattttttattttctatttcatgctcattgattttactagtcagttgtgctatgtgatcattttgttgtttaattaaagctaggtgatcatgaatagcatcaacattaatgtctctacatctagtacaaatagtaacatgatcaacactagatgtagagggtttgcaaacatttaattcatcaatcttagcatgtaacatgacattctcatttctaagattggaaataaaaacattgcaaacatttaaatctttagccttagcaattaatttatccttctcaatcttaaggctagaaattgatttattcaatttgtcaatcttagcaattaaactaacattttcatttttaagattggcaaatgaatcatcacaaacatttaatttctcaaccttagcaattaatttggcattttcaattctaaggttagagatagtgtcatggcaaatgctaagctcactagttaaattttcacatttctctacttcctgaggataggcattttttactttaacatgctttttgttttccttaataagaaattcctcttggctatccaagagttcattattctcatgaatagtttctatcaattcattcaatttttctttttgttgcatgtttaggttggcaaaaatggcaagcaaatatcttcatcatcactagagttatcctcattactagatgttgcatatttagttgaggctctagattttaccttcttctttttgccatcctttgccatgaggcatttgtggccgacgttggggaagagtaggcctttggtgacgacgatgttggcggcgtcctcgtccgaggaggagtcggtggtgctttcgtcggaatcccattcccgacacacgtgggcatcaccgtccttcttcttgtagtatttcttcttttccttcctatttccctttttatcgtcgcccctgtcactgtcactagaaacatgacattttgctataaaatgaccggacttaccacacttgtagcaaaccttcttggaatggggtttgtagtctctccccttcctttgcttgaggatttgtcgaaagctttcgatgatgagcgtcattttctcattgttgagcttggaggcgtcgatggggagcttacttgacgtatacttttctttcttctcctccgttgcgttgaatgcgacgggttgcacctcgggtgtggaggtgacgcctcgctcgatgatttgtttggagcctttgatcatcaattcaaagctctcaaactttcctataacctcctcgggagacattagcttgtatgtaggatcaccacgaattaattgaacttatgtaggattaagaaaaacaaatgatcttagaataactttgaccatttcatggtcatcctattttgtgttccgaggttgcacacttgattcaccaaggtcttgagccggttgtacatggcttgtggctcttctccttggttgaggacgaatcgactgagctccccctcgatcgtctcccgcttagtgatctttgtcacctcatccccttcgtgcgcggtcttgagtacgtcccaaatcgctttggcactcttcaacccttgcaccttattatactcctctcgacttagagaggcgagtagtatagtagtggcttgggagttgaagtgccggatttgggtaacttcgtccgaatcatatccttcatcctctacggatggtacctgtgctccaaactcaacaacgtcccaaatactagcgtggagtgaggttaggtgatgcctcattttatgactccacatacaataatcttcaccgtaaaaaaccggtggtttgcctaatgggaccgaaagtaatggagtacgtttagaaatgcgagggtagcgtaaggaaatcttactaaacttcttgcgctcatggcgcttaaacgtgacggacggcgcgtcggagtcggaggtggatggtgacgaagagtcggtctcgtagtagaccacttttttcattttcttcttcttgtcgccactccgatgcgacttgacgcggggaggtgattcctcccttcctttggcgccggactccttcgatggagctttcccgcggcttgtgtccgttttcatctccctcttggcggatcctcccgacatcacttcgagtggttagactctaatgaagtaccgggcttcgataccaattgaaagtcgcctagagggtgaataggcaaatctatattttataaactttaagcacaactacaagccgatgttagtgttagaaataaagtcgagtccgaaagaggccgaaaacaaatcaaccaaagaaatagagcgaatgacacgatgatttgttttaccgaggttcggttcttgcaaacctactccccgttgaggtggtcacaaaaaacgggtctctttcaaccctttccctctctcaaacggtcacctagaccgagtgagcttttctcctcaatcaaatgggtcacttagaccccacaaggaccaccacacaattggtgtctcttgctttgattacaagtgtcttgagaacaagaatgggaagaagaaaagcgatccaagcgacaagaactcaaatgaacacgaaaatctttctcactagtcactaattgtttggagtgattttggacttgagagaggatttgatatcttgtttgtgtcttggagtgaagtttagagcttttgtattgaatgcaatggctgaaaacatggatgcattgaagtggtggtggttgggggtatttatagccccaaccaccaaaacaaccgttggggaaggctgctgtcgatgggcgcaccggacagtccgatgcgtcaccagacactgtccggtgcgccatccacgtcacccaaccgttagggttctgacggtttcgaccgttggagctctgacgtcttggtgcaccggacagtccggtgccgcaccggacagacactgttcactgtccggtgcgcctctggcgcctgctctgacttctgccgcgaactgtatctctgtcagggcactgtgcagtcgaccgttgcgcgaatagccgttgctccgcttggtgcaccggacagtctggtggcacaccggacagtccggtgaattatagcggagtgcgcctggagaaacccgaaggtgaagagttagaggtcgatccaccctggtgcaccggacgctgtccggtggcacaccggacagtccggtgcgccagaccagggttctctttggtttcttttgctactttcttttgaaccctaactcggatctttttattggtttgtgttgaacctttggcacctgtagaacttataatctagagcaaactagttagtccaattatttgtgttgggcaattcaaccaccaaaatcatttagaaaaaggtttgaccctatttccctttcagatcccccctgagagaactggtgaaactgggcctcgaggtgtagtgctcgagcatcccggttcccgaggaactattccttgagagcgagccacgcctgtcgagcagtgtccgcctggtcacggatgatgtcctgtaactcaagtgtaatgatgtcgtggagccatgagaggacaacactgtccatcatacaccatgatggagacaaagggcggcgaggctgtcgaggacgtggtcggcgagagcgtaacgccgaagtgtgaggacctgacccaccaacgagggtagtggaaggacgtcgggtccaacacaatggacacgagggtcctgatgctatgcagttcggcggcctgagcgtggagagcggcgatgtggtcggcgtcgagtccagaggcggcctcgggtgtgagcggaggatgaccgaggatgaggcgctgcgcggtggccatctaggcggtcagagtagcgcccatggcatgctcgtgctccagggcgagggacgcggcgcgctggcgctcctgcgaggcagccacgacggcctagatggtggatggtagcgactagcaaggagtcggtggtgggtgccgtggaggatgcgatgatgtcggtccaggcgggtgcggtgagagcgggaaagccaggcgaggagcctcgacaccggtgctgcgttgcaacggccgtaggaggggcgtcggggaggggctcgaggccggtgatgtagggggccctccaacatcgagctcgctgcgggggtcgtggagagcgaagccggctagggaggggccgacactcagaccggccagggagggcttggcgctcaggccggccacagcgaaggaggcggcgacccgtgagggggccaggcctgtggtggagcgcgtgggtagggccacggcggtggcggtggtcgcgctagggccagtcggcgcggcggtagtggtcgcgccagggtcggtcggtgcttacggttagggcctcgtcggggctgtccgcgccggtgggggatgtggggagggcctccatgcgccgccgaaggggaggggagagcggcggctagagcagagggtgggggcggtggctgaaggagcagccgccggctgggtgggagggtgagagaactagggagaaaaataacctagctttataccatgtgggaaacactaaccctgtgttagggttgggtgttgtattaatagacttgagttaactgggcctagcccattacacaggggtgagagattaattacatggggaaaaccccaaaccctaaacgggtattctaacacacctctgtggccaccttccgaatgcatgttgtcatcttcttccttctaagtgttctgtttgatgacccctttcttgaagacctttgttgtctcccctttcagttgccaacactttgctctcgcaatcttgactttttatccctagggcatacacctaaaaacgtaagtccaccacaataagtttatgttgagagacaacacactctcctggtatgaccttgcaatccaagcatgctcgtttatcctctcttcttgtgaggacatagtcaatctgagtagagtgttagccactactataggtcattaaatggtattctctcttacctaaagaaagtgttgattattgatagggcaaaaggtaccggaaagtctaagactttctctctctactgattcctactaccataccaaaaggccaaaacctccatgaatcgtctcaaaacctctacttgtacctacatgtcattgagatctccaatgaaaatcttctcactagttggtatagctctaaccatgccatctaagtcttcccagaagagtcaacattttcaccgtgtcctacttgggggggggggggggcatatgcacgaactatgtttaagaccaaatcagccatgacaagcttgactaagataatcgtatctccttgctttctcatatccaccacaccgtttttgaggctcttattaatcaaaattcctccatttctatttgcagcctccatcgccttctgacccttccatttaatctcttgaacgcataagatatttacacatctattagtcgctgcctaaactaactcacttaacttacctgtaagtgaccctacattctaactacccaaatagatcctagttcgttcgactaacttctttactctttgaacccatccatgatatgaagacccttactcatttttcgctacgcgtggatatcgatgtagcagaccactaaggaagcaacaactcgatctttgttcacaccgtatttagatcatgacacgacgcgtcaccaagggctgccaacccaatgcttgcccatttaagaacatacctggattttgatatggcgtgtcactaagagggttacaccccaacggatttcttctgggtttcgtctccattagagtgggctgaatggctaggttcaacttggctcgtcaagcctatcacaaccctctattaccaaggcttggacctgctatgttgagacaacataagcagagttttaggttttataactttctcaaaatcaggaagtcctatattggcttttgaatattatgctaaaatgtgaacataacattgtgacgattaattcttcttccagggaaggtccgacgttagtcgttgcttgtggctggg

SEQ ID NO: 1035 - DNA, 337 bp, Zea mays
  Intron number 2 from transcript GRMZM2G166064_T01 (locus G RMZM2G166064) derived from phytozome v7.0 (chr-ID 3; pos 1 7582024 to 17582360)
gtcaggagaaaaacagccgtggtaagttattgagtccttagttctctgtttttctttttgtgaaacggacttaaatactagcataggtattgaaaattcatgtgtctaaaactatttttgtttgactaccaagacaactggcgaatctaatgattcaaagtagataaactgtttatagtttgacttttacagtgtactgatcttgatttgtccttaagtgtaacttaactaaaactttgctttgtgttcgtatgcatgaataaaacaatgcatataatgctcagaatctaatgctatttatcttacgatacaggaagtagacgccgaagcagctcct

SEQ ID NO: 1036 - DNA, 3862 bp, Zea mays
  Intron number 8 from transcript GRMZM5G806449_T03 (locus G RMZM5G806449) derived from phytozome v7.0 (chr-ID 5; pos 2 15291133 to 215294994)
gtagatttgttttatcgaagagatcttcctctaaggtttgtaattaattttcgggaatcgcttctcttactaattctttaatggctagcacagcttcttgttcaagtaatactcttttattcttgcattctggttatatcatgctctacttctgtttgcattcgggtaatttattatcaatcctggtagtgaacataactagactggacaacctgtcctctgcccatattgtacattgatgcatttttgaacagccatattaatagtgtcgatttgaaatgttagcctatgttccgtgattagtagaaataaaaagtccaaaaactgtttttttgctcttctacctgagttggttatgtggcctgagtagcacttctcgggtcctgagttcgactctccacaggagggaatttcaggctgtggttaaaaaatctccttgtctgtcctacgccaaagcaaaggtcgaaggaccgaccccggtcgcggttgttctcacatagtctacggtgccgctgtgtattgggtggggcatgggttcgtggtttactggtttttctcgacctgcttgacttcttaatgtaatgccgaggggctctcttacccccaagtcgggtgttttttaacttttaagagttaaatgctccagtggcctcagaacttgtcaagggatgtaatttaggtccacgaactttaaaaatgcatttctaggtcattgaactttttttttttcgaaaacgcaggagagctgcgtatcaatatattaagaagaaagggtgaggcaaggaaacctcgtacaactccacacgaacccacaaacactaggctatagggagaaggagagaattaacatcaacaacaacaaaagacatctactcccgtgaccatggagactcaaattaaagaatacccactgaaattactggagcataaggatgttagataaatccctggctccagccctataccagagatgagcctcctccttgacccaattgatgaccatgctttgactaggctgcacaccattaaaaacacagctattgtggtgattccagatggcccaagcaccaataatgatcaaagagttcaagcccttgtgcagccctttgtttactagaccagcagaaaatgcagcaaccccttcccaccaatcttcaaaggaggagcacgcagggttaggagcaagatgctgcaacccaacagatttcatcatctgaaaccagacagcccgagagaaaacacaggaaaccagcaagtggtttgtcgtttcttcctcttggtcacaaagtatacaaaattgagggtgaggcagtcctctttttgctagtcgatctgctgtccagcagcgatcgtgggccacgagccacatgaagaacttgcatttatttggagcccatgatttccaaatccttttccagggtttaaaagttgttgctccaagaaagaaaccggtatatgccgatttggccgaatataaacctgagcttgaaagcctccagctatgcttatcctcctgatctggtgttaagacccagtctgtagtgaggtcccaaaccttgaggaagtcagacaaaacatttacagtgatagctcctctaatatcatggacccagctccttgagatgagggcatcgtggacattcctcattctagccctagaagagaccatctggaccaaatgaggggccagctgacatagactttggccatcgatccaattatctgtccaaaacaaagtgtttctgccgttgcccaccaccgaggagattgctaccgagaagaaggccttaactgaaggatgagcatttattttaaaggatgcccaaggtctgccagtatcggttttttccagccagagccagcgtaatctaagagcccaattctccaaattcttttggccttgtaaccttgttccaagctaccaagcaatgtcctcccaaagcttctttcctccctctccacaggaaattccttctgatcttgtcaattgctttgaaaacccaagaaggaaggtccatggccatcattaagtagatattcattgaagacaggacagtctggactgtaatcagtcttccagctctagtcaacagatcagctttccagcagggaagacgatgtgcaattttatcaatgaatgactgaaagtgttgtctgccgagcttctttaaggatagaggtccactccttatatatgcaccaaaaaagacaggacagtctggactataatcagtcttcatgtgcagcggcggcgtaccacatattcttaaacttacaaatttggtgcatcttaggtttatttttggatcatactgatcactgcggtgtgtcacttaacaagatcaaagacctaaaaatgcattttcaaagttcatggatgccacttatcccttgacaagttcagggggcgctggtgcatttaactcttttttatggattcaactgctgtgacattacagtgaaatttgtgatataataatgccaaaaaccatgcattgattccatcattatgttctgcacatgaaggagaccacagaaccaacttctcttgagttgcattggttagaccgttgaagcccagaggtcgagaaacccctatcggtctgtcaccagtacaggttcaaaggctggccgtaagggcaaagttgggggggacatctctccctctggttgagtccttttgttttttttaaagaactctgtgaatagtattttaatgggccagtgcgcacgtgtgttgtttttgtttttcagctaaggagtgcaaatggtctgtcttgtttttgaaacctggacttgcatatctgataacacactgcctagcaggcaattatccctccatccatctttgatctgtgtattataataagtaagcactgggatgaaggatatgtgttcgccaaggtgctattctgcactctcctagttgtgcttatgcgcagggatggagccaggaaaaaaattatgaggggctctatgggctcgggagcgataggggggctggagccccatccgtcccactgctagaattgtccctgacttgcgcgttgggcagcgggggtactgcagacctagggggcgttggtggcaccactcatgcgtatgtgacgtaaggtgggtggacatgtcatttctggtgtcttccacaagcagatctgctctggccacgatggggaggtggggagctggagacattgagaagcggtgcaggggacattgggtgacattggtgtgggtgtgcgtgatccggttggggcaggcgacggcagagggcacaggcggggtgaccgagcagggtataccaggagagagcaagccagcgaaggataatgtggcagtgggaagcttggagatggtgttgttcagatttgggatttggctgtaattttatggccctttctcttcaaagcttggcccactaggccctttctttagagtacatgtgtgtatatggcaatgcctaggcggagggtcaccgcttagagagcacctagtggttttttaaccttgccaaggagtacataatctcctccgtaaaaccattactccacaggaaactagctgcgtttttgctgcagaccaattgggataggtatggcatttttttgtcctgcatgctaaccgaagcatcatgcaactcccacttgagatgcaactggcttctgctgttccatatgcaatgtgtagatcaaatttggttctatctttttacgtacgcgcagatcaagatggatggagtagtatgtcatgtgctgattgtatgatactttcaagtttagaaacaggaagcttgttgctatgattgatgtggacaggaaatatgggcataccattattaacaaactcacttgcagaggttttg

SEQ ID NO: 1037 - DNA, 15093 bp, Zea mays
  Intron number 1 from transcript AC234164.1_FGT003 (locus A C234164.1_FG003) derived from phytozome v7.0 (chr-ID 9; po s 24955280 to 24970372 reverse strand)
agcggccaggcacagctttgggattgaagcggaaggtggccgctgtcggtgttttgggtccgaccgcacacccagggttgcccctcgaggtgtttttaggagtaggacggtgtcaacgactgtagcaaaatggttcgtgccgatcgcacgagggacaatggacaagatttgcaggttcgggccgcttagaattgcgtaacaccctacgtcctggtgagtatatgagcgtggttacaagaagattctctgcagagagttttttgtgggtggcaaagtagaaccgggtcgatcgatctgaaggggtgccccctaggccttatatactcggccgtggagcagtacaggtgatacgataacaacaagtagctaaaagatagtgaacctcttgagtttatccctacgtaatcttcgccgacttatcctcgcatggctctgttgcatgggggcttcagcgcgggaaagtcgggtctctgtttgtgattcattcgttcgacgttgtgggccgcctgtgtttgcactaatcagtctcacgtcttctttattggttgtctttccctaggcccacgaaagaatgaccttacgaattattgggcccttgggcttttcgtgaggccttttacttctttagtggacccaggggatatctatcccccacaagcccccgatctttgggttgatttagaggtaatcaacccaaagatccaaggtccagaaaatgacttcctgctatcttctctggctctgatcactcgtccgaccaaagtttggttttgtgcttgtgccttagaggtcggcattttggattgtaagactccggacttcattgggtgcaccggaggtgcacccaatgggtgtagccccccgacctttgagtagattttggaagataatctactcgaaggtcttcttccaaaggttatctccattcgcgctcctgcatctcggttgaggattagtcttttcaatcttgctctacgccttagaagtcggcgctatactggtttagaataatattccatggggtgcaccggaggtgcacccaatgggtgtagcccccgaccttcaaatggattttttaaggataatccattcgaaggtcttcctttcactcgtggaaactggcatgaggctattttgcattatgctttggaggtcagcattatgtcatcaatattttgctgccaaggtcagcgtatattttgtctttagcagccgagtttgcaatccatccatatcttgctaggtagtgcaatttatttgcttctgcgattgattggacgtttgatggacgttctctgtctagtcttcacgtcgcttctgtcggccatatcttgtactttgctggttatatttggctttcctctgatccttactgatatctcatttttgtcttgaggtattcactgcatgccctgcacggatgtgaccgtttgaaaaatatactgataattcctgggcgtcccccccccaatgggtgtgggcaagggatggcttggtacgctgagtgttttagccggttgcctctgagtagtaatgcgatgggacggctagtgtaatcatatcctttgcgctgttgactggagtcccaatgggtgtagtgttgcatgaaacggcgtccgccgtctgacgtgtcttcgggtgggtggaagtgcttattgaatgccttgcgactgttcagtgaccgcggttagaagtgagcggttgcctttcccgtctataaataacccctttgcttctctggtttcttcacatctcttcgctgctccttactgccttcttttccttccctctgtctacttccgccatgggcaagaacaacaagcgcaagcgcgagccgactcctccatcggaggatttcggtgactcgaaatactcggaggaggagttctcctccgagtccgaggggtctccggctcccgtctctcccccggcgtcgtccgatgactcggacgactcccaggggatagccgcggaggtctggacgtacatccgggccgtcgagcgctccgggctcgaaggctcggatgagtcggagtactccttggatgaggaggactcggacggcggcgacgagggtgaagacgacgacgacgacgacgacgacggcgacggcagcggcagtggcaggggcggcggcgacggcagcagggacagcaccaagggcgacagcagcaggggcagcaccaagggcagcagcaggggcagcaccaagggcggcggcggcggcaggggcagggccagtggctagacgccactggtcttcttagatattagtatagtttagtatagctagaataatgtagtagtaattagtgtaatttagtagtagtagtaatgtagagtagtatattgtagtttagtagtagtagtaatgtagagtagaattagggaagcaccaactcgtgaagagttggtttgtaaactcgttaacttccctttaatgaagactgtcgtttatccccccttttgatgacttgtcattgcttttgctgaacgttgaactgattcttctgatatagtagaaacaacgccgagcgatgtgaagattgacatcagcgttttagaagtaacactgagcaatcgaacacaagaccagcgttttagaggtaatgccgaatgataggaggtcggcatcggcattttagaagtaatgccaagcgacaaaatacggggctggcatttcagaaataacgccgagtgattgaatgtcggcgtcggcattttagaagtaatgctgagtgtttgaacacgtggtcggcgtgttaaaggacacgccgagtgattgaaagtcggcgttcggcattttagagtcaacaccgagcgattgagcacgtggtcggcgtcggcattttagaagtaatgctgagcgtttgaacacgtggtcggcgttttagaggcaacgctgagtgatttgaaggtcggcgtcggcattttagaagtaatgccgagcgattgaacacgtgatcggcgttttagaggcagcgtcgagtgatttgaaggtcggcgtcggcatttttagaagtaatgccgagcgattgaacacgtggtcggcgttttagaggcagcgccgagtgatttgaaggtcggcgtcggcatttttagaagtaatgccgagcgattgaacacgtggtcggcgttttagaggcagcgccgagtgatagccagcttctcaagttactttgaggaaaatgaccgagtgatgaggtggcacattggctttcttggaaataactgttggatatccacgtggcatgctgggatttcggagatgaccgccgtgtgatgactggacactttttgaaagggtatctggctcaagaatatcccttaagagtcgcgcttttagccgcctttgctttccgtgccctagttcttgcatttccgcatctgagtcttctctgccactcgcctcctactctgtttcgccagcgagaagcaagatggcgcccaagaggaagactgcgaactcgtctgccgcggtgatccccgccatcgaccccaacagtcagttacccttcgcaggtaaccatatgtctgtgatttctgaagttgagcttttccgccttgtttccatcggggttctccctccacgggaactctgttcttggcgggcttgccacgggactactgtcccaaccgaagatacccacgagtcagtggtttacactcctttccttcttcgcggcctcggccttcccatatctccttttttccgcggcatccttgatttttatcacatcaacctgactcacttgaaccctaactccattctccaaatctctattttcgttcacctttgtgaagcttatctcggcatgctgccgcactttggtttatggaaatatctgtatcactgccgtcctgggatggccgggggggcaacatcagttggtcggaggtgcaagtttagagatgcgccgtgggcggaagaccgagtatctcgagatacccctcaaagacagcattaaaggttggcgtctggagtggtttataatggataattatggaaattctctcccttcccgctcaggaagacagccggacgttcgtactccgagttggactgagtctcccacggaccaagaagtggccgaggcaggcgtgttgcttactgaagttaaattactgaaagagagaggtctgactgccgaagctgtggtcacagattttgttttcaaaaacattcagccgctgaaagacagggcctatccagcatatctttaccgagggctggccgactcaacccgagttaccaataggagaattccttctgctgatttggtgagccgactcgaaatgatcctcagaggtaaagtttcaaacgttggtgctccagtggcatactcggcttggaacctgccttctcccaaagatttcactctttttgtgtccaatccgcccgtgacagatagcaatttgggtcttagagtgcaaccttctgctgaagaggtccgttccttagttgcttcgctcggggagatacctgatgatgaacggcaggtttattttgaagtgcccctgaaccctagtgatgcagacataaatgacatgctcgatctgctagctgaggattcatctgatactgctcctgatggtacattggcagtggtgccccttccagaggttgatgcgaccttggatgtctcgaaacctgtcaatactcgcccgaggcgtcctagccgaaccagtcagcccgagccttctgctgatgagcagaagaagaaaagaagacgcctccggcgagtgtccagctttgacgaggatgccagcaccttagctcctgctgccgaagaaatgactgcaactggccttgctgacattgaacccaatgggtgtgctccgcctgctgctgaccccaatgaggatgctgtttgtgctgttgctgtggaagatgaggaggaagagaatgaaactccattaactcggaaaaacagtcggcagttcgtcgctagcggtggtagtagtggggttccttctcctgccttgtctgctcttattggtctgcaagaactgtccatggccaattttgatcaagctctagaggatatggtccctgagaacttgttgttggaacctgcagacgttgatgcaacagaaacttgtgcagccgtgccagatgctgggttgaggttgtcccgtgcctcgtcgaccttagagcacgatctcgagggtcgggatgatgatttggatcgtcctgatcctatggaagtagctgaaggcccgtcaaccttagaggtggtcacggcagagagcttggatcccttgaatagcgctgacatgtgcccagcccccgagggtgtcgccggggaggactcagctcaggtgaggagtgtaggccactacccagcccccgagggtgttgccgggggtgacccggctcgagtgggcagtgccaaccttgacccagcccccgagggtgtccgagcgaggtctccctcctgcacttccatggatgttcatgtgggttcacctccacactctggcggcataatggtggctcaaactccggatcagggggtcgctttagagggcagcatccccactggtctggcgttaggctctgctgaatgtactgagctcgtccctgctggtctgctacaagctgcttcgggtggtggtctggcacctggtcatcatccgatttctcctgacttggggatcccttcgtttttttccaacttccaggtgttgtactgtgctttaatttgatctttatgttgcatgaattgttgccattatgttcatccgctcttcttatcaggctttggtggatggaatggtcggtcagctgaagtcgcagggtgcttccatcccggaggtggcttcatctcttgagcgttggaatccggtgttgcttcggggtcgtgtatctgagttggaggccactaatgctggttagtgtcctttcttcttcttctttgttcttgcccgtgggttgttttaccttctgacctcattttgtttgaatacctcttgatagggaggactcggcagatcacagttcttgaagaaaaactttcccaagatcaagctgaaatggctcgacgatgcgctgacttcgaggagagatattctcaaagtcagatcgagttgagtcaagtctctgcagctttggatgatgccaacgctctgagttcttctcttcatgctcagcttgactctgagaaggtagcttacgaacccgtgcttcgccttatcatgctcttggattctgaatgagttgatttttgcttgtaggaagaaaaacacatccttgctgcttctcgcgacaacttggacagattgtaccaagattccagcaactcgctgaccatcttggagaggagccaccgttttacgatggaggagcttgacaaccagcgccgtcaactgcaagaatcctcggacgaagtggcccgccttacacagttgctatcggcaaaggacgccaccatcaagggactccgagcttctaagaaatccattgctcaggagttagaaactgctcaacaggctgttaaagttgctgaagaagctgctgtcactttcaaagctcagcgcgataaggccctggacaaggccattcgggcgggacgaatcttgatgagaagacccggcgtggttgtccctgaagatataagagccgatgtgaatgctacccctgattcctcgaattgcccttcttcgtcagtcgttcctgagaaagacattggaaaataaagaaacagttcacgtgctctgagcgcgcagttagcatgatcaagtactcgttagaggttatcggcttgtcattcaaatgacgtgattactcccttattgtatcagaatttattagtttgcaagtttgtggtaacgctgcacgatgattatgaagtttgtttgcgggatatggagatcatcccttgaactgcatgagcgcgagtatgctataccgatttaagccgtcaatgactttttagccggtaactccgttagtagggtatagtggtcaccctaggtaaagtaagcgtgagcatgttgcaccgccttaagtcgttgccgacttaagtcgattgctccgtttgtagggcatagtggtcaccccgagttaagtaagcgtgagcatgttgcaccgccttaagtcgttgccgacttaagtcgattgctccgtttgtagggcatagtggtcaccccgagttaagtaagcgtgagcatgttgcaccgccttaagtcgttgccgacttaagtcgattgctccgtttgtagggcatagtggtcaccccgagttaagtaagcgtgagcatgttgcaccgccttaagtcgttgccgacttaagtcgattgctccgtttgtagggcatagtggtcaccccgagttaagtaagcgtgagcatgttgcaccgccttaagtcgttgccgacttaagtcgattgctccgtttgtagggcatagtggtcaccccgagttaagtaagcgtgagcatgttgcaccgccttaagtcgttgccgacttaagtcgattgctccatttgtagggcatagtggtcaccccgagttaagtaagaatgcaagtcaatcataaatgagccaagtatctttgaaatctctctttattgatgacgtatttccattatacagaatacatggtcgctctggctgttttgaaatacagctaggggtagaactttcggaggtgctctatgttccaggagttcccaacttccgtgccatccatttgggtgaggcgatatgatccgggacgagtgacttctgctactacgaaaggtccttcccataagggtgataacttgtgccgtccctcccccgttagaattcggcggaggacgaggtctcccatcgaaaagaaacgttgccgcacagctttgtcgtggtagcgccttagagtctgctggtatcgtgctgattgaatcactgcattcagtcgttcttcctcaagtacgtcaatatcctccagcctagtggcttcggcttctgctatgctttcgaagatcaatcttggcgccccaaacttgagatcagcaggtagcactgcctccgacccatagaccatgaagaaaggagtgtttccatgcagggcccggctaggttgggttctcaagctccaaacaacataaggcaattctcttatccattttcctgcgaatttttcatttttatcaaagaccctttttctaagtgcctccaatatcattccgttggctcgctcaacctgcccgttggctctcggatgggctacagatgcatacttgatctgaatgcttttttgctcgcagaagtcaaagaattctgaactggtgaagttggatcccaagtcagtgatgatactgtttggtatcccaaatctgaatattatgctttgtatgaattccacggctttagcagaggttaaagaggcaatgggctggaactctatccatttagtgaatttgtcaattgccaccaatacatgggtgtatcctccttgagctttcttgaaaggtccaatcatatccaatccccagcatgcgaaaggccaagttactggtatggtttgtagctgctgcgctggcatgtgctgttgcttcgacaggtattggcaagcttcgcatctctgaactaactcggctgcatcattcttcgccgtcggccaatagaatcctgacctgaaaaccttcccgactaatgttctggatgctgcgtgtactccacactgccctgcatggacttcctccagaagttgctttccggtggacgggagtacacacttcatgaggacgcctgacgcgcccctcctgtataatacctccccaatgagtgtatagtgagctgattgtctggcaatgcgctctgccgagttcttgtcatctggctcttcttcattctttatatatttaataatcggttgcctccagtcatcagagtctgactcgggttgatctatgataatgcactcttctatttgatccgttgagatgctcggctggagaatttcttgcacgaagaccccgggcgggacttgagtccgaccggatccaagcttggacagtacatcagccgccgtgttccgatctctttctatatgatgaaactccagaccttcgaatttatcttctagctttcggacggcggtgcagtatcttcccattgaatcacttgaacaatctcattccttgtttatctgactgatgactaccagagaatcttcgtacaccatcagtctcttgacacccagtgatatggtgatgtttaatccgtgtatcaaagcttcatactcggtagcattgttagaggccgggaatagcaactggagagcatacttgaggtgctcgcctccaggtgcagtgaaaagaattcctgctcctgctccctgcagcttcagcgagccatcaaaatacattcgccatacttctgccgtttctggattatccggcacttgctgttctgtccactctgatacgaagtcgaccagtgcttgagttttgatggcagtgcgaggtcggaactcgatatcatgggaccccaactcgcaagcccacttggctattcggccaatggcttccttgttgtgaagaatgtcccctatcggaaaaccagtaactactgtgactttgtgatcgtcaaagtagtggcgcagcttgcgggcagtcagaagtactgcatataatagcttctgaacttgaggatactttttcttcgatgggcctagaacttcactgatgaagtagacaggatgttgtaccgggtaggcatgcccttcttccactcgctcgactaccaacgcagtgcttaccacgtgagtcgtgcaagagatatatagcagcagatcttcagccggctgagtcggcgtagctcgccggggcggtttcaatactggcggtgttgtcaggaatttcttcagtgcgtctagagcttcttgtgcctctgaagtccattgaaacttatccaccttcttcagcagtttatagaatggcaggcctttttctcccagcctggatatgaatctgctcagggctgccatacatccagtgagtcgctgaaccttcttttgcgatcgaggagcttccatcttcatgatagcttcaatcttatctggattagcttcaattccccggtggctgacaataaatccgagtaattttcccgctggtaccccgaagacgcatttttcaggattgagcttccatctatatcttctcaggctgttgaaaaccagctgtaagtcttcgatgaagttttccggattctccgttttaatcaccacgtcgtctacgtaagcctccacacgcttgccccagtgatcggctaagcatgtttgaatagctctctgataagtcgctccagcgtttttgaggccgaacggcatggaggtataacagaaagcaccaaacggggtgatgaacgccgttttttcctcgtcttcttttgccaaactaatctgatgatacccagaatagcaatctaagaaagacagcatagaacatccagcggtggaatccaccacctgatctatcctcgggagcccgaagggatcctttggacagtgtttgttgagatcagtatagtcgacgcacatgcgccaatccactttattctttttgagtacaagaacagggttggctaaccactcggggtgtaatacttctctaataaatccggccgcgaccaagcgggctaactcggcacgaatggcctctctcttgtcgggcgtgaaacgacgcagcttttgccggatcggcctcgcctgaggatagactttcaagttgtgctcggccaactccctcgggactcccggcatatccgcaggttgccatgcgaatacgtctcggttatcttgcaggaactggacgagcgcgctttcctatttgtcatttaaactggagctgatgatggccgccttgcgctcatcagcaaaccccaggttgatccgcttagtgtcttcagtcggccgcatagaggtcgcggcctgggcttcgtttgccggcacggcgaggtcttcttcaggcttagagttcgccggtgtagaaggaaccgttgacggcttggtggtgagggctgcttggatggccactcggaaacattctgcggcgccttggaagtcggcgcgcacagttatgattccttgcggccctggcatcttcagtatcatgtacgtatagtgtggtatggccatgaatttggccagccccggcctcccgatgatggcgttgtacccgcagtcgaagttcgccacctcgaacctcaggaactcggttctgtagttatttggggtcccgaaggtgaccggcatgtagatgtggcccagcgggtattccccttccgtcggcacgatgccgaagaaaggagtgtctgactcgtggagctctttgaggtgaactcccaagccttggagcgtacgggggaaggtgacgttgatgctgctccccccgtccactagcaccttcttcacccggctctctcggatcaccggatcgacgaggagcgggtatttgcctgggtggtcgaagttgagccattgatcctcccgagtgaacgtgattgggtgctccgaccaccggtacggggcgggagggccggtggtcgccaccagtatctggcggtcgttgagcttttgttgtctcttgttttcctgcgacccatgtccaccgaagatgacgttgacctccctgtcaacgcgcgggaatgctcctcctcccccctcctccggctgatggggctgtcgtggttcatctggtcctcccctcggcggaggaggtggtagaggttggaagggtcggccatgcccgacggagtgcttgaaatcccggcagttgcggagagtgtggcgcatatccttgtggtacgggcactgggcgtcgaggatgtcgtccagcgtgcgttcgcctccacgaggtcctcctcgggcgcgagaggcgggtggtccggcggcgtgtacctcttcgcgaggcctcttctcccagcgcttgtcgggcggctggttcgcgtcgcgtcgtggcgctgccggtgtgggctttgttcctccgatgaggtcctaggcccgctcgtcagtggtgatgtagaggtcggcttcccggaacagctcctcggaggtagtcggcgccttttgcagtatggctcggacgaaagccgagtcgttagatcctctgtagaagtcctcgatcacggccgcctccgtgacctcggggatgcggtttctcatggtctggaaccttttgaggtatgaccggagagtctcatccccccggcgcttgatggatttgaggtcccatggttgcgctggcttgtcggagagagactggaagttggcggtgaaacgtcgactgaagtctccccagtcgtcgatgcagtgtcggggtagatgtcgtagccactgcagcgcgtcttgcccgaggacgatgggcagatacgcagtcatgacgtcttcggatgccccggcagcccgagcagcggtggtgtagacggctaaccagccccctggatcctgcttaggttcatatttatcgacattggataccttgaagttgggaggccattggatggccctaaggcgcggagtaagggcggatactccgcacgtgtcctcctgtcgtcgaggatgtcgtctgtcccggggaggggagtggcggtggtggttcctcgaccgtccccgggtggttccaccagttgaagctgttgccgactcagttcgggtggcctggctttgagtcgggaagccatgatctcggtcatactcctcccgacggcgaatttcgttctcgtgccgtcgttcgcgcgaagcattgatagagctccgcgtgtctcggcgactgttgatggcgtgtcgcagatcgttcggcgggtgagcgagcggtagaagatggttggctgcctgagtgaacaggcgccggtatccctcggcgtcgggggtccgaggaagtccgtcagctatccgggctagaacgcctccgacttcgctcggcgtgttcatagctcgggcgaagtcagggttcaagttgcgcccgaagagcggattcccgcgtcgttgccttgcatcttgctcggcttgctcctgagtccgacggcgatcacgtcgtcgggagttccttcgttccctgaagacgcgttcttccggagtttctcctatctctgagacctcgtctcgcgagacaggctgctccggatcccattctccagctgtgtgatgtcgtcgaacgttcctgcgtcggttccttcgtcggcgggattctcactgaggcggttcttctccgggcgcggtcggttcatcgtcggagacggcgggcgactctgccctcccgatgaagaggacgtcggggtagaacggtattgctgccgtggcgactttctttccgttctcctttgaggtcggaggaacgggaagaacgactggcctctccctggtctccttctttctcatgacctgtgtccattctttcgtcggggaagtagacagcggagtcttccgggtcagcgagcttctagctccagcctccccggagacgatctttttccgaagacccggaggtagcgtctttccagcattttcggagtttgttggaggagacttctgttccggcagatccgcgaggcggtgtagaattccttcttcgtccgccacggatgagattgtcccgaagcagaatatggatccgggacgcatggtgatcttgctgtggaaggtgacggccattgagctagcttggatcgtcgacacaccccctacctggcgcgccagctgtcggtgttttgggtccgaccgcacacccagggttgcccctcgaggtgtttttaggagtaggacggtgtcaacgactgtagcaaaatggttcgtgccgatcgcacgagggacaatggacaagatttgcaggttcgggccgcttagaagtgcgtaacaccctacgtcctggtgagtatatgagcgtggttacaagaagattctctgcagagagttttttgtgggtggcaaagtagaaccgggtcgatcgatctgaaggggtgccccctaggccttatatactcggccgtggagcagtacaggtgatacgataacaacaagtagctaaaagatagtgaacctcttgagtttatccctacgtaatcttcgccgacttatcctcgcatggctctgttgcatgggggcttcagcgcgggaaagtcgggtctctgtttgtgattcattcgttcgacgttgtgggccgcctgtgtttgcactaatcagtctcacgtcttctttattggttgtctttccctaggcccacgaaagaatgaccttacgaattattgggcccttgggcttttcgtgaggccttttacttctttagtggacccaggggatatctatcccccacagccgccatggcagctgctccatccgtggtggctccacctgttcatgatttcacgaccttctgtagcacagcttcatccatcgctgggagccaagccttcagcagcatcccaaacttcacgagtggacatgcaatttcttcaccgacaactcctccatggatacgaagtgaagcaacggatccaacagcctggtacgtagcaaggcaagtagcagcttcctccttggttgtgttctccatatcgtacgcgatttgagcttatctccttgccaagtagcatgtgcacaccctggaagtgatactcccctttggttaccacctgttcgatgaaaatcccacatgcaaatatggacatttatgtgaataatagcttatctccttggttgtctgctagaaataaagatttccacaatacttccagaatactttcacatgaatatatgcagattttgtgtgaagattttatgtgaataataggttcaatcattcattcagagacaacaacctacacccccctggtggatttacaaggctagttagcaacccaccacaaaacattcattttgttgggccaacaggatgctcttcgcctccaattgtggtgactcaaactccacatttaaaccaaaattctattaatctggacagtggggatgaggttgcaagaacagagaaacgaatcctttggactcaggaagaagatgttaggctggtgaggcatacattttcattaatcgtttttcatttccatacatagtagtcaccattgaatgatgcttttctttacgtttatag

SEQ ID NO: 1038 - DNA, 5140 bp, Zea mays
  Intron number 3 from transcript GRMZM2G025078_T01 (locus G RMZM2G025078) derived from phytozome v7.0 (chr-ID 1; pos 1 8191967 to 18197106 reverse strand)
cgagaagcttgctgcttgtgtcaatatagtacctggttcgatttctgttttttcatcgttcattctttttaaaaattttgacatcatgaacacagtgcacaagaaaatgtgattgttcatttttttcagttatttgtcttcctagaatggaaaatgtatgatgtataattactgataacagcactagaagatatagacctacttatgttatagtttctggggcaaggggagtcttgggctcttgcctcttcgtcttccaaaaaataatatttttgctgaatattaaagactaaatattgccatttctgaattagttggcagttttcacttttaagttgtgccaagtgatgcaaagctacgatacatctgtaagggctggtttggtggaagggaaattggaggagatccatgggggaggaattcccttgctattcaaaattgagtgaccttataagaaaacacagtactaggtttatgttgttcggtgttcgccctgacctataggttgagggaggctgagtatatataggacagatactgccatcaggataggattacaacatgacaggaagtccaactcaattacaaccatcttacccgactcttattctaactctggaacagatcaaacctgattctatactatctttaactagaatcagttaaagtcttcctctagtagagcatctccaataacgtgccctataaaaatgccctataatttgaaaatgagtactccctccgtcgcaaaataaattttgttttacctttttagttgattcatacaataattaatgtatttgttttatatatgtcaatatgtgtctagattcatcatcatccatttgaacctagaaatacaaatcaagaggtaaaacgactaatattttgggacggagggagtataatttatagaatttagggcaccaacaaaatatcctgctccaacagtgaagccccaaatctatattacagggcggcccgctacggtgtagtatatttgaggcatttgagaaggtgtcctataattttttgaccaaattttataaaataaggcattgttggagtagtttttttctgtgtagagctctatatttcaatttgagaccccgtttgaggcattgttggagatgctcttatagaacaaccatgtggacccttgatctgatatgaccgtagcctgataagcacattctattctaccacccccctcaatcataacttacataatttaaagattttctctaaataaagccaatttctgcatagtttgtgccttggtaaccatctatgacttgaccttttgtagatatgattctgacctccaaaagttctctagctactttctttcatgaaataaaaatcaatcttaacatgcttcgtacaattatgaaatatttgatttgttgtaagataggttgctccaatattgtcacaccaaattcttgtagcaagaggacaagaaaccttcagtccttctaaaaggaactgcacccacatcaattttgcagtggtgttagctataactttatattcagctttagtacttgaccttgagactgtgggctgcttgtgagcacaccaagacaccaaaatctttaccaagatatactgcaaaatctcttgtagagcgcctatcatcaatgtcacgagtccatctgcatcagaaaagacactcacatgcataggagactttactatttttagaccatgttgaagagtaaacttggcatatctaagaatctcttcacaacgctcattgatgagtgttaggtgcatgcaaaaactggcataccttattgactgaaaaacttaaatcaggttgtgtcagagttaagtgttgtaaggcacccacaatgctcctgtatcttgttgcatcttatggctctagcaactttaccttcaccaatctttaactagttaggtgctcgtgcgttgcaacgtcacacatgacagaccgcgatgacattctagagcctcagcagtgtatgttgtcactaatggtgtcatcttcaacccactatctgggctaacaagcccctgctgtgagcttgtcgaggcaaatgggaagtgcgacaagatgcaagcttgttgcagaggaaaggcgacgacgtggcatgagaggaaaccacgccaacgagaggagagaggagcgaagcatcgcgaggtcgtcagaaagaatgaggtggcgacgaaggagtgcgtcgtggagggactggaggcactagaagttggcctacacatgcgaggaggaccaaggaggcaaagtcggagtagcacactacaagttgattaaaaaatattgggagatttttgcaaaagtcttgtttttgtttagattacaatgcctatagagaaactgcagttaatatgtggtcactggtcacctataaacaacgaccactcttctagaacagtctatggagaaaaaacgagtgcaaggtgattagataaatttatcatgtcaagaaagaatggaatttcaaggtttggtgttagatataaaagttggcaattagagaaatatcaaatagttttatagaccaaattatctccaatgatgagcatcttccataaaccataactgaacaacaataacgttcggttgagaggcaatacagattaaaaacaagcttgctgcagctacagaaatcatcaaggctgggatgaaaatcgactgagcatattttttttcagtgaaggcggtgaaggcagttggggcgaggatggctcgggcggcgttgaaggcgggatggttgcacatggcttgggaagggcggcgatggctcggacgccgcaacgcgtggggagtgtggcggggactcgggcggcgtcgaagtaacaccacgcactgcgtcaatgggaggtgggcgtcgaacagggcgaggatggctcgcgcggagttgacggatttgatggcggcatggtggcacagcgcgtgggaagtgtggcgggggctcgggcggcattgaaggcgggatggtggcgcagggcttgagaaggagatcgcgtggagaagggcggcgatggcgtgatggaggcgccgcgcgtggggagtgtggcgggggcatggtgaagctgggtgtggacgccctcactagatacatatggattagtagagatttctatgaagtaccgagttgagttgtggtgggttgcaattcatcgttccaactctgttgagcaaatctgaagcatacttagtctgagacaaatggataccatcatttttttgaccgtgaaaactgtaggggaatcccctacagcgacgcaaattttattaaaacaataaggcaaaaggaggagggaagagggtagagtacaggaggactgtacaaacaaaggaagagaaaagaaaagggaaggctaaaccaaacctgacttacctaggaggaaagggaagcaaaaaggaaagaaaggaacaaaacccacaaacccggcaaagatcaagccgagcaatctccacgggaaaagaaactacaaagagaggagccaaatgctcacaagactcttcacggcagggggcattctaagtgtctgcagctccacggtctgaataaaaccacgcttctagcctagaaacatgaataccatcattagctgtttgtacctcaatgccaagaaagtagtgcagttgatctaggcctttcaacgctaaatcagcactagattgcgaaataggcatcttctttgtagattccatctcatctgcaagagatttcatcttggtaatatattctaacatagccatgttaccttttctagttgttgtcagggcgatcctcgtgttcatagtccttgtcgtagactgggatgcataagtcttttggagctcaaaccacacctcttgggggatcttgtaggttgaaacttgactcatgacttcttgagccatggaggtcatgagggaactgaggatatgctggtcgagcgtcgtgtgtactttggattggttactcgaagaatcgtcgcctttcttggtgatgatattctcttttggtgcaacagccgagccatcgaggtagtcctatagctgcgcacccctgaggataggtagaagttacgccttctagagcgcaagttgttcttagtaagcttcaccgccacggattgccctagttggcacaatagagcttgaggcagacgccatggagacttgttgtcgactaaggctctagaggtgggtgtaggagttggctttgattaccatataagaaaacacaacaccaggtttatgttgtttgccctgacttattaggccaagggggttgactatatatagggcagaatgctgccatcaggattacaatttgacacagggagtccaacttgtgtacgattatcttaaccgactcctctcggacagatcaaacctgattctatcctatctgtaatcatagtttgttaagatcttcctctattatagaacaaccgtgtggacccctaatctgatatgtctgtagcctgatatacaagcacattctattctaagagaccttgataacactgtattgccagtatagcttgtagccttgtataagagcttaagtactaaactgtggcatagtccttaggtcctataatacgatgcattctaaaaattttaagatgacttaaggcattactcaaatgaagcatgtacccatggattaaacccaattaagaagtttcttctcaaattatggtttcctttttaacaaattttgccaattctgagcatgctcaccacgtggaatgccttatattttattataaattttagaagtcataatacgctatattccaggacggagttagtagggcacatagcttactgaaacgattagttaaactcatgcattaaatataaactttgcatatctagcttcaggcaacccagagtcaagatagtcataaacataaatgaagattgcagaagaagaagatatgaggccgcctggccataaaaaatgatcagtagaattgcatataatgtagtccttgctgttcatttgagtggttattatgaatatcttactatgtgttgtttatacaacatctgtaatagaatgtgcacttttctttgaagtggtgaaataaactgaggtctcccatacctttttcaggcattgaatccgtgtactggtgggagggaaaggta

SEQ ID NO: 1039 - DNA, 1956 bp, Zea mays
  Intron number 12 from transcript GRMZM2G007369_T01 (locus GRMZM2G007369) derived from phytozome v7.0 (chr-ID 1; pos 246948829 to 246950784 reverse strand)
tggattgtctgcaaaaaaaggtactatactttaatcagtcgtttgtcttttcattatgattatctaatgtggattgtctgcaaaaaaaggtactatactttaatcagccgtttgtcttttcattattccaatctttattttaataggttgcatttccattttttcagttctaattacaagatgatcatgatgcatatgttcctctgttttttacagactacaacgatgtagagcatgtggctaaataatataacataaatcacacctaactaaatcaccaaggatacttgtttgtgttagcagatagatggaaacccatatagtctctgtaacctaactgaatgggtttgcatacgtttgttttttttacttttttgggttgccaggctcactaaaactgttaagtgggtgcccgattgttgtggtgaccaataagtgaaactaagcttaaaaaataacacgagttgtatattatagatagaatagtgcaacagtttgtgagaaagcgagttagatgtatgctattaaaatattcagaacatgtacacttttgtgctccttccaaacttaattttaattggttgcatttccattttttattcagttctaattactgattgtgttaccagccaaccttcgcttgcatcaatagcaacacagttgacccatgagctatcaaatgtcacgctctttactggatgtataacctgagtgcaacgcacggtcatacacctatacaatatgaagtgattaacatagtattgttcttccctgttgttttcagtttgacgcaatccatggattcagtaccaataaaaccattggagtacctgggttctatcagtaacgtgtgaatatggaaattcacaacgattatatggtgaactcatgtttctttttctaatgcaaggaaaactgtaaagtcttcatttttcacattcttgttagtatttacgaacagacaaccattacaaacgaatataaaaatgtattgttgtgttctacaaatgcttaccgacagtttgaacaatgaaggtcaatgtgttttgtattattctttgaaattgtttctgttattgattagttaatgtctataatacttgatggttatgtcttcatccatattaatttgtttgatattatcgaatacgaatgaattagtactatttctaataagactcgattatctaatgcgtgtttattaatacttttaagctacaactcctttgacatccaggtcggcgcctccgcgctggggtcgtcggtgaccatcacctcgctcaagaaagccaccttctaagctttgattgatcgcccgtcaaagtcgccggaggctggcacgtgcactttttttcaccgtagaatatattgcatcgtacttgtctgctcccatccctctcaatatttttctagcgctttgatgtgatcattaggtataacaaatgcatattcttagtaaaacgatagaccattttttccagggaccttcggtgtctggagattcgatgtcagaaaaattgatagcgaactgagggatacatgcacatactgctcatgatgaataggcactgttgtgttattcctaatccttataattggagatggggttgagaaaaattatgaaggtttttaacggatttaaacctatcaatctcctttaatttatatagattatatgaattgggttgaaaacgatgaggccctaaaatggatctcatctgctgctataaatcaggccgttgggcatgcaaattattgggagcagattaacgccaaacctaccaacacttgattctcttgtggtccatgggtggatgtgattagttgttgcattattatttctttatatgattctttatagatttgtgttggcaaccaaagttggtttcatgtcgcatgtcatttattccagttttctgatgggtctccatcttgatatatttgtgacagactgaa

SEQ ID NO: 1040 - DNA, 2988 bp, Zea mays
  Intron number 7 from transcript GRMZM2G027546_T01 (locus G RMZM2G027546) derived from phytozome v7.0 (chr-ID 8; pos 6 7382047 to 67385034 reverse strand)
ttgtattctcttcgaaatccaccaaaggtatatgcccatgttattgttctagttatgggggaaatactacttgcttttcgaagcccaatataacaatggcaaactgggggcagctgcttgcttaacatggggctatagttatactgctggaaccagtggcggagctatataaaattaacgtcccgggccactccataaaatttgaaggttacttcaaacagcccataatatattatgcggctaaatataccgctaaaacaaaatataccacaaacatagactaagatagtatttacttcaattcagcatctaaaagtacaataaacttgataaaaaatttaaaagtacctaattagagatgatttggtccttccccgcctctaataacttcatcaacattagcacgtgaatttgaacctacacattgcaaattaaatatttgtataaaatgagagatacaacatgacaatataactaatgaatgcaaaaatgtctaagtgagcacaaaaatataccacttgaactttgcggaggtagctttttcatacgactcttcaattcttgaaaatgatataaaatatcatcactttgaattcttgcaaagatatctctttctatatagcataccattctatgatttaaccaatcatttcccatcttatttctcaattctgtcttgatgattttcatagctgagaaggctctttcaaccgtggcagttgcaacaggcaaaattaaggctaattcaatgagacgataaaccaatgcaaaaactaggtgtctctcggtttgcaccaccttaatagccagattaccaaggtcttcacaatttgcaaaatcagaattacccctcacatcaacaataaatatatcgagttggtctctaaggatcaagatgtcatattgagtgaagtctgcagaataaatcttagccaattctatcagctgagctttatcatagctggcaaatgaatttcttggatctagacacgaaatgcatctcaataattgagtagatctttcagtgaaacgattgtttaattccacaataacttgatcatacacaacaataaatatctcatttttgaaatgatgatagtaagtcactaattgacctccacgcccccttgagcgacctcggacagtaattgtatcatccatctttggtaaaataatgttgtgttggttacaaaaggtctttacctcctcaaacaattcttcccatccactatcacgtacttcactaatattccgcaatgtggctccaatcaatccaacagcaaggacaatattctgatcttttctttgcaaacattgtgacaaatcattagtcttgcctaataacctcatcatgagatgcagaataagcacaaattcaaagctctccatttgtttcaacaaaccagaagccatatatttcttatccccattagagccatcatcagccacaatctctagtacctctagaatagcatcccacatgagaacaatacgacataaagttttatgatgtgaaccccatcgagtatccccaggtcgtgctaggttggtttcttgatttttccctctacctgaaaaaatttcccccctttccaacatgttcacaagtttggcatggtgttgttgagccaattgatcccttctcttacaagaagcattaacactattcacaatcaagttgcacgtttggaagaaatcaaatacagaagcgcaacacttagcaactgaaacaaccactaattgcaattggtgtgcaaagcaatgtatgtaaaaagcatatggactctcatctaatattcttctttgcaacccatgaaattcacctctcatgtttgatgccccatcataaccttgtcctcgtaatctatccattgacaatccatagaaagaaaacataccatccaaagcaacttttagagcggatgatgtagtgtcgggtacctcttgtaacccaataaatctctcaatcacttcacctcgttcgttgacatacctaaagaaaagaatagatgcatggttaaaaatttggcattgacaaaaaaatagcaaccattcaattatatactaacctcaaaacaaccgccatttgctccttgatagaagcatctcgagcctcatcaacaagaatggaaaagtttctattcccaatatccgaaataatagctttggtggtttgctctgcacaagctctacaaatgtctttttggatatcaggtgaagtcatctgattagtacgaagcaaatttgctacatttttatccttgtctttgtaccactgtagcaactctaaaaagtttcccttattgcttgaggtagaagattcatcatgtccacgaaaagcaagtgcttgcaataaaaggtatcttacaactcccaatatgacaagcaaacggcctttatattcctcctccatctttttaccccctcgattcatcacatgagacacactttgcctctgatttttgtagtcctcataggaccttctagacttattgtgatctatgccattaccatgagctccaatggtttcacgtccatctttccatcgacgaaacccaacaaccgtgaaggcatcaacaccataattttcagctcttggttgtttaaaaaggtagcaataaaaacaaaaggccgcatccttagcaatgctatactccaaccatggattatttacataccattcatcatgaaaagacctattgcgattgcctatcattcttttaggatacttatgaccttttggttggcatggacccttcgcaatatatgctcttctgacagcatccctaatgtttgcatcaatttgctcaattggcatgcgaagaccaggatcggctataacttgatcgacattattgatattgctatctcttaaacccaccgattcatttgcattgctaccttctgtctctaatgatgcttgtccctcctcaacacctaatgtttctgattctataacaggttcttgggaaggttggtttggtgttg

SEQ ID NO: 1041 - DNA, 872 bp, Zea mays
  Intron number 3 from transcript GRMZM2G019879_T02 (locus G RMZM2G019879) derived from phytozome v7.0 (chr-ID 7; pos 1 973335 to 1974206)
aagaatctcatgtaagattcactcatggtttccacccttttctttttgctgattttaggtaataaataggaatattttgttgcataatccatctcggtttatttgtttccttcttagttgattgatggctgatcggatagtttcctttcttagctaattgatagctgattgattagtttcctttcttagctgattggtagttggataatttcctttatggctatgaatctttgtaattgtgtacataaacagatcaataggatacacctattgcagtggtgccaaaaactcagtgtgaagtttcagtgttcgtgttgagttttgtgaacgtttgattgatccagggaccatcttctttttcttcggcaaggcacgttgacgagttgaaggctacatagttgtcttaaatattataaatgtgtagtagaatccttcatcaggcttacccctagagttttttgtttttttattttacttcctgcttgaaattgtttctagataactgatctgctgcatggtatgttagttttaacagaacataagtgcaggttagcatgcagagaataaactcagcaaattcactgtgttgtcttcctgtaaccttcagtatttcacctcatatatggatctgagatattttaagtgttcatgagagcatttcttgtgacttgttatgtctgaaatcagaatggaaggtgtgatttctcttcgtgtcttgcatgaattctacatgagtattgatccacactccaatcagttttgagaaatattcatttcccgtacctgttatctttttctatagcctttcctttttcaaacttctcttgtgcttaataaaaatttctttttcttttcttttgtagagatctccc

SEQ ID NO: 1042 - DNA, 4513 bp, Zea mays
  Intron number 1 from transcript GRMZM2G171807_T01 (locus G RMZM2G171807) derived from phytozome v7.0 (chr-ID 8; pos 1 3203981 to 13208493)
cgagttcgcctgtgattgctccggtggcaagtgcggtgagttcaggaaatttaaaacgcgcagcaatttcgactttgttttttgttgcaaaagcagcaattagtttgctaacctggaaggagtaaagttggcctatcccaaatagtaccaagaggaggcagaacacacactgacacacacacacacacacaaatcagagaagttcaagcacaacttacggaggaatgctgtactcctgctctcctagcagtaaattaacacttcaccatcacttccttttctcgaccaaaaccagtagttcttacgtcatgcgatacaactatatatgcatatcgtacttacgaatttaataactctgcattgaccattggggtgccaaatacggttctgctaatgccataaagtccccatcgggaaccattgaataataacaagttaacaacaggtcgccttcatacagtttagcgtgatcggctacatggaatatagaatgctgattgggaagaagtttgtcctgcttttatgcagacagtcttcttcgactgcaaattattttttggttgattggtgcaagttattccattgaggcccactgtattatagtcaaacacattggttgaagtattcaactgtactacttgaaaaagatgccatgccaatggtccttatccctatttttttcttctagtgatagctggctagagaactgttctagtatttgccagccaatgcactgtatttttctaagcaaataattcaatttatctgtgtggaatcaagcttctaaagctgatatcaatgatgtagtgaatttaaacggggagcaatcatacccgtgtgatgtgactgtctgttttcaactgcacagcagtgatgttaatcaccccaccaacaattattgtgactagtgatcatgttttttcacctggacaaaaggtagaaacaaacaaactggactactctggatggcatggacacaattatttgattgatttgatattaattcacaagattccttgttgtttatttttaaatttgcgaaagggcctctagctgagttggttaggtggtctgagtagcactcctcaggtcctgggtttgactccccgtgggagcgaatttcaggctgtggttaaaaaaatcccctcgtctgtcccacgccaaaacacaggtctaaggctcagcctcggtcgtggtcgttctcatatgggcttcgatgccgctgtgtatgggtggggcaggagttcggcggttttctcgacctgtgtgagaaggtcttcttcttaattcagtgccagggggctgtcttacccccgcaggtcgagttttttttttttttttgaatttcatgtttcctcgctggatcatattgctcctgcgtgcattttgtaagcatgatgtttgaggtgtcttagtataagtgctattttcttccaccatgacttctcttttctggcttctctgcagactgcagagttagtttgcacaaggatttgtttagtactttctagctacagttttctgaggggtattttttctaacccttatctaattgcatctttggttctatctatgcggagaacctactgccttacccttttatattcttctgacaccagagagtttaccctctagttatccctgttttatcttttctgccatttcatggtgaatatagtttgggccatcaaccatgactaacgggttttatcactctttgggcaagtcaaagtcaatggtagtaaccaataccaatgcaagaaaattctgtcaaacaagatactgggttatcggttatcaacccaatttaacatgtaccagttgtgcttcaatcatgttttttgatcttatctgaattgttccctggtgattaggtgttagcggagaccccccttgtttttggcgtacccttttttttgccccatccctccaggtgtggtgttcgtgcgtaagttgttagtgtgtatggcagtgttattaaaacaatgtttaaacatcaaaactctaattaaaggttgaaaccgtgttttggcgttctaaactgtaaaacatagtgtttcatgcattttagaccattagctacttttgggtccaatccggcttatgggtgaagttttggtaagccactaacctcttgttaccgactcctagctggtgagtccgtaaccttggtttcgtggtgtccttcaatggggagtggagagggagattggagtggcgcaaggtgtatggaagaagagggcgctgatcacccagatctcctgcgccggcgtcgtgcctggccaggatgatcccaggtgatctcgcccaaacaaaagggagatcttattcctggttcattattacagctgatgcccagtcgcctttatagccataggtggtctggatcatctcaggatagacatatctactgctactattcagccacataaaaaggaactaacctattatttaggaactgctactatttagctatataaaaaggaactaacctattatttaggaactgattaaacagaaactattcctgacctatctcttctcctaattagtcgctggtctcttttcttggcgcctctttcttatttttgcgccttgtgaattggcggcccacaaaagcatctataacacctctctattttggtatttaacttcatgttattgtctgaaattatgacatattggtatttttcctatgttgtttaaaactacgtttaaactttgtttaaaatgtttaaaagtcaaaacttcacccataaatgtttcaacgttttatcgtttttgtctttgttgttgtcattgttttttcttcttctattaatggaatgatacacaaccctcctgcgtgttcaattaaaaaaatgtttctttaacagacgatgttcctgttttcggcagttactgagttaccgcataatctatatggacaaacaattttgatatcatcactgtggtctaaaagtcaagattgttatttcttttacttctgacaagctgatacttagtgatgtttcttgctatatggtaccaccttcaattaaaaatctgaaatccaacagttgctgcattttcttgtgccgtctttttcagatttacaccttcaatttcttaccataaccatttatacgtagacacctcattaagatttactccctccatcttgttatagtgtattctagaagtttagtacaattaagagagaatacaaaagacaaatatacccttcattttctaaccagatgctatcatcagcgtgattaatggagattggttgataaatggcaagtaacgatataatacctaccaaatttgtgctactacttaatgtgatcttgtcccctagaatgcttgaatcaatgttatcaagtcgcatcgcaattagccatcctgtcggtaccctagactcaactaggggccacaacttattagaccaattagttttctggtcacctgattagtaatcgactaatcaccattagttggacgactagggggtggacgatcgggaacaactagggtcgactagacgatttaataacattggcttgaatgcactatattatatgatggagggagtaagttgtaacatagctagtattctgcttttgcataatgtctctggagatcagagagagagagaggttcaagaatcgatatatatcctgctctgataattggccattctatatggaatgggcaaatgatgatgggtccggaccaatatttagtagaaaaatttgcgtgcatgcaggcaacgaaaagattgtggttgtctccagaacaacatttaatttatttgactttggctgtaggacactgaatttacaggtctatcatgaataaacactgcaaatatttctcttaggccccgtttgtttcctttcattttgaggaattgaaatcttactaatagaatagactattttttagaatgtaacattccaccactttccaaagttattatataagcctatctcaaattcatggggtgagagatggaaattgattctatagatttacatgctatttttccgatgtacaacttatagtacactcttctacttgcgccgctataacataaacgtagtatataactatctctctcatatgatttaggataatatataaatatataaacttaattagttttatctaaattataattattaaaatagaattcaattccaacgaaacaaacggggccttagtacatttacgtggtacaggcttatgttctcatgacacacagagatgcaaaaaatggtcacttttgctagacatcgaatgctgacgagcacctctgtgtttaggcatacatctcatttttttcccctggacagtttcttttcattttctatcagactttattctgctcatttgtactgtcatatcttcactgccagggctatagacgaatctaatctaaaaaatattacatttgaatcaacaagctattcacagttaatattcttatgcaggaggaaacagcaacaaaaataggatactcggaatt

SEQ ID NO: 1043 - DNA, 5432 bp, Zea mays
  Intron number 1 from transcript GRMZM2G153250_T01 (locus G RMZM2G153250) derived from phytozome v7.0 (chr-ID 6; pos 1 26961220 to 126966651 reverse strand)
cgccaggctgcactgcggccacgagttccacctaggtaattcttcatagacgccggatctgtcggtggattgttgcttgcgaagtttgtggttcaatcgcgtggtaggtgctatttttgggttgtagtgtcaaattgaatgtgtggatccttaaatgtggccaaattcgtaaaagtttgtttaatttcgctgaaatagaatcggtttcataatttgtagttgcctctatgctgaattttgggctaagaagttctaaaggtcggatcttttcagctgtataggcttatgcttttgttgcatgaacatgttttgtggatgattttttcctatttcagttggcttcatatgtcggtactgtttgtgtgcgagatttgttgtatgaggatgatttgagagtgtgcatgattctgaattttagattcaagttcgagatgtctattttttcttgtaaccttgaataatttatagttactttaaaggttttatgtgccaattttgtgctctatcaatctacttgataaaaggccccattttttgggagcaagtcaatattgagacggtgatttgcaaatatgttaggaaatgttaccagtctgtctgtgctgaagagctccaactgcctgagaaccatgagatgcagagaagaagtttgtcgccccaattctcattgggctggtgcagagtgggccaagtgagcccggcctgttggccgtgtgtgtggtgaggagtccagtatcgtataagtatcgtgtcttgtaacagggaaaagggatcgaaaactaaaagatacaattcccagctttctgcttctgttcttccttcccgaactctcttcttcccttcctgttggcactcccttcctcttggtgtgttaacaattggtatcagaggtccaccgatcctcagatcctcttcttcccatggcgtcttctctgatcgatcccactctcaccctctccctcgagcaccaaaccagggtcatcttatctgaattggactagcgtttcagtgcgatggacaccaagtggaacccccgtgtgggtgatctgtagtctcgggccaccgcgtccgagcgcacgacgacctgtacgcggcgtttgggcccaatctcttcgacatcggcgttggcggagacgggcggttctcctcaagcctctccttgcccgacggaaatcgcttctgcggctactccaccaccgcctcctcccgctgcggcaacagcttggggctgtcctcgccgtcgccacgcgctgactcgctgtcccgcgactcctctgaatccggtttcgtcgtcgatgacggagacgacgcggcggccgccgccgccagcgttacagatcgtcaactccgcctcgtgagcctcgcgctccagtaccaaggagtggtcaaccgcttcgagcgctgcctctcgtacctcgccgacgccagcaacaagctgtgactctgtgttgcatgacatcaccaaactcatcaagcccacaagcgactggaggccacctagccgtgtccttgaggtcaccatacaccaggtccattaccccatgactgagagtgtgatttgtgcagtttttgctcagtactgaaaggtcgagtgcgtccatgtatttggggatttagatcctgtgttggctcgtgtggtatttgaaacaaagcatcaggcagctgacgcctttggagatttgcatggaaggaacatatatgatggctgttgtcagttagacattcgatggtgttcatctcaggatcctaggaacaccaatttggccttcagttgtggtgacaccatggtgactactgcagccgctagacctgcaacatctgtcgttggtcaatacgaattctccaacaccaacaattctgttgaggttgcaacaacagttgagatcgtatccggcgtcgctatcacgcccctagctcctatgctggccaaggctgctggagataattcagaagacattattgatgactctacatactcatttctaggccacaaagatgaagtcttcactgttgcatgctgtcctgcagatgcatcacttgtgtcttctggaacacacaatgtcaatcttcaaggaatttctgttggcaatgctacacttcagcttccaacaagtactgttgattcagatgacagtagtgaggagccatacgagttagttgaaacccctgtttcaaccccattagacgactacaagaaatctgttgttccattaattgaggaatatttcagcaatgggttatggggatgtacaattagctgcttcagatcttatagagttgggttatgatgatttccactgttactttgtcaagaagcttatttccacagcaatagacaagcatgagaaggagaaagagatggcatcagtgcttctatcgtatctttatggtgatgtggtccattaaactcaaatcaagctgggatatgtgctgctattataggctgttgaggacctggctgttgacatacctgattggttgcagaaggttctgaaagataatgagcctatccctaaacttgtttctgttgtgaatccgaggaacccctctagagcttttattcctaggcctatgtttgagaaaatttcagatctgtgcaaaaatgctggtgcatggcttgtggttgacaacgcctatgagtactttatgtatgatgcaatggaacactactgcttagaagatactcatatggtcaacctcttctcataaactcggccggggagggaaagaccgccctctcggtattatattaagaagagaccgaaacaatggtcccggccgagaaaatccccgaaccctggccccccatcactaacgggccggcgtcaactgtccactctgcaccggcccaaccggagagcggatggggcacagcgaggggatttttttaaccaagcctgaaaattcgctcccgggtggaatcgaatccaggacttggaggtgctactcggaagtccttaaccactaggctagaggccctttcgctcaacctcttctcattctcaaaggcttatgggatgatggggtgatgtgtaggatactttgcatttccaaatgaagttgatagcttccacaatcagctcctcaaagtgcaaactgatcaagcttatgccatatttagtgatatgggtgctgctgcgctggtgcacaatgattctgttcaattaaggccaataccatggccttccttcagactgtgtagtgagggacatatcaaagtgctcaagatgctgctagcagaccaaggtgcagaacaattctttgtcatgatttgggatctcggtggaattgatgccatgtatcagcttgggggcaagccgaagcttaagaaggggggaatgttaggaaatgttaccagtctgtctgtgctggaagagctccaactgcctgagaaccatgagatgcagagaagaagtttgtcgccccaattctcattggggctggtgcagagtgggctaagtgagcccggcctgttggccgtgtgtgtggtgaggagtcccagtatcgtataagtatcgtgtcttgtagcagggaaaagggaccgaaaactaaaagatacaattcccagctttctgcttctgttcttccttcccgaactctcttcttcccttcctgttggcactcccttcctctcggtgtgttaacaatatacaccaggtggttgttgcccgatttgtgtaacttttttgcgtttcctgctttgctttttaaaaaagtctgaagtgtacctgctctgtgtttatggtataagttaagcctgttggcatgacattgaactttttaaggtgagagatggggatttttcctacaaattttagggccttgggctattttattgaactggtgtaaattcggattttggagttttctggttcttgaaagggattatttaagcacgtttcaaacacagatattgaaacttgggcaagactaaaaatgacacaattttgagttctcaacttgatgatctcatttgacagtccttgttgtctgctgtaatgaatttaacctcatgtactcacccattatattcccttctatgctagatttataattatgtgcaatttgatctgtagtaaatactaggctgtcagctgtttttaagatggccagtaggaggattagaggaactttgcaggtttgtggttagcttacccttggggttgcttgaatatatagactatagagattcaggcaaaatccttcctgctatgtagggacattggactaatatcaagcgcactcaaaagaatttgtgtgtagcctttatatcattgaacatatatttagttgttctcctgatgaaggacaggtctagtgcagtggtgagacctgtcttactgagtcaccaagtcgtgggttcgaggcagcctctccgcatttgcgtggaaggcttccttagtttaatcgttcgccagaccccactcttgtgggagcctccgacactaggtctgccatttttatcttgatgaacctattaacatcaatcttaccttgtcaaactatctcgttctttatacattagtggccaacacaaagttaaaaaggtttgactgacaagaatattaaaatggtttatgtttaatattatagttggaaatatccatatggttttcatcgagttctgatagggggtttgctacttccttggttttctgatgaaatattgctttctttcagttatctacagcatttgtactaggttgagagtggtttagatgctgctgaaagtttaggcctatttttcaaaacatcgtcttcaaatagagattagaattttgactttcgagaacccatgatactgcaacatgctttcatgtatatccaagggtggattaggggggtattggcccgtcgaccctgacaaaatttataaatcctttaccaaaatactgttgaagctcaagaatctatagcatgtaatgaagctgataccgatgcccccgaaaaaaactataaatcctttagcaaaatactgtgtatatcattaattctttagctggtactccacttgcaaaagaccatggatattgggtacctaatcttgatttgaaatatctgacttgataaattaagttatggatgtaaaataagtattacttttccaaggcgtttgatgtggcttctgcctggcctttgaatatacaatttgttgttctttaacaagtaatttgttgttagcaatataactgtagtgagattagatgctggattgcagatggagaatagttgttctcatggaatatgcttattatgtggtgtgaagttgtgctagtgtacttattaccattgcttattctattatgctgtcttaataatctactttgtgtggactaactaggatcaaagcagtgctctgaattatctttgcttgataatctttgatatgctaagtatacatttttctccagattgcattggatcagcattta

SEQ ID NO: 1044 - DNA, 1155 bp, Zea mays
  Intron number 1 from transcript GRMZM5G874167_T01 (locus G RMZM5G874167) derived from phytozome v7.0 (chr-ID 2; pos 1 63451094 to 163452248 reverse strand)
cctcgaacgaaaacaggcaagtcatccatcatttagctagtcgcccaacctgcttgtggtttatcgtgtattgcttattcattctgctaatttataattttgatttgaatgatgtgtccatcagaatgtgtaatgttagtcgaggcttgtaatcaattgaacctgagatactccatttatcattgtattatctgcatgtgttggatttgaacatgtcttcttgctctggcagacaatcaaactcttcttagtggatgaacttatttgttcgagtggtgtagatattctagtccttttagtgttcctagcaatcgtggcccaccttctgtatttttttatttgttatactaatttggttggttatacccctgttaattgtctgaccttttggtgttcaagaatgctgaatttgtgtcatgtggtgcctcattgtatcagcaacagcctgtgcactgctgtaccacattgtatcagcaacaacattggataatatatgactgttattaaactgtctttcaaccatgcgtaaccaatcctttactttataagtgtttatggttagatcaatttaatatatgttgaaatagcaggggcaacagaaatatccctgtacatattgtaataatctctattctagttggtagtgacttgatgcatgataggtataaaaaagcttggttgtagatatatcctttgtttagtagctgtcttcaactcttgtgttcagtgtcaaaacctttcaaaagtttcatctactaaaaaatgttaaacacttgctaccgatgcatgttttgcctgtataaatgtttttcatggggtatatcaattcaatgcactttgtactgggaaacttttgctaggaatttgttttactttagaatctggaggaaagacaattgaaccaggtttgtttgtttggaaaggatgatttctatttctctcaaaaatgtatttttcctttgaatatggatatatttggcatttggggagcctgattttttagtgtacgagctattgagtagccagcttattgtatgctacatttggcatttaggaagcctgaaatttgttagtgtactagctattgagtagtcagcttactgtatgttgcttatttcaggggcatacttattgtaaagctgcgtcgggggcaag

SEQ ID NO: 1045 - DNA, 16087 bp, Zea mays
  Intron number 1 from transcript GRMZM2G112228_T01 (locus G RMZM2G112228) derived from phytozome v7.0 (chr-ID 4; pos 1 34154112 to 134170198 reverse strand)
aggccttcaacgagcccttcgccggcgacgagaaagtatgggcacccctccccttccctttctgctgtgcgaaaccgagttccggaaccctaacctatttagctatttgcatgatctaatttcaagcttatatatagtgcctactatcttcgatttttttggcaaaaaatactgggtttgtacacccacgttctttattgtgtcatctggtgagaggaagcattccatagcccaagtattagaaactcgtattgatccactgtattttacatgtgaaatttggagtttaattttgtgctgaggagacagtgatcaatcaagctgagataagagaaggaagaagaggtttttgtgccttaaattttaacaaattaagaagaataaggcttcccggctaatgttttatttgccttaaaattttctcaaatcattgtgagaaatgaatgaaccaaccaaaatgtgcttggacatgctgaactttgttagttgccaatttgtaagtgcgtgtgaaatttgtctaaattgatcccatatgccttggaaccaagacaggtgaagatttgttttagacatattgggggttcaatggaatcccatgtcacatgccaagttcactgctatcccctttggaagtagacttattccactttttactcatgtccaatgtttttgtcattgagacggtttgagtcgccagagcacaccgataagtcgattcagctgacttatcgggcaacttggacgactaatcgatagtaagtcgtccgactaattggctaaatcgtctagactctaaaaaaccgatataagacgacttgccatgtttttgtatgaaaaaaatactgattgcacaaaaaaaactgattataatgaagaaagtgacttacttgtccaagtacactaacatagcaatcgatgtagcataatctcggccacacggcaagcattcaagcaaagtaccggagcggagcagagcagatttaaaagggaaataatagacagggtcaaagcctcacagggattaccggagctggaggacgaggtggctggtgactgccgacagttgatgcaggaggcgaagggagaggtgatctcgtggagcatcactgagcacgagtgtgattgacaactgacgatgagacgaacgactcctgtttctggtggctaggagtggaggggcaggagagaaggttggagaatagtggattggaagtgggccagtctgttgttggaaccctaagacctaatgggctggttgacgggctgagagatgaaacccaagccttttttatttaagtcgtccatgacttaaaaccgcgactaaccgtctgagttagacgattagtcagatgactcgttattaagtcgaccaattcgtgtcgaaatgtatactgatgctaaaaaacgatacggctgactaatcgcgattggtcgaacgacttaaaaacactgctcatgtcattcctatatggaatgtgagatgtatttttttttctatactggtgtacaaatgttcattagacaaatttgatgcttccatttccttttttcagttttattgttttatttagattatcatgtagatttccttgttgtataatgtagtgtgatcatgccaatggtagcatacactgcctctatcttttgtttgagtgtcgataaggatctctaagcaattgtgttacgtggtaccccatgttttaaagttgtatgactaaccgcgattagtcggccttatcgccattgcaagctcgattagggtgtatgatgcgactagggcgactagaactctgatcgtccgactaattacgattaaacggtgattagtcgtacgattaggagttcaatcgactaattgctgttgataaaattctttttgggggctggtgcaaatctccctagagctattgaccaaacatactctagaattatgaagcatgttgttcctcttcctccacaatctggtgaatctgattctaatgaagaaatgcaagaacaaggacgagaagaactttctactgcatccactaaagatccaactggagatggaggtagctttgaactagctgatgatatgctcgattagcacaacaatcttctagtgtcccgcatttaattgtttttgagtcatagaacaacatcatgtctagtactgtggtgtcctgcattcaaggtaatggaagccctgtgcttcgattagcaggggaaggcacaaccaggacgtggataggccaccaccccgcgtgatttgcgtaagcatttatgctggtataactgaattatagaatttgcatataccatgcaacgaatctaggaaggcagttcacctatgcatgcgtcaacatttatatcgggataaatagattaaataatgtgcataaaccatgcaaaaagaacctgctgactcacaaatcatgtgggatgactttacaagtttgttcagtgtttacgactgcataagaacatgaaacgtaacagcataaaccatgcaatatcgcgacgtcagaccatttatgctattgtatatacgtgaccagtgtgcgtagatctgggttggtttgagattaggaaagtagtgctgtaagttcgcgataaatgtgggacggttaccgcgtaaatcgtcgatctgtttcgtaacgatgaatgaggcccaaattacggcgcaaaaatcacgcgctccgatcgtgctagggttctggctcgggtggatttaagcataaaaggtgaaccaaaatagcataaatgaatacgaaattcacgtaaattatcgatctattttgtaacggcgaatgtggcacttgctttttagtggaagcgtaaaacacaacaagaagtatcgtaaaatttcgtttgaaaatgtataaatcacgatggtcatagaagacatttgtttttgtgcatagtatgccaaaatataaagtacatcatacacaaccacatcaaattctggatattaattaatccttccagttgagaaacgtttaggagttcctgaagagctaagctaaacagattgactccattccaggctcctcaccaacaacctgtcacaaggaaacacatatatacgatagtacaagaggcggttttagacagtatgacaaaataagcgtaaacttgtgtgcaacaaagcataaaagtctgttgacgtcatattgaatggatcagatggtgcgtctgagacatcttgtgggctggtcgggtgagggtcagggctttccctagtttgctttatagtttgttactagaattgctatagtctgtttgctttatacttgatacaatttcttttggaggtaagaagatcaaggccatgaaggaagataggtgtacacaaattattttagcacaacatcaaactgttccacgacaggaaaacaaattagcagaaaaattggattggtagcagatggacaccgttccaactaccacctggatggtataattgattagtattgtaggcttgtagcagagagggagcaggcaaggcactccctgcttagctttagctgttcaacggtgctatacaaattttcattcagaattacagataatcctgtgcaaacaaaaaaaaagactacacaacatttctggcaccacaattcataactttgtaagttgtgtggccctcttttcccattcgttaggatttaggaaattacaagaataagattatgtgctgcttatagtaagttgggcaataatatttggtgatagtattggtgctttgtcggcaacactatctagttgttcctaacatcataaatcataataagtgaatggagacagtagaatacctgttcttatatttttttcttttctttgaaaaatatagctatttgttgctctgacctctgcataatcccatagagggcggcgaccattgcacaacggtgtcttgtagcgttatcagactgttgttcgtgtcagtaagtcgagcccaagttacctacaagaaaaggtgaatgctttattgctttatgacaaggagactgacaagatggttaagtgtatttcttccactttggtggcaccagttggtggtttcaccagtcgccaatcgcctgctaccttgagtaatctagaaagatccctttatgctcactgcaaccaagcaccgttcagcttagcacaaaataagaacataagcatagaaaggaaacaattataaaatcatttgactcacgaagctagaaggtgcgatgagcccaatccctccatacatgtaagtcgagcccaagttattgtagcagagggagcactatgcataatctggatctaataatcaatgctacaacaatacataattaacgcaacaacattttatatatactattctccacaaataaagcattgcatattgttacatgcaaaaatctgacaatagaaagtcatattggagataaaatgtaaacacaaactgtggaaaaaattgggcctaaaaatgaaaataaacaacagcggctcgacatgttagcctacataccaaaaactaatctgttaatagtcctctgggccaatgaatactgttgggtcgaacgacaatacaaacttgctttaaaaacaacataaaatagatgtaaacaagaaacgacagtgaaccaatttggcaccgaataaaatggaagcaattcatatatcagctactaatttgcttcgttgtacaaataaagtggaagcaattcataaatcaactactaaacaaacatgacacaaaaaaggtacaaattacctctattttcagaatacgaacaagtacaattgacaaatcaatgcttcttattgccgatgaggcggtaccacagaaactagtatagtctgtggatattgatttaaacaaaaggatgttgaattatgcgagattgtaaacaaacaggaccaaataaattgatggtgttactaaccatatgggggcgaggatatgagcccggagtcggggatgccatacggtctaaacggggaatagttacaaaaccattgctggattatgcacgagattgaagataacttgaacagagaacgaggtagttggacgaaccagttagcgacaaagacggatccgcgcgtcgtggatgcaatgcagccgcgctcggagttcagcgaaggtgaaggtaagttacgtagactggcacgtgggaaggggggcgctcgccggtgacgaacattgttggagcagacggcggcgatagtgggagtaggtggcggcggtgacggtcgcggggattaaattagggttggttcgtgcggtcggttgctggggagcgagacgtggggtggggactatctgactaggtgggccgatttgtgttcctttgctatttgtttactataaattcaatatgcataactgcctatgtaaataactgtcaacgcaatgtgtaatccgactgggtcgcccacttgacctggacaactggtcggaggtcggatggctagggctttcgcttgttagagagagaccagggctcctaatatatatatatatatatatatatatatatatatatatatatatgtagtcctggtataggtggacgattatagaacgactagcagtcgactaggcttgactaatcgagcaagttgacgactaatcacgattagtcaccttcaaggttttaaagtcgtccgactaatcgcgattagtcggccttatcgctagagggagcttgattagggtctccgactcgactagagcgactaggaagcgattagtcgtccgactaggtatagtggttgaatagttttgcctgttttgggccactaatccggtctctgttacatgggccgacccaccatctgtacaacacaaacactgttttgccctacttgtaccaatacggtacacacgttacacagcgcacagtctcgctcgcgcgtgcacccttctccagcgccgccacaccttctccatcaccgccgccctcctctcctgccaccctgctgtgctccagcggccctctgctcgagcgtcagttgcgcccgttccatcacgcgacggttgtagtttgtagaggccctcctccaacgttgttttgcaaaatataaatagcatatagtatatgtatgtatgcaacactatctctactcttcaaaacttcctccacgatcttaccaaacccattagtttctgcctttcgcagctatcctcccgacccactaggccactacagcaatgtccctaggtcatctcttgatctcgcatacccagtcaagaaatcttgggtccgccactgaatcagtgtactgctgtcctgctacagctagtgtactgttatattgcagtcctgctacaactttatatattgatatatacatatggtcttgttataggtggacgattataggacgactaggagtcgactagactcgactaatcgagcaaatcgacgactaatcgcgattagtcaccttatcggtgctcaggcgactagagttgactagccgactttaaaaccttggtcaccttatcgctgctcaggcgacttgaatcaacttgttgacttttaaacattaaccctagtctgtcatacataaccgagttcgctcatgctggtagccacataaacatgaatgattgaagttcatattatttctcccaaggttggctacattgcatttaatctggctattggttagcagccctggtggagtggtgagagctatctcactgagtcaccaagtcacaggttggaaatagcctttccatatttgcagggaagacttggcttgttttatcccttccctagaccgggagcctccgacactcagtatgccgcttttttactggttagcttactgtcgattctcggaaaactttatggtctgatgcatgattttttagtaaagtgtatggccctcaaacttgtttgggtgtgccatgctggtccttattcataaattgtgtcgttttggtcctcaaacttgtctgggtgtgtcacgtcggtcctcaaacttgtcgagatgtgtcacatcaatcctggtactctcaaattgcatcattttagcctttaatctctgtttgggtctcagaatagttagatagctatgtttttttgacgaaggggcgaagccccttatttcattaagaaataggaaagtttgtaacaaccgccatcacacggtaaaaccaccaaaagaccaaccacggccagaacgctatctagactctaaccactatcactagatcaatgaagagcctacgataacaggaaaagtttgcctacaaaggactacataagactttcttatttacatccaacaagacaggcagaagccacaaaagacctgaacagtttggccagcaaaagacagacaactatccccacacggcttcctagttccaccttcttgtcatccagaaatacgcctgtcaagagggcaccaccccaaggccctcccgaaagcttcacttgccgtctttcggattaacttgcttcctagcaccaccattctttgctccttctttttctgacgaatcgcccaagaatccaaccagaagcaacaaagaaaaatgatgttagatgggtcaagtaaatgattatttccaaagcaccaatcatttctagtgcgccaaatagcccagaataaagcaccacaaccaaataacacaagatgagccatcttgtcttttggtttacacaaccaattgtcatacaaatctttgatatttttcgggattgatctcaaattcaaggaaacttgaataactctccacatgtattgagcaatggggcatttaaagaacaggtgatcaatagattcatccaccccacagaagcagcagtttaaagacccaatccagcatctttttctcagattatccttagtaagaatcttattccttaccactaaccagaagaaaaccttgattttatgaggcaatttagatttccacaaaaacttatatggaatcaaagattgattttccattttttttctgtacaaagaattaactgagaagccttttttccccagggtccaaacaattttatcttcttgatcagatagatttacctgattacaataattaatcaactcatcataaagcaacttcagattacccacaatccttcttctgaaagtaagggatgcaaaatttgaagtgaaaacttcgttaacagaaacatctttgtcataggtcaagtcaaaaagaacatgaaactgaatagacaacggttggttacccaaccaaatgcttttccagaaactagttttcaaaccattgccaacttcagttttacaatatttgtaaaaaatgtctcgtaaactcagaagtttttttccagaaatgagagtcattttgtttttgcttgactaaaataaggggctttcccttaagatacttactagcaataatcttttgccataagccattcgaattctcaatataccaaagccatttagatagaagggagtcattcataacatcaagatttaaaacacccaaaccaccctgaattttgggagaacatactgacacccaatcagcaaggtgaaattttctggactgttttcccccctgccataaaagcctccttctcaacaaatcaatttttttgataacagtcttagggggaggatagattgaaagcatatataaaggaacattagaaagacaactatttagcagagtaagtctaccacccaaactcaggaatctaccctgccacccagctaatcttttttccaacttctcaatcatgggacaccaaagatttttattaatcttcttcttatcaattgacacacctagatatttcataggaagattacctataggacaagtaaaaatatcagcatacaaaaagtctatctctttagcatcaccaaagcataatatttcacttttgtgaaaattaattttcaaacatcaaacctgacatgctttcaaacaaacataaaatgaatttaagatttctggctccttctaagcaatcttgaataagaaaaatggtaccatcagcatactgcaaacaacaaccattctgaatgatgtgagggatcagaccttcaatcagaccttcctcctgagcttttttaatcatacaagctaaaccatcagcaactaaattgaacaaaaggggagaaaaaggatccccttgcctcacccctttgtgagtagtgaaataagggcctagaatatcattagtcttgatggcaactttaccacctctcacgatcctcatgacccaatcacaccacgtactaccaaaaccttttttctccatcatattgtaaaggaaatgccaattcactttgtcataagctttttcaaaatcaatttttaaaactactccactttgatttttccttttaacttcatggagaatttcattaagcgatatgactccatccataatatatctattcttaatgaaaccatattgagaatcatttatcacttttgtgatacaactcgccagtttgttattcaaaactttggaaataatcttatagcacacatttaaaaggcggataggtctgaaatttttcatgtcagctgcattatccacttttggtagtaatgttaccaccccataattcagtctctcaattttgagactatcattataaaagtcagtgaataattgaacaatatccaactgaatagtatcccaaaaagtttgaaagaattcagcaggaaagccatcaggcccaggggcactattatgtttcatctcaaaaatcactttcttaatctcctccactgagaaaggagccgtcaagcaagacctatcagagtctgataattgattcatgttacaatgagacatattgatactagatagcaccgaatgaccaaaaagatctttataataagaagtagcaattttattaataccatcagcatcactcacagggacatcatcctgatttaggaaaggaattttaaccctcctcttccgacctttagccaacagatgaaggaacttggtattttcatcaccctcattgatgaatttctctctggcagtttgttttttttacaaatttcttcttccatgatcttttcagattccattccatatcaagtttttcgattctctcagaatccgagatacccattatttcacattttttatctaaaatatcaattttttccatcaaatctttttttaatttcaaatatctaccctcaacattgatattccaacctttcaacaatttttttcaatcttttgactttttctttccaaatatcaataccaatcttacttctaactggcaaagaccaattattcacaactaaagatttaaaatcaggtctaaatttccaacaaagctcataccgaaattctcttctagccggagaaataaagtcagttttaagacataaagggacatgatcagaaaaggatctactcagaccagtaacattcacattattataatgcagatcccaatcaagactaacaagaaacctgtctaacttctcaaaagtaggaggattacgattattagaccaggtaaaatgacgaccactaagatccaactcaatcaaatcatgaacatcaataatagaattaaaaagagaactccatttgttagtccccctaggtttgttcttatccgattctcttctgagaatattaaaatcaccgccaatcaataaagggtgagaacaatttgaacagaaagcggataactcgctcaagaatttctgtttttgatcattttgagcagcaccatagacattaataaaattccaaataaaacctgaatctttttgaatcaccaacaaccgaatcataaattcccccaactctttttctctaacatcaaacatgtcggaatcaaaaccaaccagcaatccacctgacctaccattagggggagaccaaacccagacgaaattactatttccactaatgaaattcaaccaagaatcatcaaaatctttcttattggtttcttgaagaccaatgaagttaaccttctctttcatgataacatcacgaaggaattcacttttcacacttttaccgagcccctgacaattccaaatcacaccaatcattctgaacaaatcagggcctggccatctgactggcctttcctcttaatagggattttcctatttttaggagttttaccagccagattattattgttttttttcctcacagtttttttcctgtgctgaattttacgaccttttctaaggatcataacatcttcaagatcagaaaaattatcatcaagactatcattatgaatgttattaccagcatcagaaacaatacaatcagcatttgaattatcagcattaatcctaacagattgaaccactaagtttttcctagacaattctaaagatttaatcagatttaaattttccacttcatcattaaaggaagaacctaaatcaacaccaattttgtgagccacatccatgagaacaacattatcagtattcaaaacagagaatggattgtaagacgtacctttgttgatgaaagcatctttagccatagctcttgcagcagctttatcagcaattttcatttcctcagacgattccaacctgctgctccttctaactccttctgcaacttcaccttccataggaccactttttttagcaccaacaatcttgctagcctcctcaacattactcagatgcattttctttttatcttgggcaggggaaggaatgaattcatcatccttgatgaattcgtccaactcctgagaatccaacaggtcatcttcactatcattgaaatcctcatcctcatttccctggctatcaaggtaacctttaggttcttcagaacctttccccattttcatgctttcagatttttcagacagggaactagcaacattggcctgactggaggatatttttaagggagattttcccttgatgtccttgccagagtcctcatcaccacttttggcctttttagcatatttgccaagagagatgtcaccaaacccttgtctatcaaccgaagccctcttacccagattaacagagtcatcattccaaccttcatcagtgatgttgtcaattttgaagatgtcatacaggaaaggtttgacaccaacttcaatgataggggggatcatagcaacactcttcacatgaactttgaatctcacaatttctttagagtttaaagagttaatatccacttcttccactgccccaatagtggatcccaattcacaaatggcctgataattttgcaactcttctggcacattctcagccacaatccacacagagtgcagtttagatttaggcttagcctgagaactccaagaggagacagagattttggctgcagacaatttcattttcaattcagggaaattaatcatttcatccaatctctcttgagaggggaattgcatgaggaagccagaatgacacttagtagctttccaagtgcggccccaaggaaagtgaaaaccgaaatccttctccagatctttagcggtgatcaaaccctcaacgattttaaccaagccaataaaactgcgtttaggtttgttggaaaggggtttggcgaaatgagaagagtaaaaccctaacccatccgccgccataccaacaatcggcatactaggtttattctgtttgggaagaacacaccgagcagtgttgtgggtttctttgcgacagatctcgcaccacaaagacttaaaacattccctagcatgatgaccatccaaaccacatttctggcaaaaaaccctacgcaccaaatcattctcggattttagaatgggaggcggggggtttttgaggatacctggctgaccggcatcaccgggagtggagacaggaatgtcttctttgatatcaggttttccggatccggacttcaaacgccagctgaggttccgattcttcccccacgactgagaaccttgcggcccctccttcggaccccatcgatcccagttagggtttcgattcttcgaatccatcggagccgacacaccagagcgacccggaagaggccactcctcaccaagcgaaggcgggcgaagcggagaggagatccaccccccacagaaactttcgcgcgacgaactcggaagagaccagaggcgagaaagacgcgaagcaagatggggaaaagaatgcgaacctaagaaatctactggaaaccctaaccgcgtacctgaaagaagccgtccagagaacgcctcgccgctctcctgtagctgtgggccgcacgcattcgcaaccacgcgcacaggacgcggaggagacggcccagaagccacgcctccaacagtacgtgccgacaggggacgatggatggcggaaggagaagcatggcgtcgcccaccttttttctttttcctacgcatcctcccccagcagaggcaccgagttcgttgagactccacgataactattagttgtgttggtaagtttaagcaagttggataccttgagagagatcggatgtggatgtggatcgatagctatgttttatcaacattttgtaatcttgtattggatatttcatcccttatgatttcaaataaaaaaattcaactacaaaggtttaggtcttgtcgagctctacaattttgataaaggttgtgtcttcgtctaggattaattgaaaatttcaaaaaaatgaatatcaagatatgtgaaattaaaacaaatatttgcgactaaacaacttcgaataaaaaagttatcaatgacaaacttgtagattcaatcgacccgaacgacttcggtattaatcatgtaaacattcaaggtgggctggaaattctaaaaaactccgcgggtaggagaaagaccgtcccatggtgccctcccagcccctacacgaggatccttcccccataggttagtccatctcgtgtgcacacaaccaggggaaccaacgagtgaccttttttaaccttagtctgaaattcacttcaactggcttttaactcaggacctaaggagtgctactcagaccacctaaccaattcagctagaggcccttttgcaaatgcatttatgcatgtgtgaatgcattatgcatatatatatatatatatatatatatattgttgagaaccgatataggttgactagggttcgtgagaagacaagggacttcaaccaagttaagtgcattaaggatgaaacgaagcacctcttggtaaaagaggatgagattgatggcgagtgcattttgataaattgttcaatgggggaatgggaacacatcctttcagttggatgactcttttgatgacaccaatagatgcgttgtgcgtagggtccaagaatatgaggttagagaggcatttaaaacgatgaaatgcgccaaggcggtaaggcgatgggccctgatggtatcccaattgaggcatggagatgcctcgaggacatagctatagtataggtaaccaagttgttcgaccatatctttcggacgaacaagatgtcttacgagtggagaagtatatttgtaccgatctacaagaataagggagatattcaaagttgtactaattaccaagaactaagctgatgagacatattatgaagctatgaaagggacttaccaagcatcatctgagaggattaacaaggatatctgtgaaacaatttggtttcttacttggaatgccaaccagggaagtcatttccttaatatgacaagtgatggggcaacatagggagcaaagggtcctacacatggttttcattgacttagagaaggcttatgataaaataccaagaaatgtatcgtggtaggctttggacaaacataaagtttcaacgaagtatgttggactcattaaggacatgtgcaacaatgttgtgaatagtgtttgaacaagtgatgaaaaacttcctgattagaataggactacatcaaggatcaaatttgagctcgtacctttctgccttggttacggatatggccacaagggacatacaaggggatatcccttggtgtatgttttttgcggaagatgtagtgctagttgacgatagtcggacatgaataaatagaaaactagagttgtggcaggagattctagagtccaaaggttttactaaaaccagatatatgagatgtgatttcggcactactacacttgaggacggagatgttagtttggaaggtcaagtagtgcccaggaaggacatctttcagtatttaggattagtgctagagagagacggagatattgatgatgctaaccatagaatggaagtagggtggataagtggtgtcaagcatctggcgttctatatgacaaaattgtatcacaaaagctaaaagacaagttttataggatgttgattagacctgctatggtgtatggtacaaaatgttagcctacaaaaagatgacatgtttatcatacaaatgttgcggaaatgtgtatgttgcgttggatttgtggccatacaagaagggcttgagtccggaacgatgatatgcgtgactgataggctagaggtagcaccaatcgaagaaaagcttgttcaacattggttgaagtggtttagacatgtccaacagagatcttttttgaccgggacgtcccagagatctctagatacatcagtgtgtagtgggagtctaagtcgcgatagcaatgggaagagaggtaggggaaggaccaaagttgacatgggaaggtgaagtaaaagaacttgaaagaatgaaacatatctaaagatttagccttgaatagtagtgcatggaaaacagatatccatgtgtatgaaccttgacttgtggtttatgttgggtttcaattgtagcctaccggcctaccccaacttatttgggactaaaaggctttgttgttgttatagtataaatgaaaaagagttaattgaaattttcttaaggaaaattaccttaatcttggctaactggctgaaattttacccaaaaaaaaactcccccacccccaaaaaaaagaaaaagaaaagacgcacacataacccaaatgtatgcattagatcctgttatcttatcttatactgcctttgagcattgccattttccttgcaatttctgaactacttacatttgatgtgaatgcagatttgattctagttaactattcaagaagtaggaga

SEQ ID NO: 1046 - DNA, 15961 bp, Zea mays
  Intron number 12 from transcript GRMZM2G135256_T02 (locus GRMZM2G135256) derived from phytozome v7.0 (chr-ID 7; pos 76279083 to 76295043)
ctgaggggactgacaaaactacagtactgattctggtaaggttcttttattatgttgttgtgtgtctttaaattaagaggaaagtaaaaaaatagtatctccagaaggcactgcacatggaaactggcaatgaaaaaaaaatcagatacttaggacttactatgaggcactatgctatgtgaatatagtaacaaagtttggaggttgctggcgacatagggtaggggagcacaagggcaggctggtgcccaatttagaggtggaagagatgggctaggtccatgatctactgctgcttgatttccaaagggtataggagggctctctaacctctatacaaaggagactctgacttttcctaagggggtgtttgaatgcactatagctaatagttagtggctaaaattagttggagactttgagttcatcttcatcccctcccgggtggtcctgccatcgccacccgagtggggaatgtgttgaagccgtccatgaaggctgttggggcaggtctcaagatgtggccttgttcccccatcaaatatttcagaaggaagcgcagaggggctgctgctcaacaatcccctctctcggctgctccgttagcgaccaccgctgatttcatcgccagaatgtccaggccggccgctcgggccctgtgtgtgccgcagaagcggcaacgtcgccccagggcacctcgtgagggatctcttcctcggcggagcaggcgcttggctggagcagatgttgaaaaggtaatggccccaacacgagtttcgaaaggaaaatggaggattgctaatgagctcggccttattggtggggatccatctgaattgctgtccctggaggttctcgataattatgccaaggttttcggtgagcagctgactgatttgcaagttaaagctcttgcggctctcttcaactggactgtcccagaagacttgcagggtgcggtggtgcaggcctgatcgcctccgtgtgtattgttggtcgttttttcactggttttccaaatggatccgtcaaaaattgtttgctggaacgtgcggggtcttaatggctcggctcgtcaggatgttgtacgttgtttggtggactcagtcaaagctgatgttgtttgcctccaggaaacaaaaatgtcagttttttctcgcttgtttgtgttccgtttgcttgggtccgagtttcagaattttgttttcacaccttcagttggggctagtggagggattctagtggcttggaagaataatatcagctcatgtggctctaggattgatgatcattgtgtctcggtgaatcttagccttgagacttggtcatcttggtggttgtcatgtgtctatgcccctcaagggaatcatgagaaaattcagttcttacaagacctcagattgattaggacccactgttctgggccatggctggttgttggcgattttaacatgattctgagtgatgaagacaagagtaattccaatgttgatcgtgctatgatgggcaggtttagaaggtggaaggatgatcttgccctgctggagcttcctctgattgggcgcaggtttacttggtcgaatggccatgcctgtcctactttagtcagattggacatgatgttttgtactgctgattgggaagatttatttccagattgccttcttcagagtgctgcaactcaagattcggatcactgccctctcttgttgggcctgcatgatattaataaaaggaaagggcgcttccattttcaggccttttgggtgaaattggagggttttcaggatgttgtggctaacacatggagttcgattcccgcaggccagtgccctcttgttagtctttccaagaaattacatgctacggcaaaggctttgcaacgttggagtgataataaagtggggggtttaaaacttcaacttgaaatggctcaggagctccttcataggttggagatggctcatgacagcaggactctatctccaagtgaggattggttaaggcgtacccttaagaagcacatcttggtgctctcctccttgtcgagatctatagcccgtcttcggtccagaattaattggttgaaagaaggggacactcatacttccctgttccatgctcaggctagattcagaaagaagaagaattttattggctcattatctacaagtgaagggcttattttgacatcacatgaggataaggctgatgctttgttccatttctatgatggcttgctcgggactgctttggggagagaaaactctcttaatcttgatgcccttgggatgccttctttcaatctaaatgaggtggatgtgcctttctcagaggaagaagtttgggacactgtaaaatctatgccgtcggataaagctccgggctcggatggtttcaccggacgtttgtacaaggcttgttgggtaacaatcaaagctgatgtaatggcagcgatctcttgtgtttgggctcgaaaatttagaaacatggggctgctcaattcagcgtttatcactcttttgcctaaggttgagggtgctgcccaagtgaaagattttcgtccaatcagccttgtccatagcttcgcgaagttagtaacaaaaatgatggccaacagattggctcggcatttgaatgatatggtttctcctaatcaaacaacgtttattaagaaaaaggtttatcttagacaatttcatgctagtgcaacacactgcaaggtttcttcatcgtcaaaggcaagcccacattcttttcaaactcgacatatctaaggcttttgattcggtctcttgggctttcttgttggaagtcctacagaagatgggttttgggcagatctggcgtgacatcatttgtgggttgttagcctcttcttcgacgagaattttattaaatggtgttcccggggactacattgctcaccagcggggtcttcggtagggggaccctttatctccaatgcttttcatcttagtcatggacactctcaacttgctaatctagagggcctctgatgaagggctgcttcactctctttccacgaacagtttgcagcaccgtttctctttgtacgcggatgatgcggtggttttcctcaagccggtgccctcagacataattctgattttggaaatccttaggatttttggggatgcgttcggtctaaagaccaatgttcagaagagtaatgttttttctattcgatattctgagaaggatcttgcttgtgttcagaagctccttccatgttccatttcagagtttccctgtcagtaccttggcctcccgctttctcttggaaagcttaggagaagtcaagttcaagcaattgttgataaaactgcagtccagttacctgggtggaaagctgacttgatgacaaaagctggtagagccatttatgttcaatttgtgatgacatcaagaatgatctatgctgctctggcgctggacatccctccttgggctgttaaagcaattgataagattagacgaggctttctgtggagagggaggaaggaggtgaatggtggccattgtctgctgacttggcccaaagtcactagacccaaggacctggggggtctgggcataagtgaccttcagatcatgagttgggcgctgcgggctaggtggccttggctgcaagataggactaagccatggtcggattttcagattcaaacttgcgacattgtgcaaagcttggtggctgcggctgttatcactcatttgggagatgggtctggtagtctcttttggaaggatcgttggctgaatggcaaatgtattaaggatgtggcacctgctgtcttgggtatggtgcccaagcgcattgcttctaggcgcctggtcaaagacgccttgcctgatctcaattggttggctgatccgaggggggctatttctgttacagcccttgctaatctcatggacctttgtgacttgctagaggggatggttctccacccggatgttcccgatgtgcatgcctggaggttcagtgaatcgggtgaatactcggctagctcagcttacaggactttgcttcttggctctgttagctttgagcctgttgaacgcatttggaaatcctgggctccaggaaagtgtaaattcttcctttggcttgtggagcacgatagatgttggacggctgacagacttgctaagcgcggcctggatcacccggagtcttgccctctatgcgaccagatggaagaaactatcaaccatttacttgttcagtgcagttttgcaaaacagttttggttcagccttctgcagataggtggtttccaggagctctgcccttcccatgttgatgtctgttttgaaacctggtggaggaatagtgctgccagggtgggcaaacctttatcgaagggattcaattctctagtcattttgggtgcatggtctatgtggaaacatagaaataggtgtgtttttgataagtgtaaccctagcgctgcggtggtgttggcagctgcaagggaggagttaatgggttggtgtatggctggagccaaagcgctctctttcttccatttagaagaggtgtcttagttgtatggggtgtgttttggttttgttaggcaaatgtaacacctttgtactggggtttttctccccattttcttcttcttcttaatacaaaaatacgcagctctcctgcgtattcaagaaaaaaaaattagttggagacatccaaacactctaggtaatagttcaactattagctagttttagtaaattagttaatagttagctagctaattacactagcaattttttagctgactaactattagctctagtgcattcaaacaccccctaagttcgtttcttatcacaagttacaataggtacaacttcctaacaatcaactacagaggactctggatggctgtcaacatggatcaacagtgctagtgaacataactgtgagcctgagtggaccattagtcctcacccaggggctcacggcatactactgtttttgtacattttgaccttgcttagttttgtactctattctaaaaatgtaggccgttttagactttgagttttgtcctaactcctaaatcaaattctctatctttggccatatttagagaaaaatgcaccaatatctataacacctaattagtttctaactccataaaattcctttatttttcatttatttggcactgtagatgttcatatatttttctatgtttagacttggttaaaattagagaagtttaacttagaacaaaacttaattacctacattttggaacagagggagtacttgaaattttattaatatcgttgatccctctgttttaacacttctgcaagatgttgtgcacgccagttaacagctgtttgtcttttacaaatctctagcatgttatctgcttctgcttccacacatcgcttggccaatcacctgttgttgccacaaattgctctgctcgatattttttctcgaacgacgcaggagagctgcatatcatttaattaagaaggggaaaacaattgcaaccctgagagtaagacgataaacacctcagtctcaggcaaaaaaaccaaaacacgggagaaagcccacacccctggtcctataccacagatgcccctcagaagctatagcaaacagcactgcctgcacatctgggcgaatgccctaaaaaacacacgcattcccatacttccaaagctcccaagtaacaagaacaaccaaagcattgaagcccttatgcgaaaccttaggaagagctcgagaggactggccccaccaagagttgagcctgctggaaatgtctgggggagtaacagcagctagattagtcttttggagcacacgaatccaaatctccctggttagcacacactgcataaggatatgttgtattgattcatcaacttggtcacagaaggggcagctaggttggtggggcaacccacgctttgccaaccgatcagaggtccaacaacgattattgatgacaaggcagatggaaaacttgtagttgggaggtgcccagctcttccaaaccctcttacaaggagagaacttgattgtccctacaaacagcatcataggctgacttgctgctgtagcaacctgaggagcataattttcagtagtgttgatcagggacatcaggccgcagtaccaaaccatccaccatttgtcagatggctaaatattccaccagcacctgcacagataaagcccctcttatatcagccacccaactcctattagcaagtgcttgactcactgtacgcctccttactgctcttttggggaccaaactaaaaagattgggaacccactcagacaaagtcctgccatgcagccactggtccatccagaattttgtagcagtcccatttcctacagaagtaaccactgccatgtcaaacaaagcacaggcgttaccagaccgccttgttgttgcaaatcaatactagctatttgctgccctccttacttgctcttagactggtctccattgctagttccaaccaacacgcattgaaacaaccagaggggtttactgatattgtctgtctggcagtacaattggttgaccgctgtttcttactccatctgcccccctttcgtcatagtataaggattggaaaaatgttcttgtttgataagcgtagaacaacgcatgagttggttcaattccttcatcatcctgagttccatcatggtgctgcattaatgtgcgattggtctattgcttcgccatcgtgtgcatgagtatatggaaaacgagtgccttcatgcgcatcactctgctacagtgccaccgcacgcatgctcataacattcacccttcactccaccactgcaccctcatcacttttcttgtccacgagctcatagtagatggagacagtgagacagtggtggccacgtcaactaggtgtctgactcgaatggcgaggaagacaacaaaggcatgcttgccgtgtttgagatttggcaccatagatgacaaatggacaatgcaaggaccatcagaagtgacgccgcgggggaccatgcccttgttgtggtcttgttcacagagactacatagtcttgtcttggatctatctattgtttcaatgagtttgacagcaatgtaatcttcttcggcatcaacgatcttgtgatggacaacgaggtcgtcttgctactttctgtacttaatatatatgatacatagttcccctgcgcgttcgagaaaaaaaggtcatggtcacttggccaactataaatgttggacaactgatagattacaaagagttggaaaatgtgaaaccctaaccctaacctagggttgggtgtatattatataaagcaattaggtgggccaatcccattacaaaggggtgatcaagtaaatacaaggggacactagcctaaccctaaacaggagtctaacacccccatagtcttaactctatcttgtacaaatgttgagactggatcaaaactcagtgaatacactcaacggtggccccttggtgaagatgtcagcaaactgggacatggtcgggacgttgagaatgagaacatcaccggtggcgacacgcttgttgatgaagtgaaggttgtgttggtcacttgttctcaattgctatacacagtcgaaaacaaggcaacacaatattaaaaagataatcaaccttcgtcttcaagcagttatctctttgagataactacttcgaagacgaaggttaggacttaatcgagtaaatcatgacttaattgcataaatatgtaaagaatgtgaagaagttaaacatgataactcatctaagatattttcgatatcacatttctcccctttcatataatgaatttacaatcgtactttcggctttacaaagtgagtaaggacgaaggtgttctagggaagagattacacacgacaattatccaacccaccaaaaaggtaccttatgcaggacactgttcatctatttatagggaatcgtacaacttcgtacaaaattacatttatacccacaaggatcacacactggatttacaaattatataagggcaacattgtcttttgttttcagtattcaggatgacaccttctcacatcgtctcttctcaattactatgacgaagctagcttcgtcgcccctccatcgttctgcatcgaaggtgttctggtgccgaagctcctgcaatacttgacaacatgttgatatccaatggttaaacgtgtttttgaggacctttgacagacgaaggcccccaacaggttgatctccacgtgcttcgtgtgttgatgctgtacgagattggtggagaagtagaccgcgcatatattgtcgcaataaacgagggtggggcgctcgagggggctgtggtgctccttgagaagctggcggaactaggaggtctcggcctcgccgtttgctataacgcggtacttggtctcaacgctggagcatgagacgacaggctgctgcttcgaggcccaggaacacgacatagccggatgttgaccgacgcgtgtgggggcagccagccaagtcagcgtcgttgtagaccacaagctccgatgtcggtgagagtcgaatgaaaaggccgtagtcgatggagccgcagaggtagagaagaatatgcttgagagcggtgaggtggggctcccggggtgtgtgcatgtgaaggcacacctgctagacgacgtaggcgatgtcgggccatgagaatgttaggtactggagagcgcctgtgaggcttcgataggtgatcctgaggaagtggtggagaggctccagattcttcattgcgaactcgcgctgaagggcgacgatcgtgcgctgaaggtctcgtcgtagtccactccggggcactgagtgaagcatcgaaggacccaacgggccttgtagcggtcgagcgagccatccgaggtcagcttgtggaagaagatccacttgccagtgaccacgttggtgcctggtggacgacatcaggtcccaagtgtggttgcccacctgcaccgcgtactcctctattgtgcggcgccagtggggatcgacgagagcggcacgaacagaggaggggaccggtgaggtgtccggcacaacatcgactgtgagaactagctagtcgacgggacagagaatgtcgattgagcgacgtgtcaccatttggtggacatggccggggtcgcggtggatggcagtcggatgatacaccgacggctcaagtataataacgagccaataggccaggggcggggggaccggtggatcggtccgctcgcaacggtgggtagatgtgagcagggtcggcgaagcgtgctgggtgggacgcaggtgacggggccgtgcatggcgcaggttgaagtgacggagccgcgcatggcgcaggcgaggtcaacggtgctgcgcgtggtgcgggcggggtcaacttagtcccatgaggtgcatgtcgggttgacggggccgcacatggcgtagtcggcacaggaagatgtataggtagtgggggccgcgcgtgacgtagtcgaaggcgacgtggccgtgggttgcattaaagagggtagcgggagaggaacattgacgcaatcgacatcgaggagggaatcgaggtcggggggtggggaggagttagcaagggggtaaacctcctcatgaaaggcaacatgacgagaaatgatgatgcagcgggtgaggaggtcaagacatcggtaccccttatgatgagagaagtaactcaggaaaagacaacgagtggagtcgggggagagcttatgaggagcagtggcagaggtgttgggatagcaggcacaaccaaagacccaaatgtgggtataggaggggttgtgccatagagagcgaaatgggggttggggtggggtgactcacctccttggtgggaaggcgattgaggagatgagtggcagtgtttagggtctgcccaatagctggcaggaaaggcgtctgaaagtggaggcagcgggtcatgttagtggtggtgcgaataatctgtttagcccgactgttctaagggtaaatgtaggggcacgagaggcgcatctgaactccgtgggagagtaaggagcgagaggcagagttgtcaaacttgcggccgttgtcgcactggagggcacacagtggacgacagatctgggtggagacccaggtgaagaaatgagtgagggtgtgaaaggtgtcggacttgagccgcagagaagtctagagaatgaaagaaatcatctaggatgaccagatagtacaggtaaccggagaggctgggaacaagggaggtctaaaggtcacagagaatgaggtcgaaggggtgagtagctcgggacatggaggaagagaagggtaagcgagtatgatgcccaagttgacatgcatggcaaagtgaggtggcgtcgctgcgagggtacagaatggctgaagtggacgatagacgagagaggatgtcgtgcccggggtgaccaatacgacgatggaaagtggaggcaggggcagtggaggcgagggcgtagggttggacaacatgggcggaggaatgtggtgcgagaagagggccaaggggggactcctatagagccaccaggaggggggtggaggcctgggacgacaatcatgtgaggtggaggcgttagggaggcaatcacgaccttgggaaacacaagaggccccaaagcatgacgacccatctgagggtggagttcgacgcagtcacggagaacaaggttcatgacccgatcaaaggccgcgaaggtgccctagaggtgctggccgtcatgaagggagacatgcacactgtagggatgcacgggaaccgcaacggaggtagggatcagcgtgacgggcattgccagtgctgcgggaggagctgcaggcgtcgctggcgtagcgaggaaggaggtcaccggcgtggaatggaggcacggggggctacgcgagcagcactgtccagggaagaggccgctgtggcatcgtgggagatcacttcggccgtggggaaataaggcgacgacacagtgtgggcagcgccgggcgtgcagggacgacaagccataagggagagggagccgccgcgggaggggaagctggacgacatggaagagagcgcaccggtgttgggaaggagagcctttatgctcgtcggataggtagccatggaggcggtggtggcatgagcagcagcagcggacgggcctggtggcgtggctagggggaggggtggtgtgactatcgtaggggagggcacctggggagggggagtagctcgtcctggatcttagtggccggaggggaggggcggcacgaccaggggtaggggtggcgcggttgccagaggggagtgtgttcggggagtgggaggagctcgtcctggcggtggggggcacaagcggcgacacagaccgacattgggtacgcggatttggcttctactgcaagcctttgacttgcactctaggccaatggcttctactccaagccatatgacctatataatgaaaggtcaccccccatagtgggtgtggtggtgttctcctattctctacacccgcgacccgatacctgatgggtatttactccattagggtatgtatatggactaaatattctacggactaaatattctacccatgggtatcttattaggcaaaaacctccacctaatgggtaaacaaatattagaatattcagccctcatccatacccatacccattaacccatgggtataaaataccaaatataaacttagttcaaaagcatgaacttgggcttcagtcatccatctcttttgactatttaacaaccttttggacgataatgtcatagaaggcataacaactatttgatgaccatgtaatgaaacatgtaatgtgttatgtggtactatcctagtgttgctacattatccaaatctatggtgttgttaaatggatgattaaatgaagctaaaaattttgtaatggtatttagatggatatacttgacgtttgtataatgtattattttgatagattattgatctttgtgtgtacgggtgacccatagccatatgaatatgggtatgggggtaaatccatacccattagtgaatatgggtgtcccgacgggattatttttttaatcgtgggtatgagaatgtgatagtaatacccagcgggtatttacccattaccatctctaggtggggaggggcggtagcttgggatggaggccgaccagagaggaagagagaggagagagaaaaaaggagcctagcattggtaccaagttggaaaatgtgaaaccctaaccatggttgggtgtatattatatagagcagttaggttggccaagcccattacaaaggggtgatcaggtaaatacaaggggaccctagcctaaccctaaacaggagtctaatagaaaggtgtgacctcccccatcctgaagcttgctctctttgtgatcaagagcaagaaacaattcaacacctttttgttagaatagcaaccgggattgggtaagcgtctctgctaagaaggcagtccgcaatgatcgatttatataggcagatgactgccgcgtataaaaacctaagggttaactctgcataacagaatctgctatattttaggctagttatctatagtagagttatctcctggattacatttacatagcagaggcctatggaccggttacaagcttttcaatctaacataaaggaacattttcctgatcacataaaggacaattttggcacaatattttatgtgagttcagaatcctgatcatgcaaaggacacctctgggtggtccagccctctcatagccaacctattagttgtccagcacttatttagagccgtgagccaaaggaagaagtgacatttggagggggcccaagttttctaaactcacacaggctagtgaaatgggactgctgcagcaactattgagaaatggaaatgggcaaagggtatcccggtatgcagatgatgtagttctattcctacagccaagaggtgaggaagtgtctgtggtgaaagaaatcctaataatttttggggaaacttcaggattgttaacaaacttgaacaagtgcagtatgactcctgttcaatgtgatgatccatagcttgtggagacaaggaacacttttccttgcaaggttatgactttgtcctgtaagtatttgggtttgcctctgtcagttaagaaattacctaggtcctccttcactgagcttattgataaaattgctgacaaactacctggattgaaggttgctattattaatcctgcaggaagagctaccttggttaagtcggtcctcacaacaaccccaatttatcatttgattgccctccattgccccaaacgggtaatcaaagcaatagacaaaattcgcagggggttttatggaaggaaaggacaaatgttagaggaggccattgtaatgtaggatgggccaaggtatgtaaacctataaaaatgtgagcctgagaatccttaatttggaggttttgggctggtctttgaatatgaggttgttatggcttaaaaaaccccaaccagatcggccttggtcagaatttgacatacatgtacatccaaatgcagcaaccctattctcagtctctgtctgctctattgtgggcaatagccaaaatactttgctccgggatgatcgatggatacatgggaaatcagcgggtgaacttgctccagcactcctgagctgcatccccaggaaaaatcagaagatcacacattgattgctaaataataggtgggtatcggacttaactggcagtctgtcggctgatgttcttatgggcttcttgatatgggatttaactcaggaagttcagttgcaacctggagtttcagatcaactctgctggctgccaacagccacaggtgagtattcttccaagtcagcatatgatcgcttcatcactggttccattgattttgaatcggtcgagagaatttgggagacatgggcacctaagagatgcaaaattttcatctggctagcatcccataataaatgttggacaacagatagatttgctcgaaggggaatgacaaacacatattcagtgttgcttcagacggaaagtactcggccaaagcagcttatgaaggtctttttatttgatcaatccagtctgagcattgggagagaatctggcagtcctggtcacctcctaaatgcaattttttctctggttagctgccttggggagatgttggacaacagacaggctgcaaagaagagggctaaatcatcctgataaatgccctctttgtgatcaggaatctgaaaccatagatcatttactagttggctgtgtcttcgcgaggaatttctggttttggttgcttggttaggtcaaccttcagggttttgctcctcaagtagaagggaataccatgctgtggtggaaaagaatcagtgaccagctgcaaggagtcaccaaaaaggggttgaactctttagtcacccttggtctctggattctttggaaccatagaaacggttgtgtgtttgatcgtaaccctgacttggaagaagctattactagagctgaagaagagatggacttctggaagctagctggagtcaaaagattggctcttctaatagccccaattctggggatttagtgggcagtttattttttgtttcctttcatggatcctttctggttcctttgtttttggccactgtaaggtgccttctgtttttttggtctctttccggaccttgtatttttctttttcttaatataatgatgcacatttctcttgcgcgttcgagaaaaaaatgaactgagaaatttaggtattctcaacacattatagggcttgcatcatctggaacagaatataacaaagcagaaagttactgaaaaataagtaaagaaaaatgtcattgaaaattagtctttccttacatggccatccaaaaatataagatcccagggcatgcagatgatacgcagatggtgctggcagaggtgggccgatgacgacgcacagatggaggggtggtaatgggctctaaattttacactataaaatttaagggtcgaatcggattaggattgggctctattcctatttatttttcaactaaaattatttaagggccctaacttattgtgaagaaatattgatcatgatccattaccacccctagatggagcacatgcgagtgatgaactcacgtggttggtggcagagccagccacagatggggcgccaccggcgcaggaatagtgattagatccttgaacttggcatcgtcggtgcatggatgaagctcggatggcatcggtgattgggtggaggcgcaaccgacatatggggtctgtcgcccttgtgataaataggccgatcagcagctacaggagataatggggcaatagtattgtggatggcgataaactgggtcctttctgccccttttcttcctttctacttaatataatgaggcgcagtcctcctgcgttttttgaggaaaaaatagggccatgcttctctcgctgtgacaattttttggggaagagaacaggtgcagggtctgttgcgccgccaggaattagaactggtgtttatggcagatgacctattagctgtcttcacgaaaggtggagagaagcaggccctaggtgactggcttcacgaaatcgcagagaaatttgctagtggggctttcctatttaagtgtagtagatttggattgccagaatttataatgccagtacttctagccaatatgagatttgcagtatcatagattagatgtttgggctgtcaagttgtgtattgtgcatttttcatttgtcacggagctaattttgttatccatagtaagtgatcaaaaggaatgatttctcaaatgtaaactgtcttgatgttgtaggctgatccacactgctcatacgaagtcacttctcg

SEQ ID NO: 1047 - DNA, 10574 bp, Zea mays
  Intron number 2 from transcript GRMZM2G059102_T04 (locus G RMZM2G059102) derived from phytozome v7.0 (chr-ID 1; pos 1 7976019 to 17986592 reverse strand)
gccaccggcaaactcttccacttcgccagctccaggtacctttctttctatctatggaaatataccgtgcctgcctccttgtatcgttctggtttgatcgatgcgtttaggactccgcgttgttggattttaatcccgttcttccatctggtctgggggcctgcatcttggtgctggatgccctaatttcgattccgtatttgttttcctttgattgggcgtattaattgcttgatcggttaattccaaacttagaaacctgattttcctatttcttgagatcggggattcttgtctccctgtctccaacagcttgggtaagtggctgatccggtgtccttttctagaccaagcttgtctacgacaagtgtcacatgtggattcatatttgatgccggtagttctgttgatgatcgttcttgcttgtttcctaataagtttcttttcccccattgtcgacaacgacttgagattgtttgactgtcgtttcgagatcaatcatgtagctgggggtgtctatttttttctattaacccccgagattctcatatgcttgtgcttgttctaagttgggatcggaggtggggaaacattattattccttgattttatcctgtagctgcctaacagtaacaggcgttattcttttttctatccgcacaatgacacttcaagcttagtggtaaattcgtctggttaattatttgcaatgtaatgatactttcaagtaatcaggcaatgcttttcagtaatccaccccaaaaaaatagtgcgaaattcatatgatcagtcagtgtggtttcatcgtgtatataattccttacatccaggtttcatctgtattgacatgtatcgagatggaataaggatcattttcttatcttgcataaacattactaggaatattggatttgttttaaacatttcaatgacttgtttcaccgctcttctactattagcatcctagaagaatgcaggttttatttttatccttagagttaatctttttaaattttaaccaattacacatataaagtatacttatttaaattaataaatattaaaatgcgtttttataataaacatatttaaatgttggtatcatttataaaattagttaaaaatctaaaaaaaactctttggataaagctgtgtgcgtgtttttagaacagatggagtatatataatactaaaaagaacttgaaatgtgtggagactagacagatagaggattctctctacagcgtagacggttctctcttctggcaacgtgacctaaaagacagtgctctttgacaaaaagtagatgtcacaagtcttcgttctgatctgcaagactgcaatcaaatcttttgtccaccttttgtacaagttgcttcgatttccatgtttttctactgctcttcttccaccacgtttccatttccttttttactaaccgttgaatcgtccaaattaaccggccggacatcctacctagctggtcacggcagacagagctttctctcatgtatcccggccttgccaggaaatgcctcgagatgttcatgcgaccttacatgactctgactggtaccttttcaccctataaaaatgaaaatgtgttacctcatttcatactctcatgccattccgttttaacttctgctccctcggttttgaaaaataatgtttttatctttagaattgaatttattttaacaacaaaaacaataataataatttaaacagagattaattatgctaatatggttgttgtatatatatgcgatatatttatataacacccttagcgatacaagggagatacatatatgttgcattcctactataggtaagcaagttgatgagtgtgctataagttgtaaagtaaaaatatagcacaacggtctataaaatcatttttatcttacatcatatatatttgagatagtcttaaatgcgaacttatgaaagttgtggattgataaaatctaagttaaataaactaatctattaaatgaatttaattcatctaaaataaaaggatccaaacagcttcttagggattttcagttgtactatatgttaaaccgtcctgagtttagctattttttttaaaaaaactataatatttaagagtttcatttgatatactataaaaatattctcacagtttatctctttgtactgtaaatattaatactactctcttattctctataacattgatcaaattttagatgatttgacttaggacatatgaaaacctcttatattgtagtaggacgaattgagtagaaattaaggtttatgtatctataactttccaatggaatatagcttagtattgcaaattgtttatatagcatagcattaaacggttcactctggccttctgcttactcaaatttaaaacatcttttttacgttggtgggtttgggcacatgtaggctgtcttcaattgagagtttttcccagtctcgataacatatatggtagtaaaatgctctcaactttgggtaacaaatcttgtcggtaaactattgtcatgtacggccacacatacgccaggcgtaggagagcccgcgatgtgcgccgagctgagcaggcagcaaaagcacatgcgcagcaggtgagtggctaggatggaaagtagccatctgattgattgcgcatgcagcaaacatagaaggctaccacctgattgattgtgcatgcagcaaatatagaaggagattggctaggagagaaagtagctagctgattagtatccttcctattttgattagatcttcaatcaaggagaaccttctccatttgtgtaagccgccggctatatatagccatgtatgggggcacttgggaatcaatcaagaattacctatcaagtctcttcctctcttctctaaaccggcgaccaggaggacttctcctgtcgacgggtagctcggcgtgggggcataaccctgccggcaaccacgggtcaaggctacgatctacgtagccgaggtcctcctaccttgggcaataccgcccttgacaacctggtatcacgaagccgacgatcctcttcttcttcacaaccatcaacttccaccaccgcagccactaaacagccctcaaccccaccctcgccctcagcctccaccacttccaccggtcactccaacaccatgtcggagcgccctccatggccgacctcatggagatgatgaaatcctggcattcggagctcaagatggagatcaaggagatgaagatcgagatggcttcccttgaaggacaaggcatcatcgtcatctggcgttggtggcggcaatcgcatggagcctcctcgtgaaccggatcggccccccaggttccagaagtgggattttccccgttttgacgggaagtctgacccacgcctcttcctcaacaaatgtgagtcatattttcgtcagcagcgtaccatggccgaggagcgcgtcgggatggcgtcatacaacctcgaagacgtcgcccaggaatggttcatgcaacttcaggaggacgaaggcacgccgtcgtggggacgtttcaaagatctcattgatctgcgattcggaccagcgctgcgctcggcgcccctctttgagctgacggagtgccgacgcacggggacggtggaggaatactccaaccgcttccagagcctcctcttccgcgctgggcggctcgacgaagcccagcgagtccagctcttcacaagaggtctgcttccacccctcagccacgccgtccggcttcacaacccggagacgctgaccgcggccatgagcctcgctcggcaagtggagctgatggagctcgacaagatggcggcagccccggccaagccggcgcatcgcgctctaccggccgccattaaacctccgcaggcgcccccactccttgcgctaccggcaccaccggcgggtgctgcgccagccgcacgtgagcggcaaccgggtcgtcgtctctccgtggaagaacagcaggaacgccatcgactcgggttgtgcttcaactgcgatgagcagtattcccgcggccacaatcgcacctgtcgccgcctcttctacgtggaaggcattgaactggagatggcagtcgacgccgcgggcgatgctgtcccagcggaggagggccccatctactccctacatgccgtggccggagtgccaaccttcgacacgctacaggtccgagcgttcctcgggaccgccgtgctggtcgccctcctcgacacgggatccacgcacaacttcatcggcgagcgtgcagcgtaccgctccgggatgcacatccaaccgcgcccaaggctcaccgccaccgtggctaacggcgagcgcgtcacgtgcccgggggtcatccgcgacgcgccgatcagggtgcagggcgacacgttccacgtcgacctcttcgtcatgcccttggcaggtttcgacctcgtcctcggcacgcagtggttgggaaccctcgggcccatcgtctgggacgtcgccgcgcggactatgcagttccagcgcgagggacgcgctgtctgctggaccggcctcgcatcctcggtcaagccggtcgtccgcgcagtcacggcgccaccgacgccgacactacagctccagccagcccaggagcccctcctcgacgccctccttcactccctcagccacgtcttcaccgagccacgcggtcttccacccaagcgctcccgtgaccaccgcatcatcctcaaaccgggagcgctgcctgtggcggtccgcccgtaccgatacccggcggcacacaaagacgagctcgagcggcagtgcgccgccatgatcgagcaaggcattgtccgacgcagcgactcggcattctcctcaccagtacttctcgtcaagaagccggacggctgctggcggttctgcgtcgactacagggcgctgaacgcgctcaccgtcaaggatgcgtttccgattccggtggtggacgagttgctggacgaactccacggcgcgaagttcttcaccaagctcgacctacgctcgggctaccaccaggtccggaggacgtccacatgacggccttccgcacccacgacgacctctacgagttcctggtgatgccgttcgggctgtgcaacgccccagcgacgttctaggctttgatgaatgacgtgctgcgaccgtttcttcgtcggtttgttcttgtgttctttgacgacattttgatctacagtaagagctggggagaacaccttcgacacctccgcgccgtcctcgaggagctccaacgccaccagctgttcctaaaacgcaccaagtgtgcgttcggcgcgacgaaggtcggctaccttggccacgtcatctccgaggcgggcgtcgccatggatccggccaaagttcaggccatccgggactggcccacgccgcgatccgcacgggcggtacggggtttcctcggactgacgggctattaccggaagttcgtccaccactacggtaccgtggcagcgccattgacggccttgttgaagaaggatggattctcttggagcgcaggagccgcggaggcgtttgtcgccctcaaggacgcggtcacctcggcccccgtcctcaccatgccggacttctccaagccattcgtcgttgagtgcgacgcatcgtcccacggtttcggcgcggtgatggtccaggggggccaccccatcgcgttcttcagccgggctgtcgcaccccgtcatcaagcgctggcggcttacgaacgtgagctcatcggcctcgtcctagcggttcgacactggaggccgtacctttggggacgccggttcatcgtcaaaaccgaccactacagcctcaagtacctgctggaccagcggctcgcgacgcttccgcagcatcattgggtcggcaagctcctgggcttcgatttctccgtcgaatataagccggggtcaaccaatgtggtggcggatgccctctctcgccgcgacacgccggacgatggggcgctgctggccctctcggcaccgcgtttcgacgtcctggaccgtcttcgtcaggcacagctcaccgatccagcactcactgccattcgtgacgaggtgcaggccggcaccaagcgcgcgccgtaggaggtggtggacgggatggtccagtacgcggcccggctctacctacccccttcttcaccgctgctttgtgaactgctcgcagctgtgcatgccgagggccacgaaggggtccagcgcacgctacaccgccttcgacgtgacttccatttccctaacatgaagcaggtggtccaagattatgtccgggagtgccctacctgccagcgccacaagtcagagcacctacacccggccggactcctccttcccctaccaattccgcagggagtctggacggatgtggcgctggacttcgtcgaagccctgccccgagtgcgcggcaagtccgtcatcttgacggtggtggacagattcagcaagtactgccactttattccactggcacacccctactcagcagagtccgtggctcaggcattcttcgcagagattgtacgccttcatggggtgccgcagtccttggtgtcggaccgcgacgtcgtgttcacctccaagttctggaaggagatcatgcggttgatggggaccagtctccacatgacgtcggctttccaccctcagtcggacggccagtccgagtcggcgaacagggtaatcatcatgtacctgcggtgcctaacgagcgatcggcctcgccagtggctccaatggctcccatgggcggagtacgtcttcaacaccgcctaccagagctctctccgcgacacgcctttcaagatcgtctacgggcgtgagcctccgtccatccggtcctatgaaccgggggacacacgtgttgcggcggtggctagaaccatggaggagcgcgaagagttcctcgctgatgtccgccatcggctggaacaggcacaggctgtccagaagaagtattatgaccagggacaccgcaccgtcacgtatcaggtgggcgaatgggtgctgctccgtctccgacaccgctcccctgcctccctcgccactgactccaccggcaagctgaagccccggttctatgggccctaccgactaccgtgtgctggaactcatcaacgaggtcgctgtccgcctcgagcttccagcccgcgctcgcatccacgacgtgtttcatgtgggcgtcctcaaaaagtatcacggcacaccaccgcaggttacacagccactacccccacttcaccatggggcagtcaccttggagccagctagggccatccgaacccggctcaatcgcggtgtacgctaggtgctggtgcagtggaaagaccagtcgcctgcatctgcgacttgggaggacatggacactttcaccgacaaattcccaacctttcagctcgaggacgagctgcttcttgaggagcggagagatgtcatgtacggccacacatacgccaggcgtaggagagcccgcgatgtgcgccgagctgagcaggcagcaaaagcacatgcgcagcaggtgagtggctaggatggaaagtagccatctgattgattgcgcatgcagcaaacatagaaggctaccacctgattgattgtgcatgcagcaaatatagaaggagattggctaggagagaaagtagctagctgattagtatccttcctattttgattagatcttcaatcaaggagaactttctccatttgtgtaagccgccggctatatatagccatgtatgggggcacttgggaatcaatcaagaattacctatcaagtctcttcctctcttctctaaaccggcgaccaggaggacttctcctgtcgacgggtagctcggcgtgggggcataaccctgccggcaaccacgggtcaaggctacgatctacgtagccgaggtcctcctaccttgggcaataccgcccttgacaactatacaaaccgaagataagccaatccatatttgccatacatagaaactacatttgagtttccaatgcacgatttctacaaaatatttttcagccaaatcgtatttgtctctgctatatcatctacctaccatgcatatttcaccctttatttgtgtagacatagtttttttaacaagaaatctctcacctttttagttctaattctaccttaccattttgcttacttggcatcctagctaaggacatctccatcagatcccttatctcattctctatttcaaatttcactctgcaaacaatgtcatctatagtgtcgcgtccccctattttacatgatccatcgaaggcaaccaaatgctatagaaactaccaccttcgtccataaacttatgacactattgacttttttctaaaactttgacctctttcttattaaaaaaatcgtgagttatcatttattttattgttatttgtttttatcacttaagtttgtttgagcgtgacttaacattttacattttcgaataaatattttaaataaaccgagtggtctaaatttggaaaaaagtcaatgatgtcatatattttatgaaagggggagtattccttatcctactaggactgccctaatattcaaattatattatattagcagtaactgttgaagtctgcgttttgtcattttggtgggtagtgatacatgtacttgtactccgtctataagaacatatttttttgtataaattaagataaattctaaaggttaattataaatttatataatacagtatcaatattcatatcgctaactatgtttaccatgaaaatatattatttaatagtttaattgatacttgtttagtatcataaatgttgacgttttatataaatttgtccaaatataaaactgagctaattacattttagactgttaacatttgtttttatatccacggaaattcatgcacagggaaattaagtctactcttttcgtggaaacagtgacagcgtgattaaatcactggcactacttgcctgtgcatgacatcattcaaaggaggtttaggggaaaaggttttaagggcatgtatggatgtcttgagttttgtcatcgagggtaaagttaaaaaaactcttaagacatatatcttgacgaagatacaatgtcttagctctatgctcgagacagaggactaggtaattgattaatttaatttattgaatgttttgattggttgaatgaatatagtaaatcatatattttatatatgtcactgtattatgttgtgttttagtagtgtcttatacttagggggtgtttggttacaccccgctaaaatttagcccctgtcccatcgaatgtttgaacctccgttccgggtattaaatgtagtcggattataaaactaatttgtcagccgaagattaaaagacgagacgaatctagtccagttggttgggtctatatttcatactcctatttaaaagtcaaacgcttgatgtgacccgagctaaactttagcaggagcaaccaaacaccccttagagtatagtgcagcattgtcagggttgtacatgccctgaccagtccaatctgaaggaatttgtgcatcgtagttcgttccatatctgtccggagtgtgggtgtaaaggcagtgggcatttactattagcacgagagaggctagcattgctggccccgcctggtcagtctgatgtgaagataaatgaacacaactcatattttgctttgcaacacacatcacgtcatttcgctgtaggtgtctataggttcaatcttcaggccaaaacattttattctagccatacaattttgttgtggcatgcatggatgctgccgctgtatgccattgtgcataataatattttcacccaaaaaaccctaaaaatttagaagcaccgccaatctgctaatgaaaatgcaagtgtctgctgacagttgcattgcacaaaatttaagcaggcagttaagattttcttaaagtttaacaccaggaacaccattgctacatgcatattttgtacctggaaagaaaatgcttcacgtacgatccactcgtactattaaagtacgacccacgttaatctaccatacttgttgcttcttgttctgaactaataaataacgagtcattagatgaccttagttctacgtgagtttaccactggagtcgtacgtgtagcagtgttagtactacaagttatgagatcttttgctgtcctgtaagctggacgaagtaggactgaactgaataaatccccggatcaatgcatgaaatatagatagtgacacaacagtatgttgctactagactcccagattttgcatgtagaccgatatattcattcccaaagctagcacggcatcccaagtccttgctcggttattaccagatcttaacttgttaagaatttaaactcacttaatcttcttcaatatgtataatttaaattaaaacgaacagaacttaatatgattttctatgaaaaacaacttatgttgccttggtattgaagccgggtctttatctgaagtacgtcagtcagccgtattatttaatctttactaagctgagaagtctgatcagttgatctgcccaatttttctgcagc

SEQ ID NO: 1048 - DNA, 15259 bp, Zea mays
  Intron number 3 from transcript GRMZM2G109217_T01 (locus G RMZM2G109217) derived from phytozome v7.0 (chr-ID 2; pos 2 2174270 to 22189528)
cctctcaatccttcggtaaaaaaattacagtacatgtcatattgttattgttatttgattatgtactcgctatttttttaacactgcacatgttttgtcaaaatggaagaacgaccctgctccctaacatatgttacatggattcaaatcctttggatttactaattcctggagtattcatgcatagtactgttgtctaaaggcttgaaagtgatttattataatggagtcccaggaaaatgcatccagcacagaaggggtttaaggcagggagaccccctttcacctatgctttttatcttagcaatggatgttcatgctttttatcttagtttctaaggctgaagatgcaggattgttgctgcccctagccaccagatccctgcagcatagactgtcattatatgctgatgatgtggttgtgttcctacatccaagagagagtgacatccaggttatgctcaacaccctgaagttatttggagaggcttcagggctaaaaacaaatatccaaaaaagcaatgcgtttcccattaggtgtggagacgaagagcttactcttttacaagagcagctgccatgtgcagtctcatcctttccctgcaaatatctgggcatccctctacccctatacaagcttttcagaactcaagtgttagagtgtagatgggtctggcccattaggggtcccaattttgacccgttactgtagctagcgtttactgttgtaccagtcacttcctctctcatggtatcagccgcctagctcctccccttcccccagccgccgccgccgccgcatggccggccggccgcgcctcccccctcccccgccgccggtgagccctccctcctctccttccccgacgccgacgtctccttccccccctctccctctcataccgtgccttgctggccgcgcgcgcccatcccctccggcgcgccgccagggcgtgccgtggttctggccgccgccgccactggcccagcgcccaccaccgccggtcctccgcccctccctgccggcgcgccgccagggcatcccctggttgtggctgccaccgccaccacccctcctgctgcgcccgcccctcctctgtcgggccccgcgccgccgctcgctcccgcaccgtcgtcctccctatcggctccggcgcccatgcatgtggtgcccactttgacgcccctgcccgtggcactgccccggcaccggcgcccgtgggagcgagccctcctcctttctcccaccagtccctcggcagcgacgctgctcacagtgccgctcttgctccgaccgccagcgtcttctccctcgacttccattccaccactttttccttgccggatgccgccttccttcgctctcaactcctggagcctagttttccccacttcccgcccgacacgacagttggggctcccgcgcgtgcctgccctccgccggtgaccgtctacagccagccctccgccgtcacctcctcccagcgcgccccgtcggatgatgctgctaccttcctcgccgccacctgggccgccgttgcggcggctcgccagcgggcccaggacgccgcccgtgctcttgagtaggagcaggcggttgttgacgccatcgagcgccagtacgccgagacctaccgccgtctcgccggcaagggcatgtcggatggatctcccacatctgcccgtcactgcgagacaccttcgagtccgcgcccacccctgcctccactcttcgcgcttctcttcacgctcaggcggccgccctcaccagcatccgggccatcgtcaccgatgttctcgcgccggattccactcagcaccctcggtggcgcgaccaggtccttcagaccctccgtcgctacgccctcgccgatcacgtcctctccccggttcctgacccgacggaggattggctactgatggatgaggtggtgctttcttggatccatggcaccctcacggccgagcttcaggacatcgttcgtgtgtcggacgatacgactcaccggatctgggttgcccttgaggcccagtttctcggcaaccgccagacccggattctgtatctcgagaccgccttccgccagcttgctcagggcgatctctctgtggacgagtattgccgccagatgaagacgatggcggatactctccgcaccctcggggcacccatcaccgatgagagcctagttctcaacctcctccgtggtttgagccctcgtttcgatcgtgtgacgcccatcctcacccgcatgaagctgtttcccacctttgcggaagtgaagaacaaccttcttctcgaggagcttcgcctattcgccactccgacctccgctcccgccacgacgctctacaccgcgcctcggactgcccctcctgactccggggggtccctcttcaccgcacttcggccccaccgccctctgaagctcctcgccagcctactggctctggggggggggtcgcggccggagcagctctccaggtggctctcactggccctccctctacaacccgtggactggcaccatccacatgtggcctgggccattcgcgggtgcgggggccccttgccccgccacctcccagcctgtcttctttgcagcttccccgcctgctgcgccctcggctcctctccggcctcagcaggggctcctccctctcccggggcctccgtctccgtccgtgtgggggccctggaccaatgggtgggacgtccaatctctcgccagctccttttccacgatgacgttggccccacccaccttggtctgactgggtggctgactccggtgcctcctaccacaccacccggacgcaggtatcctgtcttccacctccccccactcctcccttcttccatcgttgttggaaacgactctgcccttcccgtcacctcagttggtgccactgtccttcccgggccttttcgcttaaccaatgtccttgtcgcccccaacattattcaaaaccttctttccgttcgtcaattcactactgacaactcttgttctatggaatttgacctgtttggtctgtctgtgaaggatcttgccaccatgaccgttctggctcggtgtgacagccccgggcccctctacacgcttcgcctccctgcttcctctccatcgacctctgccccgcctgttctagtagcggtcgccttctctgtgacttggcatcgtcgtctcggccaccccgggcgtgatgtgatggccaagctgtccagtagtaccttcgtttctggttgtaggggatcttttgagcacctctgtcatgcttgtcagttaggtcgccatgttcggctcccattccctacctcctcttctagggcagcagacatttttgatctgatacactgtgatgtatggacatcccctgtaatcaacatttttggctataagtactatttactcatactccatgatttctctcattatttgtggacttttcctcttcgtcagaaattggacacttttcccaccctgtctcatttcttcgcttgggtctccactcagttcggtagcaccatccgaagcatccagtgtgacaacgaccgcgagttctataacaatgcgtcccgtgctttcttcctctctcgtggcgtccaccactgtatgtcgtgtccctacacgtctcctcagaatggtagggctgagcgcatgatatgcacagcgaacgatgtcacgcgctccctgctctttcaggcttcccttcctcctcactactaggctaaggccctcaccactgccacctaccttctcaaccgcctgccaaccaaggcggttgcccaccccactccttacttcgctctttttggcatccacccctcctatgatcatcttcgtgtctttgggtgcgcttgctaccctaatctcgcttccactgcccctcataaatcagcgccccgctccactcgctgtgttttcctcgggtactccccagaccataaggggtaccggtgtcttgacttctcttcccacagagtcctcatctcccgtcacgtcgtcttcgacgagtcggatttccccttttcctcctcctcttccactacctctctcaccgacctcgacgtgtccctcgatctcgaccccgtgtcccccactgtcgtaccacccttccctgcaggcccgtccaccgcgccgactcgcgcgatcccttctgcgccgctctcctccgcacagcctcgtgcggcctcggcacctcctgcgtcgcctcgcgcgcccgcaccgccccgtgaggcctcggcgtcccccgcgtcgcccgacgcggcacccccggccccaccctcctccgcacagccacgtgcggcctcggcgtcccctccgtcgcctcatccggccccgacatcgcccgccgggtccagtccgactccggcatctctcgcattgccacgtgcggccccgttgtcccgcttcaccaaccccatccagacgtaccagcgtcgcggttgtggcagtcctccggttcgccctcacgccgagcccccgccctatcatcccgtcatcgtccatcgggatccttaccacatccacccgatggtcaaccggcgcgcgacaggtgtccttcgggcccctgatcgactgattgtctccacgacctcttctccgaccctacctccggtgccaacgactgtccgtggtgcgcttgccgatccacagtggcggcgtgccatggaagaggagtacgaggctctccaggcaaaccacacctgggacctggtacctcgtccccatggcgccaacgtggtcactgggaaatggatcttcaaactgaagctgcacgccgacgggtcactggagcggtacaaggcccgctatgtgcttcggggcttcactcagcgtcccggggttgactacgacgagactttcagtccggtggtcaaacctgccaccgtccggactgtcctgactctcgctctgtcccgggactggctggtccaccagcttgacgtgaagaacgccttcctccacggcaccctgacggagatagtctactgcactcaacccgttgggtttgtcgaccctgctcacccagacatggtctgcaagctcaacaagttcctctacggcctcaagcaggccccccgggcttggtacagtcactttgccactttcttgtgttcgcagggtttcgtcgaagccaagtcggacacgtctctgttcctcttccgtcgcggccccgacactgcctacctcctctacgtcgatggtatagtgctcaccgcctcctctcctgggctcctgcgtcgcatcatctcctgtctccagcaggagttcgcgatgaaagatctgggggcgctccaccacttcctcggggtcaccgtcgagcgtcgtccccagggcctgtttcttcaccagcggcagtacaccgtcaacctccttgagcgcgctggcatggccgagtgtaagccctgcgcgaccccggtggatacgcagggcaaggtctccgtggccgccccccggtcgccgatccgatcggttaccggagtattgccggggcacttcagtacctcatcttcactaggcccgacattgcctacgccgtccagtaggtgtgcctccacatgcacgaccctcgggaaccgcacctcaccgcgatgaagcggatcctgcggtacttgcgtggcactcttgacttcaggcttcttcaacggtcctcgaccactaagcttcgcgtctacaccgatgccgacggggcggactgtcccgacacgcgtcgatccacctcggggtatgccgtgttcctcggggatagcctcgtctcctggtcgtcgaagcgccagccagtcgtctcctgctccagcgccgaggccgagtatcgggctgtggccaatggcgtggttgaggcggtctggcttcgtcagctgctccaagagctccacagtccactggccacgagcaccctggtcttctacgacaacgtcagcgccgtctacctctccaccaacccggtccagcaccagtgcacgaaacatgtcgagctcgatcttcacttcgtccgcgaacgggtcgcctgtggagctattcgggtccttcatgtcccgaccacctcccaattcgccgacgtcttcaccaaggggctcccgacgctggtgttcacggagttttggtccagtctcaacatctgtagtggctagtgtttcgcctgccggtggggtgttagagtgtatatgggtctgacccattaggggtccctattttgacccgttactgtagctagggtttactgttgtaccagtcacttcctctctcatcaagttcaacccatctcgataaagttgctgctcagcttcatggttggaaagctgatctaatgacccgatcgggaaggagagtacatgtgcagtttgtaatgacaagagtgctcatatatctagctatggcagtggaattaccttcgggggctcttaaggctattgataaaatccgaaaatgtttcctatggcgaggaaggaaagatgcccgaggtagtcattgtctagtggcttggagcagagtctgtagaccaattggattgggaagtcttgggatttttagtctcaaagagctgggatgggccttgaggatgtggtggctatgtcaggcaaggactgaccctaggaaaccttggagttccccgcccatgcatttttctggtaaagtaaaaaccttctttaacgctgctgtgtgcactgatattgggaatggatcttcaacaattttttggcaggacaggtggctgcatggaaggagaatagaagactttgctcctgttaaggcccattaggcccagtcctactggctatatatattacctacagtccttagggactaattatctattatcaatcccaaggttagtaacatggtaacagagcaggttacgaaaccgggccgcgccgccgtctgccggcttctgtgcgcgggtcgcgcagggtcgtctgcgagggccctctgcgcgcggttcctgtgtgcccacccgccgtcttcgtcagccggctgcgccctctgcgcggtccctgtgcgtcctctgcgcgtcccctctctacgttcgtcgtgcgtcctctgcgtgcagtccctgccgccacgcgacgccagctgccgccgcgagcactcagcacgcagcacctgttatctgctcttcagatcgcagcaccggttatctgctcttcagatcatttttgctggtgtctgcccatgtcgatacctttcagctgttattcttcagtgttttattactctgcattatgtcggctaacgctattgttgtcaacattgtgcctgatgggcagaattacccagaatgggcagaattacctagaatgggccttttgtgtcctgactgcattaagaggtcacaggttactatttcatttgactgaagattctccagttttagcagctgatagaagcaatgctgctgcaatcaagacttggcagatcaatgatggcaaggtaatggctgcaatggtcaacaacactaaaccaactatgattatgagtttgtccaaatttaccacggctaaggctatctggtcacatctgaaggatcgatttgttcaggatagcggtgctcttttacatacccttatgcagcagactcatgtgattgagcaacatgatatgtccattgatgaatattattccgcctttgatcgtcttatgagtgcattgacctccatggtgcccgcttgtacagctgtgccttgtgcagctcacaagttcattgagaagttctttacctacagatttgttatgggagttcgacctgaatttgattcccttcgtgcaaggctgcttcacagttcagatactctcaccatggctcaggcattgtccgaattgcttgctaaagagactcgtctgaagtccatgtcctctattactggtgtgagttctcacagtgtgttggctgctgctcagaggtctaggaacatctcttttcagccttgtgaacactgcaaaaagaccactcatcggtctgagaactgctttgctaagtttccagagaagctggctgattttcgtgtccgtcgtgctactcgtgttcgtggtacaggaccatcttctagaggctcagttgcgattgctgctacttcatctgctggtactttgtcatcatcttgggttcttgattctggagctttctttcatgtgacatctgatcagtcacggctggcgtctactacacctgtcaccgagggtacttctgtttagattgctgatggtacattgtgtcatgtcacccacaagggttctctttctgatccaacttttactgtcccaaatatattttttgtacctcagttatccatggatctactatcagttggtcaaattaccgatcacaattgttttgttggatttgatgactcatcttgttttgtacagaatcgcaaaacaggggatgtgattgggactggtcgtcgccgtaaatcttcgcctcgcctctacatcttggacactttgcgtcttccttcatcccctaccactacacctcacgtgctcgctgcttcgggccccacgacgtcattcgcccagtggcatcatcgtctgggtcacttatgtggatcccgtctgtctactctaataaagtcaggatgtttaggctctactcatgttgagtctagttttcattgtaaaggttgtcatcttggaaaacaaatacaacttccatattttactagtaattcccattctgctaaaccttttgatctaattcactatgatgtttggggtctagctccgtttgtttctaaaggtggtcatagatattatgtcatttttattgatgatcattctcgttatacttggatttacttcatgaaacgccactcagaattaccttctatttacaagtcctttactcgcatggttcacacccagttttctgctactattaaaaattttcgttcagattctggtggtgaattcctatctgataattttcgccagatattgaccatagagagtactctagctcaactttcttgtcctggtgctcatgcccaaaatggtgttgctgaacgcaaacaccgtcatattattgagtgctcatactcttttgatatcttcttttgtgccttcacacttttggagtgaagctgtttccactgctgtgtatctcattaatagacaaccttcatctaaactttctggtaaatcaccaggtgaagttctttttgggacttctccacgatatgatcatcttcgtgtgtttggatgtatatgctatgtcttgttaccaccacgtgagcggactaaattgactgctcaatctgtagagtgtgtattccttggatatagtcctgaacacaaaggctatcgttgttatgatccatctacttgtcgtatttggatttctagagatgtgagtttcaatgaaaatcgtcccttccttcacaaccagtctactcactccacctattatcccacagaatctacttctttcatgtgtcttccttccattcctgcatctgaaccatcatcttctacatccacatctgatgttctcattctcataacaccaccttccacctccacgtcatccacctcttactcttccaaaccacctatcatccaaacctacattcgtcgttcccgctctattcctacggctggtcctgatcctgatcctgtacctgattcttgtactaacaataatgagtctaatgatgtttttaatcagggataccgtcttcgtgaccgtggtaccattgaacctccagatcgctatggttttccacgggctggtgtggcaattgttgaacccactacatatcaggaagcttctgggattcttgagtggcagctagctatgattgatgaattggctgctcttgaacgcactggtacatgggatattgttcctttaccctcacatgtccctatcacatgtaaatgggtcttcaaagttaagacaaaatcagatggttccattgagaggtataaagctcgtcttgtggcccgtggttttcaacagactcaaggacttgattatgatgagacttttgcacctgttgcgcatatgactactgttcgaaccttgattgcagttgcaacctcatcttcttggactatctcccagatggatgtcaagaatgcttttcttaatggcgatctacaagaagtttatatgcatcctcctctaggggttgatactccctcagggcatgtttgtcgtcttcatcgcgcactgtatgggctgaaacaagctcctcgtgcttggtttgagcgattcatctctgtcatcacagttgctggtttttcttctagtgaacatgatcctgcattgtttgttcatgtctctctccaaaaggcctcactttactactattatatgtggatgatatgctgattacaggtgacaattcagaacatatttctcatgtcaagcaacatcttagtaaggaatttcagatgtctgatttggtaccgcttagctatttcttaggcattgaagttcagcagactcaaaaaggcttttatctgtctcagtccaaatatacacaagatcttcttgaccgctctggacttactgatacacgcactgttgcaacaccgatggatattcatttaaaactttgtccgaaggatgggacaccactagcagatccaactcggtaccgtcacattgtgggtagtcttgtttatctcaccatcaccagacctgatattgctcatgctgttcatatgttgagccaatttgtgtcaacacctacttcagttcattatggtcatttgcttcgtgtttttcgatatttacgtgggacaagatccaaatgtttactctatgcttcagatagcccacttcagcttcatgcgtattcagatgtgtcaagcgcctcaacgcccaacgtcgctggaccgcggctacgcagttcgtagtcgtgctccagaccttcaccgtgaggggttcctcaccggtggcttgagagaggcaagggagaagagcagttttggataattgatcttgcttgattatttcccagtctattacatggcatatatatagcctctggttcaaccaatctctcctatgattaaggcatatgaaaaggaaactaatcttaaccaacctctcttatgattaaggcatatgaaaaggaaactaatcttaaccaatccctcctatgattaaggcatgcaaaagggaaactaatccttatctttctaaacttagccactgattgtggcgcctgccttggctgcgcgatctgcagccctcctggcgtcacgacgacgcctataagtgcggccgtacatgtcatctctccccccccctcgacgatcagctcgtcctcgagctgaaaatggggaaatttgtcgcggaagtcggcgacatcttcccatgtagcatcagtagtggcctgccctttccagcggatgagcacctgctgaatacccctggccaacctgtaccgaacagcctgctccggttctaggatcagcgcccattgtgagtgggtggaagagggggtggtgtagctggtggggcgccgacgaacttcttgagaaggccgacgtggaagacatcgtgcaacttggcacgcggaggtagcgctagacgaactgccaccggattgatgagctctgtgacttgatacggcccgacgaagcgcggcttcagcttgcccttgggcgcgtggggaagggaggaggctgcccgatgacgcaggcgcagcagcacccagtcgcccacggtataggagaccagtcggtgcaggcggtcgtagaacttcttctggacggcctgggcttgttccaggcggtagtgaacatccgctaggagctcctcgcgttcagccattgtcttggccaccgccgccacccgggtatcgccaggctcataagagcggatggagggaggatccctgccgtaaaccaccttgaaaggagtgtccctgagtgatgattggtacgctgtgttgtagacgtactccgcccacggtagccaacgtagccactgacggggccggtccccagtgaagcatcggaggtacatgacgatgactttgttggccgcctccgtctggccatcggactgcgggtggaaggcgaacgtcatgtgcagcttggtgcctgtgaggcgcattaactccttccagaacaccaaggtgaacacggagtcccggtccgacaccatggactgaggaatcccatggaggcgaacgatctcgccgaagaacgcctgggccacagactcagcactgtaggggtgagccagaggaagaaaatgacaatatttgctgaacctgtcgaccacggtgaggatcactgatttgcccccaacgcggggcagcgcctcgatgaaatccaagccgatgtcggaccacacggcctggggaacggacaggggcagcagcaggcccgccgggtgtaggtgctcagacttgttgcgctggcacgtagcgcaggcgcggacgaagtcttggaccacacgacgcatggcggggaagaagaaatcgcggcggaggcgatggagagtgcgctgcaccccttcatgaccgtcgtcgtgcgtagcggccaccacttctagcagcagcggggagtccggcgggatgtacagccggtctgcgtatgccaccatgccgtcgagcatcgaccatggtgcgccccttgtgccggccgcgagttcatcccggatggcgaccagggccggatcctgaagttgagcctgacggagacggtcgatgaagtcgaagcggggcgcggacagcaccaagaccgagccttccgcgtcggtgtcgcgccgagacagcgcgtcggctacggtgttcgtggcgcccggcttgtactccaccgagaagtcgaagccgaggagcttgcccacccaatggtgctgcgggattgtcgaaaggcgctggtcgaggaggaacttgaggctgtagtggtcggtgcggacgaggaacgcgcgcccccacaggtacggtcgccagtgtcgcacggcgtgcaccagcccgatgagctcccgctcataagctgccagcgcgcggtgacggggggcgactggcctgctgaagtaggcgatcggatgatgttcttgcagtaagaccgctccgaagccgtgtgtgggtgcgtcacactcgacgatgaaggccttggtgaaatccggcagcgccaaaaccggagccgaggtcacgaccatcttgaggtcctggaaggctgcttgggcctcgtcgcaccaggagaagccctccttcttcatcagcgcggtgaggggtgctgcaatcttgctgtagtcctggacgaacttgcggtagtacccggcgaggcccaaaaacccacgcaccgcacgcgccgaccgaggtgtcggccagtcgtgaatggcctgcaccttggccgggtccatggcccgtggacaaagatgacgtggcctaggtacgccaccgatggggacccaaaaatgcacttggatcgcttgacgaagaggacatggcggagaagttcgtcgaggacggcgcggatgtggcgcaagtgatcttgtcaagcgcctcgacgcccaacgtcgctggaccgcggctacgcagttcgtagtcgcgctccagaccttcaccgtgaggggttcctcaccggtggcttgagagaggcaagggagaagagcagttttggataattgatcttgcttgattatttcccagtctattacacgacatatatatagcctctggttcaaccaatctctcctatgattaaggcatatgaaaaggaaactaatcttaactaacctctcctattattaaggcatatgaaaaggaaactaattttaaccaatccctcctatgattaaggcatgcaaaagggaaactaatccttatctttctaaacttagccactgattgtggcgcctgccttggctgcgcgatctgcagccctcctggcgtcacgacggcgcctgtaagtgcggccgtacatgacatctctccccccctcgacgatcagctcgtcctcgagctgaaaatggggaaatttgtcgcggaagtcggcgacatcttcccatgtagcatcagtagtggcctgccctttccagcggactatttctcttgggcaagtgatcctgttgaccgttgttctactacaggtcattgtattctccttggatcacaccactggcaagcgtacaggtaaagccccttcatttagggtcaaaatgtgatggtaaaaatatgacacgttaggaatacattttgtgtcggttaccgatctatagcaagaagtaacgcacaatcacacataatatatgcagcagctcagctcgtatatacaatagcattcatatatacatgcttgtgtactctgtatatgttaactgtgaaaagggtgaacaggatgcatgagctgaaactcgatgacacatctgaattccgaagtgaccaactaaaatcttgtttttcatctctatataggagtgttaaacttttgatagtaattatggtctatagtagcaaaaggatatttgggtcggcccgtattacccattgggttaatgagaccatagtcttctggtgaaattggccaacccatgtactccttattacccatggccatggggccggatccaaggccggggccaggtcaaccattctcatccctaaatgtgcacatcctagctgaccatcatcaccactctaacgagggtgccccagtgcatgacccgtgtagccattcccttcatgctggtagaagcttatgtttggaacaagtaatcttactcagctatgcacgctttgcagccttgttgttgttcctgccgctactatcaactagcactaccaggactgttacaacgttatcactcaattcacttgctgttcaaatatggtggtttacaccagttttggttttcctgtctgcatttccttttatgacatggcaatcttagccagcagcattttattggatctcattgcttgctggctctttctacctcgatgattgtaatctagacatctagtgtacatcatgtatgttaacagttcatgtatattatcatttaaaacatcaagtcatgttattcttaacacattatacttattgtgcaaactctttgtaaaagaataaattgcaaacactacaattgtaccttttttattttctgttttgttattagtagatgttctaatattatttttatccattgggaattatgtaaggatgtcttgtaatgtgattagtacggtcatttgtattttttaccttttcagtataatgctaaagctatttcttacgctgtattcatgtttctgcaaatgttactcacaggaattacaaggcgttat

SEQ ID NO: 1049 - DNA, 1185 bp, Zea mays
  Intron number 3 from transcript GRMZM2G180558_T01 (locus G RMZM2G180558) derived from phytozome v7.0 (chr-ID 9; pos 1 41382172 to 141383356 reverse strand)
acatagataagaaaattcgagcattgaaaaagaaggtttacccttgccctctcttgtgtctgcacattttctatgaacaaaaagatgaatgtgagttcagttccgaactagcatgtttaaatcattttcctcattgtcacgtctgggcatggtagtttttctccaatgtttaagttggatttgatcttgtttgtagcaaacttcaattgcgtgttttcattttcagtactcgctctgtcccaaaatataattcgttttagactaaacaaacattaattaattaacctacggatgtagtttgtatatatgtccatgttcattatcatttgaatgaatgtagacgaaaaaaagaggactaggaagaactatatttcggaacggagggagtatcttaaaaccaaacatgatagtgaaaagttttagtgcattaaatgctgagaatccaacttaggctattcacaatggaggtttcatggggtgtttcatgtattaattagcctgccacatcagctatttggatgacatgtcacatcatttaagaaggaagagtttcatggagtttcatggggatgaaaccatgttaactcgtttccaatgtcttgaaaactgtgtgaaaccttcactgagagtgttttgtttcatcttcgtataattgagtaaatcctattggttatttatatgtagcatttaagaagtatgttgacatatgaaataatgagatgaaactctctattgagagagggtatttcattcatccataaatctgatgtggcatttttggaaacagagatatgaaatcctcattgtgagtagccttaatagtatctattaagagtggtttattttctagttttagtgcattaaatgtattgcacatgtcctttaaacatgtacgaccagccgtcctcctgatttcactaaatgtttggcacttttttccgttagtgatatttcacttgtttaagagcctttgtgctttgtagtaaacccattttgacgtgaggatattcattagtactccctccattctaaattagatgatttgtttttttttctaatagcttttgctatacactttgaatctaaggtgtattttaggaaccaaagcaggacgagttgacgtggctgaatctatcttgatttctaacagatacgcttagctgaagcacaagtacaaggtgaccc

SEQ ID NO: 1050 - DNA, 16087 bp, Zea mays
  Intron number 1 from transcript GRMZM5G833386_T01 (locus G RMZM5G833386) derived from phytozome v7.0 (chr-ID 10; pos 64844081 to 64860167)
agggccatccccccacacttgaagctggtgacctgttaagcatttgctgcttttagtttagtgcctgctgaagctaaaaaaaactttagcagaacacgtcgtcttgtgttcctatcaattgaagagagacaaatatagagggagcacacgcggggccagacccaaaccggccacgcacgtcagtgtcttatctgcggtaacgttaggaacgttaggacagagtatctgtcaggaatatagagtatgaagtttagccggttttttgtgcaatttagtaatttttccaaaaaaaaaatcacatttaaacctctatatgacaatatgacacttaatgttgtttttagactatttactcggtgtcatacatcatagcgtgaagataacacggcttggcgtcataattcatggcgcatacgttgaccaactcagcgctacagatcacaacgccgagcttgacaccacatataacggcgccgagctaggcaataaatacatgtgttgtcttcacatgcagttattgcctaacttggcaccgtgatatgtggcgccgagctaggccacgtagataccagtgtggcttgggacgccagagccaagatttgaatataggccatgaaataaatacacatcaaaagtatgtatataaactaaataaattatgttacagtacaaaggagagctaaaaatgtttaaacgctgaaaagtatggagaaagaagattaattagccttagttctgaaccttcacaggatcaaaatctattttaaaatataaaatttatcctaacaattcggatacccactttcatccctaatgagcaagttgcatctctagatgtttagtcgacaatactaacaagttcaaagacgatgtagaaaataatagaaagtccaaattttaaatacaactagagattaatataagggaagacaacaaaaataaatataaatagcaatatcaactagttaattaaacaagttatcctaaattaaacatctctatttctatttagtgattctaagaatacgaatcttagttaaattatataaacttctagaaacaaattgtcaaagatagaaatgtttcattttaggcaagaatataaaacaaccatctttctgaagcatagtgatatttcttaggtcatatgagctttaaatatgtggtgcttgtaccccagataatagttgcatgaaaaaatgaatctaggtaataaaagtgaaatttgtcaactattagcacactcattagtagttaagctagcgtggtgcatctccaatggtctctcttgaatttactttctaaatcatcctacaatctttcttaaacttagtatgtaaaccctagtttagagagccatttagatggaaaccactatttatatctttccaccctctaacttctctatattatatgcacactttggacaaccaactccagtactcctctatctttctttggctagtaacaaatcagaaatagagtatcgcagtatttagagatctaataaaaaatggatggatgccgtttctcaccaaaacatctatttctattaattagagaggataaatagcgcacctattagttggtatttgtaatttgggtcacatagaactatttgttagctggtagttatcagataagtgtcaaacaaagcagtacttacttctgacattcaaattgtaagggcccttcattagatttggttattactcaatgtcgggaatggtatagatcttccgctctatgctgcattgaagtttgcgacacaagtcatattgaaccatactgacacaagatcttccgctccataaatattgctcgttctcacttttaggggagtcaaacatttttaactttgatcacatctatataaaaaattaatatttatagtacataattaatatcagtagatagatctttgaatctactactttcgtagttaaattattcgaagatacaaatattgctaatatattctataaatctagtcaaatttaagaaagtttgactggtacgaataccatagtgtcggcgtttcgagaccgggggtccctaagccgacgagtgagtatgctacgtgccccagcccagatgggtcgagcgcgtgggcgagcgcgaaggggggagaggcgaggtggccggagacaggcgtgagagaggtggaagtcccgcgaccttcgtgttcgtcccgcgcccaggtcgggtgcgcttgcagtaggggggttacaagcgtccacgcgggtgagggaaacgagcggccccaagagagcgcctgtcccgtcctcggtcccgcgcggccaaccttctctaagaaggccctggtcctcccttttatagtcgtaaagagaggatccaggtgtacaataaggggtgtagcagagtgctacgtgtctagcggagggagagctagcgccctaagtacatgccaatgtggcagccggagagatcttggcaccctgctggcgtgatgtcgtggctgtcggaggagcaacggaacttggcggaaagacagctgtcggagcggtcgagcccttgctgacgtccacctgcttccgtaagagagcggagagccgcctccgtcatggagtttgggaggcgccatcattgcctatctggcggagctggtcagatgggacaccggtcttgttctctgcggcccgagtcggctcggggtagagtggtgatggcgctccctgttgacgtggcgggcccgcgcccgaggccgggcgacgtggtggctcctccgaagctggggtcgaatctgtcttccgttgccgaggccgagtccgagcccctgggtcgggcgaggcggaagtcgttcggcagaggccagggcggagtccgagccatggggtcgggcgaggcggagttcgtcgtcttccagggccgagcccgagtccgagccctggggtcgggcggagcggagttcgccgtcttccgggtcttagcctgagtccgagccctggggtcgggcggagcggagttcgccgtcttccgggtcttagcccgagtccgagccctggggtcgggcggagcggagttcgccgtcttccgggtcttagcccgagtccgagccctggggtcgggcggagcggagttcgccgtcttccgggtcttagcccgagtccgagccctggggtcgggcggagcggagttcgccgtcttccgggtcttagcccgagtccgagccctggggtcgggcggagcggagttctctttggcgcccctggcgaggcctgactgcctgtcagactcactctatcgagtggcactgcagtcggagtggcgcaggcggcgctgtccttctgtcagaccggtcagtggagcagcggagtgacggcggtcacttcggctctgccggggggcgcgcgtcaggatagaggtgtcaggccacctttgcgttaaatgcccctgcaactcggtcagtcggtgcggcgatttagtcagggttgcttagcgaagccaaggcctcgggcgagccggagatgtgtccgccgttataaggggggcctcgggcgagacggaagtccctcgaggtcggctgcccgagtccgaggctaggctcgggtgaagcgtgatcgagtcactcgtatggactgatccctgacttaatcgcacccatcaggcctctgcagctttatgctgatgggggttaccagctgagaattaggcgtcttgagggtacccctaattatggtccccgacagtagcccccgagcctcgaagggagtgttagcactcgcttggaggctttcgtcgcacttttttgcaaggggaccagccttcctcggttgcattttattccggtgggtgcgcgcgagcgcacccgccgggtgtagcccccgaggcctcggaggagtggtttcactccttcgaggtcttaatgccttgcgtaacgcttcggctggtctggtcgttccctcatgcgaactggccgtagcccgggtgcacggtcggggcccaagttctcgggctggtatgttgacgctgtcaacggttcggccggagccgggtttgcgagagcagcccccgagcctccgcacagggcgagagggcgatcagggacagactcgactttttacatacgcccctacgtcgcctttccgcaaggaggaggggggagtgcgccatgttaccctcgatgggcaccgaacatggtgtctccggtgagctgcaagcgggtaatccgagtggacgtccgtgccccgttcgttgggggtcggctaggggcccagaggcatgcccaaaagtacctgcgggtgatctgccggacccggtcccctggcgacggggtccgagggctcgatgcctccctccgatgggattccgttacaagatcgctcccgctggtctcggaaatgtcctagggtacctcgggagcgcagcccgagcctcggttatgtatcgaacgtacccctggtcatccctcgctcggcgtctgaggcgactgtgaacccttcgggggccagccttcgaacctctgatcagtaatgggcgcggagcccgagtagcctgaggcggccatggagcccttcggggggccggccttcgaacccctgaccagtagtgggtgtcgggcccacgcgatctgaggcgactgttgaacccttcggagggccagccttcgaacctctgatcagtagggggggggggctcggagcccggttccttcacagggaaggatccttttcggggtatccccctttcccggtccctgttgcaagagatagagaaagaggaaaaagggaaaaggatacgaaatcgaacgacgtggcgtaccttttttggcgcggttattacggtgaaggcgaagcatcgtccgcttctcctgccagaagcgccgcctgtcccgccgcggagttaatgcgacggggcgagtggttggcggggcggccgttgcgcatgcgtgagccgttcgagggacgactattttgcatcacgccttttgaatcccgcgtccggtccgggcggagcgctggaaacggtttcgccctggtctttatatactcgggagagaacccggcgacggttcttcgctccgcttcctgcctctttatttaggttttcgcaacccgagaggctttgaccagaggagaggaaaacgcccttcctgccccttgcgccgccatcccttccgccttgctgatggctgaccgagtgaccatcatctccccgcgcgatccgtggccattttccacggtgacggcgagcgatctgaaggggctggttggcgaaggtttgcttcgccccctcaccgacgggcagcgacctgagtggattcctcccacgggcggagtcgctccatccccaccgtcggggtacgtggtgagcttcatctccttccacgagcggggattcggcgtgccgactggccgcttcatgcgggcaatcctgttccactatggggtggagttgcacaacctctcccccaattctatctcgcaggtcgctatcttcgtggcggtgtgcgaagggtatttggggatcgctccccattgggatttgtggacccatctcttcctcgccgagccattcaccttgccgacgggggagagaagggttcgtgcagcggtgcgggccggcggctgcactctcttgctgaggcagtcgcgggcgtcacagtacattcctgccatccttgcgtcctcgaacaaggggtggcagcgccggtggttctacctccggaatgacggtgagttgctcccaccattctcccagcgggtagtcaccgccgccaccgacgcctggcgccacgggaccccgcacgagagacagaagaatctcgaacctcttctccaggccctgaaggagttgcgggagggggactcaccgctgcgggagtggtcgccgccatccatcgtcggagggtgcttcctttggcggagcggcggctgccgctctgggagatgactccgaaggctgactgggggggctcgcaaatgtcccctgatcctcttcccttcgacaccctccaatggcgagtgtcggctgcgatggggaagccggaccctcatgcctactcccagcttcggatgcgccccgaccaggggtgcgtaactctggtgagtactcaccccctccttcacacatcgggttgctccgggctcttacgatcgggtttctttctccccttcttttaggaggtgggatggcacaagccctccctgccacgggtcccggaggacgcggtggatcgagcagcgcggcgggtcgccgtagaggagaaaaagaagaagaaggacgcggagaaggcccgggcccgcgagcggaggcgggctcgggacgccttggagaagcgccgccgccagcaggagagggaagggctcccgagggagccatcgccagagacgcccgacgacgacgatgacgacgatgatgaagaggaggatgacatggccgcccgtctcggcctcagccccggcttggggtgtggccaggagtcgtcgggccagcccccgagcgggcagacgccgtcagcccccggagttggggtgtcggggtcccggcccgaggcgcaggggcgacccgagaagtcacctgacccctcagccggaggagctgaggtggctccggagggccagatcagggcgtctgctccccaggggccgccgctcgtgccggtggcgcatgggggtgaccctcaagtcatcgcggctgtgcccgggcaatctgctccccgggcgtccaaaacgagggtggcgccgaaggtgccggtgaagcggacctcggcggctgtttcgggagccgggatccaagaaggctccccccaggcgcggtggatcatggcccgaagtgggtgagtatctcggaacgtctgcgtcttggcttcccattcgtgtgtctcggctgtgatcttccctttctttctctctcttcttttttttatccagcaagcgaagccatggccagaccgacctggcaccccggaaggtcctcaagacggcaccggactgcgcggtcagcgccgcctcgggtcttgtcgttcagccgaccctttcgcagggtgttccgccgcagggggctcgggtgtcgcccgtctctggggagcgggctcccaagactggctcttctgccgaggtggccattgtgataggggaggcggccgacgctgacgtggccccgagcctgcccgtcgtgccggccacgccggcgccggttgctgccgaaatcgccgccgtcccagtcggggagcgaccggttgctgccagcgtcaggatggccgacgcgtcggcgcccagtgcctcagaagaggtgggtgtgggcgcgcgatccgtccagccgagtggcagccttatcgctgtgcagcggagccccgaggcccggcgcccgtcgctccgattccggacccgcgaggcctcggaccctgtcttcgtcctcgacgatgaacgggaggaccagtcctgggatgagcttcgcgagtgtgctgaagcaacggtggggtcgctccggtcgtcgctggaggttctctgcagggatgtccccaaaatcctccaggtaacggtttcaggcataccttttcctttctgcgagcgaggcgttcgtcgtgacgccctgtctccttcctccaggacctgacggatcggagcgccgccaagtcatcattcatccgccgcgaggccgatgtctggggctcgctgcgatccctgaggacctcgcttgccggggctactgcgcgcctttctcagcaggacgccaaggttgtggacctccagttgctttgcgctgacctgagggccgaggcggcagcagcgcgcgcggaggcgcaacggcagcggtcggagttcacctaggttgtcgaggagcgggaccaatctcgggaccgagctgccgaggccgaaggccgggctgagaccctcgcggccgacctagccgcagcccaggtcgcggcctcggagcatcgtgcccgagccggaggtacgccatggccgtccctgattcttgtttttgtcggtttcctctgcttgtgcttgaggtctttcttctggttgttcgcagagcttgagtccgcccttgacgagtccgccaaggcgctcgccgaggcgcttgccggagctgccgagcagagggaggctgacctcgcggccatgtccgaggccgtctcggacgtttatcgtaacctcggctccggcgacgtcccatcaggaagctcccctcaaagccgccttcaagccttgggtgatcacgcgcgcggcagagtccgcgaggcgctacaccacggcgtcaggcgggccttcgccgtgctcgcttcccactacgttgtggacctggagcgggttagtgaggggtactgtcttcctgacgaagacgaagctgccctggcagaagtccagcggctcgacgcggtcgccgcgggtccgagcgcggcgctggcgaccacctttgaggcggagatccttccccctgtgccgtcaccggaggccgagatggaccttaccgacggcggggacggtgctgagggcgcggctccttcccaaggcggcgcctaattcttgttggaacaatttcttgttggatgtgcatctcaccgcggtcgctgaggcctaaacactttgtctttcttgcatgaagtcgtactctcctttcttcccatttgcgtgtccgtcctagctcgtcaataatagggtggcttcccgagttgggtcattcttcgtggcaggtgatgagtgaggtatccttaacccgggggcgcaggagttcctcggctcagtcggcctcgccatttacatgtacccacgttcgctccccgagaccctgcttctggcatagccgggagaacgcgagaggccccttttttgattgaaaatttttgacacggagaagtacgcccaatcttgacgcagaggggttccccctttttagcccccgagggagggtcgggctctgctgaggcgaggccgactctcccttgatgaccgaggcgcagaggctgcctgacgggtcggactcaggcccaaacatccagctagtgcttggcgacatccctcggtatgccgggcatgtccgagggactctacgcaagacgtcagcgtttgcgcggagaaagtcgacgagcactgcttcctatttggggtcgagcccggaaccgatccggatctgctcggaggtgtcgccactggggtcgagtgggacggccttaaccgtctccgctggctcgaagttgccggcatgacgcttcacatctggcacctctttggagaggttctccaggtcggcgatgagggcctcggactcggcgagggcctcggcgtactccacgcactccacgtcgcattcgaatgcgtgtttgtacgtggggccgacggtgatgaccccgttggggcccggcatctttagcttcaggtaggtgtagttggggacggccatgaacttcgcgtagcatggccttcccagtacctcgtggtaggttcctcggaacccgaccacctcgaacgtcaaggtctcccttcggaagttggagggtgttctgaagcagacggggaggtcgagttgtccaaggggctggacgcgcttcccagggatgatcccgtggaagggcgcagcgcctgctcggtcggaggacagatcgacgcgcaggagcttgagggtctcggcgtagatgatgttgaggcagctgcccccatccatcaggaccttggtgagcctgacgtcgccgatgacggggtcgacgacgagcgggtatttccccgggctcggcacgtggtcggggtggttagcctggtcgaaggtgatgggcttgtcggaccagtctaggtagactggcgccgccaccttcaccgagtagacctcccggcgctcttgcttgcgatgccgagccgaggcattcgccgcatgcccaccgtagatcatgaagcagtcgcggacctcggggtattctcctgcttggtgatcttccttcttgtcgtcgtcgtgggccctgccaccctccgcgggtggcccgaccctgtggaagtggcgccgaagcatggcgcactcctcgagagtgtgcttgacgggcccctgatgataggggcacggctccttgagcatcttgtcgaagaggtttgcacctccggggggcttccgagagttcttgtactcggcggcgacgacaaggtccgcgtcggcggcgtcgcgtttcgattgcgacttcttcttgcccttcttcttggcgccgcgcggagtagatgcctcgggagcctcttccgatgggcggccctggggctgcttgtcctttcggaagatagcctcgaccgcctcctggccagaggcgaacttggtggcgatgtccatcagctcgctcgccctggtgggggtcttgcgacccaacttactcaccaggtcgcggcaggtggtgccggcgaggaacgcgccgatgacatccgagtcggtgatgttgggcagctcggtgcgctgcttcgagaatcgccggatgtagtcccggagcaactctcccggctgctgccggcagcttcgaaggtcccaggaattcccggggcgcacgtatgtgccctggaaattgccggcgaaggctcggaccaagtcgtcccagctggagatctgccccggaggcagatgctccaaccaggcgcgagcagtgtcggagaggaacagggggaggtttcggatgatgaggttgtcgtcgtccgttccacccagttggcaggccaggcggtagtccgcgagccacagttccggtctcgtttcccccgagtacttcgtgatagtagtcgggggtcagaaccgggtcgggaacggcgcccgtcggatggcccgactgaaggcctgcggaccgggtggttcgggcgagggactccgatcctccccactgtcgtagcgccccccacgcctggggtggtagcctcggcgcaccctttcgtcgaggtgggcccgacggtcgcgtcgatggtgctcgttgccgaggtgacccggggccgcaggcgcggtgttgcgcgtgcgcccggtgtagaccgaggcttcccgcatgaatcgggaagtcgcggcatgaggttccgaggggtatccctgccttcgggaggcagtgctctcggcccgtcgggccgcagcgccttccaggagattcttgagctctccctggatccgccgaccctcggtagttgatggttccggcatcgtgcggaggagcatcgctgcggctgccaggttctgaccgaccccgctggatgcgggtggcggcctgaccctgacatcgttggcgacgcggtgctggagaccttggggcgggtgacgtatttctccggccgggggttggcccgcccatacccgtccgacgtcccgacggatcggctcaagcgctcctgttccctcgtcgagcctggcctgcgcctcgcggacttgctcgagttgtgggtcgtaaccccccaccggaacggggaccacagctagctcccgcaggatgtcggcgcgaggcgccggcctaggaagatcaccgtcctccggcataccgagatggttgccttcggagggatcccctagctcgatgtggaaacattcgcggcttgggccgcagccctcgttgtcaaggctgcggcttccgtcgggacagtcggagaggcagtagttacatgcggtcatgaagtcccgcatggcactggggttgccgagtccagagaaatcccaacagatgctgggatcgtcatcttcctcggacccagagggcccgtaggtcgagacgtccgtcaaccggtcccaaggcgaccgcatatgaaaccccagtggggttgcacttgcctcaatgagagcgcccgtcaaagcaaggttgctaggcgggttgaggccgagtcgaaatgacgtaagatgggagttagtcagtaccttttggtcgacgcggagcgacgtagtcacatcggggactggttgcgccgtcatctcaggtacaagggcgacgtcctgcaagctctccgcgagcgcgctggcgtcgtcttctcgctcgggatcggcgtgtcgcggggggacggcgcttgccttcgtctcgaacgcgaggtcgacgcccggcgtgccttccgtcggggcgtcgggggcgtcgattcgctcgacggccgacgaagcgcggcctcccgcttggccttggttgccccgcctcctcctccgttggcgggggagaggacggagcgagctcgaaggttgttcttccaccatgcgggggagatgtcgtcggttccgccgccggcgggcgggttgtcggccgccattgtcgttgtcgcacggcggtggaaggagtatcatgtcgtagctgccgtcgaaggacatgaactcaagactcccgagacggagcaccgtcccgggccggagaggttgctggagactgcccatctggagcttgacgggaagctgttcgtcagcacgcagcaggcccctacctggcgcgccaactgtcggcgtttcgagaccggggggtccctaagccgacgagtgagtgtgctgcgtgccccagcccagatgggtcgagcgcgtgggcgagcgcgaaggggggagaggcgaggtggccggagacgggcgtgagagaggtggaagtcccgcggccttcgtgttcgtcccgcgcccaggtcgggtgcgcttgcagtagggggttacaagcgtccacgcgggtgagggaagcgagcggccccaagagagcgcctgtcccgtcctcggtcccacgcggccaaccttctctaagaaggccctggtcctcccttttatagtcgtaaggagaggatccaggtgtacaataaggggtgtagcagagtgctacgtgtctagcggagggagagctaacgccctaagtacatgccaatgtggcagccggagagatcttggcaccctgctggcgtgatgtcgtggctgtcggaggagcaacggaacttggcggaaagacagctgtcggagcggtcgagcccttgctgacgtccacctgcttccgtaagagagcggagagccgccgccgtcatggagcttgggaggcgccatcattgcctatctggcggagctggtcagatgggacaccagtcttgttctctgcggcccgagtcggctcggggtagagtggtgatggcgctccctgttgacgtggcgggcccgcgcccgaggccgggcgacgtgggggctcctccgaagctggggtcgaatctgtcttccgttgccgaggccgagtccgagcccctgggtcgggcgaggcggaagtcgttcggcagaggccagggcggagtccgagccctagggtcgggcgaggcggagttcgtcgtcttccggggccgagcccgagtccgagccctggggtcgggcggagcggagttcgccgtcttccgggtcttagcctgagtccgagccctggggtcgggcggagcggagttcgccgtcttccgggtcttagcccgagtccgagccctggggtcgggcggagcggagttcgccgtcttccgggtcttagcccgagtccgagccctggggtcgggcggagcggagttcgccgtcttccgggtcttagcccgagtccgagccctggggtcgagcggagcggagttcgccgtcttccgggtcttagcccgagtccgagccctggggtcgggcggagcggagttctctttggcgcccctggcgaggcctgactgcctgtcagactcactctatcgagtggcactgcagtcggagtggcgcaggcggcgctgtccttctgtcagaccggtcagtggagcagcggagtgacggcggtaacttcggctctgccggggggcgcgcgtcaggatagaggtgtcaggccacctttgcgttaaatgcccctgcaactcggtcagtcggtgcggcgatttagtcagggttgcttcttagcgaagccaaggcctcgggcgagccggagatgtgtccgccgttaaaaggggggcctcgggcgagacggaagtccctcgaggtcggctgcccgagtccgaggctaggctcgggtgaagcgtgatcgagtcactcgtatggactgatccctgacttaatcgcacccatcaggcctctgcagctttatgctgatgggggttaccagctgagaattaggcgtcttgagggtacccctaattatggtccccgacacatagcgacaaacatttgttgatggagtgagtagaacgaatgcaatttcaactttggtctaggtcaggatatcttaagatggaccaatttttataaaaaaatatatattatatataatactgaaatggtagtttgcgtctaattaaatctagaattacatttttctagtacaaaggcttacgtacggtagtgctattttctcatgagctcactagactgcctcaaacggatctggcttcttcctgctttgcgtagagtcggaaccagtgaagcaaaagttaggtctggttcgtttgtgtcggattatactcggaatcgttccacttaatccaagtttatataaattagagaagcaattcggttaggaatcgttccgatccactaatccggtagaaacgaacaagaccttaatagtttcgtgagctcttaatttattttaagataagatatggtaaagataaagctgaaattggaaccggatcggagccgaccaaagctccacagcagtactctcgaaaggacaagggacacaacagtatggctttcgcttcatcacttcactagttctagtagttccagcgctcgtgcctgaagtttaaatgggggtggtggtgtcctctacagcagcagtgcacacctaccgtgagagaactgaagaagatgtactagtgctggctaacgcatctatacgcaccaacgtccccccgttgtttgaataggtatcgacattatgatccgctcaaatgcggcatcctccgcgtgcttcgacgtctttgattgcattgaaaacttttgagacccatgctcggatcaaaaggttctcaaaagaatctataaagaatgaattcaaaaaaagggattcgtatatatcatagtgtttaaactcgctcttagtttgctattgtttggattggttctatataggacataatgacttaaaaaagaaaaattatgctcaaacattgaaccatctggcactccaaaatctcgcggatggaaccgctctctagcatgcagcccctcaatcccaactagatttggaaccaaacactaactagctaagtttcttttcaaaggcaaggaaatcagagtatgccccattttaatccttggagattaatttaggcaaagatcaattaagctaatataattttatgcaaaatatatttgtatacgattattagcaatatatacgttttataagttacagagtaaaaatatattatgttgatacataaaatcatttccaacacttcaccccatgaaaaaactactttacatggggtgaagtccaaaacacatttcgcatataaacataggaaattataggagctaaaattatttccaatacttcaccctatgagttttgggaagtggtggaatatcaaatttcaagtcaaatagactactcactccgttcttttttatttgtcgcagtttagtttaaaaatgtattagagtgtgacaaatattcgagaacggaagtaatattttattaagtaaattataatttctcaaaaatgaatagatcttttctacatgaaggaaattttgctcactcagtcgctctcttgctatgctatctcaagtttttgtactaatttttccattaacagacggatcaaaatatctattcccgtgttttggaatcctataatttctcactaactcatcccatgatcccatctcatattcttgtgtttttccttttttcccctctatttttgtactcctttgtaacgtgtgaacacatttcctatgcgtggagttgtaatagcgtcacagtcataaaagcgatgacagtagtaatgtagtatgtcaatatgttcttcgtacatttcctatgtagggttgcaagaaagtgagaacggatgtgtgagagaggccacaaatcatattcatatactacatccgtttttaaatatttgttgaccgctggttaatttttaaaatacaaaaatagagagtatttagcaagaatgcaagacgcagacctgcacgtagagcagcggcgagaagaagagctccggcc

SEQ ID NO: 1051 - DNA, 4799 bp, Zea mays
  Intron number 4 from transcript GRMZM2G139683_T02 (locus G RMZM2G139683) derived from phytozome v7.0 (chr-ID 1; pos 2 03331396 to 203336194)
gcacatccaacaaacaaggtgatcttttggcctagaatcacacgttcacacttgagcaccgtttttagcttttgtttaccgtcttgcagtgtcatcccttctttcaaaacctagctgaagttgctctgttgggccatattattttgacttgctttctagaacctataaaaaacagaaagtcacacaaacttgatatgagtacttttgtagaactatgcagcacgtatactgatacatgtatcggtatcacaaggatactgatacacagatacagcaatttcctaaaaattcccattcatgaatacattttactattttttaaataaaaggataataatgcatattaaaatggatagcaatctaacaatgaaacaccacaatctacttaactatttaagttctaattaaagcacagcaggtctcaattctcaaatacagtagtctcaaatttaagaaattaataaaaggcattcaggtttgcaattcaggctcgcaccaagttcctattccgcatttgtcttgcttgtttcattctcatccacaacattaagctggagatcacccaaaccaaaagacacagcttgcaattcaggcccatcaagggagaggtcaggcacttcaaggatgccaataccaccaagtgaataaaaaaatctcctcccacatcccacatcattgtctctcctgtcttatatgcatcagttctttttggcagacaaagaccaaatcttcaacatgctctgagttatggcatttctcttgacactatggataaagctatagatgaggctggttggctaagcaatttggtggccaaattcatcaataagggaataggctgtccatgagttgtccacaaagtcataggggaaacagccaatctatcatagattgagtcaggatcattagattcttttgaacaactagagaaccttgagtactcttcttttactttattcaatttttccagcacgcgaaagaacttgaagcaattcatcctcatctttttatatctctttattcttgtggggtggttcatggctaggaacgggaatgggtcgggtcgacccattgggtagtcgacctgacccacaaaagtaaggccaataggtcaaacgtcaaagggccgcttcaaagtttaaattggctgatagggccagaacctgttgacccaatgggtaatgtaggtctacccactagttgcataacaatatttttcttgaatttgttggtcttcgttattttttgtttcaaataaacacgattagtcataacttatagacacgtctatgcttggaagtatgtcgaggaatatctggaagtataaatagttaaaatacaaaattgcattattaatactttgtgcatcgcagatcataaccaaaattctaaaaagtgttaagccattcatgataactaggtttgaaccatgcatgactcccagcagaattttagagttttgaactatgactaaaatatcattttggactatgaccaatgtttcaaccatgcatgcatgcacatacagggagcaacagccattagttggatctggctatggtgcccagcagtagccctcagcccactcttgtttgcaactgcaagtaggctgagggagccgccacttggccacttgcattatttgcaccggctagttacctggtccggaaccttgtgcccagctgcgttagtgtcctggcggccaggccaaaccaaccaagctgcaggtctagctagcttcccattttccccctcttcgacgatggaaacgggtatcacaatacttttcaatctaatattttatctttttagaagtgttgatagtactaatagcccataataatagaaaatgtttgggttgacctagactacacatttggtcaataaggacatactttaggtgaaatgggctgacccatgttccctaaaattggccttgatgccacggggccaggtcgaaggccagggccgagttagtgcatttccatccctacacggccaacaccttcatgaagccaccttttgctgtaatatttgcaattgacaatctgccattataattttaatgaatgaagaaaaatctgaatgtgacaagttcaatttttattggtattattggtaccctggactaagttaatgggcgaaacaatgaagtgggttcttaggctgtctcgagcgcacatatggcagtgcaaaacactgttttgcactgtagaatacactgtttatagaacagagttcgaaatagagagtgtgattgggggtgtgataggaaggctgctgttgacaaccttatgtcatgaataaccgagtattaagtgtgacacttcatcatcttcctctcatattgatcatcgaatcccacatctcatacattaagtgaagacatggtatgttggtgcctgccacacctatcatttcatatatagtagtaatcctaagaatgtagttcaccttgtcccatcgtacatcacttagtatcctgtccttgacaagttgggcagttggagcatcatctctgtagactgtagatgctcattgttggagggctgtttttacttcaacaaaccgtttcaacatacatacaattgaggcaaatcttgtttcagcaatcgaaagtaacttcaaaaggctaaactcattgaacattgaaagctgcatgccatgtttcattatgaccatggtttaaaaggcggctaggcggaactaggcgcccagccaccgcctgaacgcctaggcgacttaggcgggcgcctaggcgacgccttacaagatcaattcccaaatactatcacaaattcacaatagcacaatagtggatctgaaatagccacaaagtagtttctaaaggaacaatagcaagtcacaaaatttaaaacagcacaataccaaatctgaaatagccacatagatagtttgtaatggcataattaatagtaactagctgcagttagtaatgcagcaaatatgctaatgcaatctagcaatagctactctcccgtcgctcaaaaatcatcatcaaactctcctgggatattgggtgcctccccttcttcaccatcattgccaccattagattcatcttcacaatctgtgatttctgcatcatcatgtggaacatcttcttcatcttcatcttcctcttcagcctctgacatattttgtgcagcaacagaatttcttcttgaatacacattatgggctcttcttggtaagtttcggccacgaagtgcttgtgatgctccaatggcattatccacaaggtcccatgtaaggtcacactcacacccacgcccaccttcagggactacatgcaaagaatcagcccactcattgtccaagttgaagtcctcatgaaccaatggatcaaagtttttccccttcttctggcgtagtttttggaacctagctttcatctttctgttgtaggaaatgaatacaatagagttcaacctcttatgcaacaatcagtttcttttctttgtatggatctacaaaataagaaaagagaaaacacctggtcatttaatcctgaaatattggatacaaaagtagccaagtaggtggatgaggacttgaggacttacaaattcaaaggtactccaactgcgttcacaacctgatgaagacgcacaaagactcaccaaacgtctagcaaatctctgtaactcaatagcacgaccaccatacgaacgccaccactcaactgcaataacaacacaacaatttagcaagctactagcaacacgtggtgtccaaaatatgttatcatattcagcttctattggactatctccagcagcttacccgtccccatcccccatattcaaattccactctgcaaacagtgcagactacaatgcaaaacattatttggagtgatcatatggataaactgctggacacgatcttatgacttgaccagcacctttgcagtttgcggtgttgtctgtaatcatttgtgccacatttttgttgacctacttcaataacacacacccccaacttatcagcattgtattcttttgatttttatttactcaccttgacaattatcagccctcaagaacataggtgccttctcagaaacaacaataaaatcaatcacctctgaggatctaaccaaccatcagtgcattgtgactcccttctctgcccatattctctttgtgctctccagcagagtctatgtgcctccttgcttgcttcagcagctgctccctaactctgcttatccaggaattatataacctttgcaggatgcggctgcaagtaaaggcaaatgcttctcgaagatatagatttcacagaaaattgaaagataccctccagaataaattgatctactaattaaagcgtccatgtgcttatggtcttccaatgcccaatctttttccaatgcagaagcaggccccctcttgttcttgttgctgttagtggtatcacctgagcaaggagcagtaggcaaagaaattattttttgccttgaacctctccaccagttccttacacctttcaatttccttccagatgtcactaagcatttcacatgaaacattaggacattcaactattcctcttcctgagccatgtatcgatgcaacacaggtgtagaatatggttaatatatttatttgtgtaggaactggtgaaggaaagagctttgcattgtttataaattttaataattttacttttcatcgctcttttattaattaagactatttgtaagaaactgacacctaccaactaattgtttgacaggagcttgctcataggcagcaatatttcttctggaa

SEQ ID NO: 1052 - DNA, 2137 bp, Zea mays
  Intron number 6 from transcript GRMZM2G029284_T02 (locus G RMZM2G029284) derived from phytozome v7.0 (chr-ID 2; pos 8 432986 to 8435122 reverse strand)
tgcaatttagtttttgataagtcctccaagatttggttagttgcttcatgctttctctttttctctcttaatacttagctcaattttgttcatactggtatgtttgatctgtgctataatgctatgtgctattttatttcagtctaggaggttacgacagagtctcattcgattttcagtgattcagttttcagtgaaaatactactaaactgaattgtctattctcctccttgttctggtgcttgtttctagaatctctatttgcaaggatatcttttgagactatgtttctgctaaccccaggtttcttttcagcaccacaaattttcttattagtcttcttcactatattcttttttagcaatgctagatcatccttcaatatagagctaatgaagcacctggtttagtattattaagtttagatgagtgacccatattttgaaactattcttggaaaactgcaccaatagccagtctcgttaggagaaaacatagaccgagtcttcataatctttgtttttcctctgccttatgtcaattttcacccaatatctaaaagcaaatgttttatcttgttactgagatcctacttatgtttgttcaggggtcctccccttggcttcttcatttcaaccttgttgagcacatggccagatgtggcttgcagatcaaccaccttagtgttcttcattgaaatcctatcgtccccagtgtcttcatccaccttgcaatcattactctccatcacaacgccattgttcttcggcaggagctttaaaacacctctttattggaatcctaccattaccagccttcccatccacctcagtttgacttgacagaatcttaccatcaccggtaataccccttttcccttgcaaccttaaaacctcctattggctagaatcagttgctttgccctgatcagtctcgaaaacatgctactgctaaactgaaacatgctactactaagcaacttgcttaactgatactgctaagccactactacttgctaattagaacttgttcaaacttgttaaactgctatttgctagctgaagccactggtaactaaaaactgctattgctaagccactgctacctactaactgaggtcaaccttagctgtttcttctcagttttggctgactcaattttctaaacccaacctttcattatctcaatttctcatgaggatattacctgatgttgtgcaaacatacactagagactaatcaatatcgctaaaaaagaatagattagtgtacggtcgtcaaaagagtctatattgattctttagaaataatttgtgcgatattgataatgtttgttcgacatcaattaagtctatttagattggcatatttataataatattatggcgcattttgtccaacaaattttgcatataatagtattatttgtcgtaccatatatattttatactacaactgatatgattatttaacttgcagtattctagaatttgctaccctacaactcatatgattatttgactatgcacatgtctccaagaatattgtagggaaactacaacagatttgtgccatgttttactctgattttggagttttctgcttaactgaggcgaagcgcaaccaccaggttggctgttttagatctgtctcctagactgccctttgctcaagggaaatccctccttttcatttaacgcaaaagaaacttattctatttatttgtatctacgaaatctggcgtcaaatgttcagttgaactcagatgtgtgagactcaactgaagatcccaaatcatcacattatttccccgtcgaaatcatttgtgtttcttagagagaaaaaatggtttatgcttctgtctcctagactgacctttgctcaagggcaatccctccttttcatttaacgcaaaagaaatttattctgttgaacagtattttcatctttatacttatttggtactgcaacagcaatgagaggagcaatatccttgacaccttaattttgtattgccttacaaaggattttttagctgtcgcttgccaagtataggtcgtattgtgggtagtcacaccaaaactaaaactaatggcaattggtttgcaataggcagtgctctttctgttagctctgg

SEQ ID NO: 1053 - DNA, 26775 bp, Zea mays
  Intron number 1 from transcript GRMZM2G125668_T01 (locus G RMZM2G125668) derived from phytozome v7.0 (chr-ID 4; pos 1 03105561 to 103132335 reverse strand)
ggcggcgcccacaggtcaccctcatcacccgaaatgctagatctggttgctactcgctaggcttaggactgtttgctgaattgcttaattaatttaggacacggtgggacaattttcatttcggttggtgtagcgaggaatcgagcatggcttgtaatttagtgatgccttgcgcatcttgagactgaactgaactattgtgtttctgaagagttgccctgaacagggacggagccaggaatatctttaggagatgttgaactaaaccgttacagcgatataatctcactaaaccactcacaccacactcacagtagacaaatataatagtttaaagtagtgttatattgaaacaacgataagtaataaaatcttaaaatacacaatgagaaatataggatctaatttttagggggactccatgtccatgggatctggagcggtaggggggctcgagccccaccactgcatctgccctgccctcaatgatttacaaattttgtgtgcaaatgggcattagcatgtgctccattcgatggttcatctcgtactgaatggatactgcatagcagtttattaaggaaagttgaaccatgttttcatgctttgttttctctagtgtacctgtaactacaagtgaaaaaatgttcttgtagatagagctgttcaattgcactagtcatgcatttgggtaatctttgattcatttaattggaaaaagggttcatcttaactaggttgcatgtgagtttgttacaatctgtttcatggaaatctaaggacgggcacttagttatttttaatctatgcattttgcattgtactgttaagttatgcttgcaatctcatagaaaaatgtgaagttagtatctttaactcattcaattgggccacattcggttttggcaatataccaattcttttcatacttcacaataatttgcttatactagtgacgatccactagttagtccattgttggagtttccatgtactaactacactagaggtccctgaacctgtaatgctacggtgtgactgatgtcaagttcagtgaggtcaaaaggaactatgtgagacagctatgaaagttctgcttactccttttcacactccttccatcccagaatgatcatcatattttatacagggagaagacaaaaatgacaaactttgaccaacaattattcaaactatataagagtttagcacatgaaacttttatcaatagatttgtattgaaagtgcctctgagatgatattgggggcgtttgtttcagcttaaaatcagattctggtcgtcagaattggattctggcaaccaaacgcttcgcttctcagtcagtttatgtgagaatcgctttgtgagaatcgtctaaatcaacatgaacacgaaatgtccgagtcaccgctatgtgaggaattcatcacttgctagatcctaaaccctatggaccccttcatcttcctctgcatgtaagccccatgatattcaaattcttgtgacaacttgattattcacgaatccagattatcagaaaagcttttcaggaaaaaggtctacgagacatgcccattggttctttagaaaatggcaacatgtagtaagagaaataaatggtcagtatattttgtttgacttttccctacacttagtattctaggatgggggcagtactgcttaagatttacttcagtaaacattgtgctattttgtctcgtgtagttgctcttgttacatgggtctcattgccattagatgttcattttgtccggcattgtctggtttgtactcccattgccttgtgacataaagccctagcctcatcccctgtgccaccatcattcttgtgtcctgttctgcaattctcttcactgcacaacctaaacactctactaccggagagctgatttctggctgggttcatctgggttatcactaaaaaattccccacgaacctatttccccaattgctgataaataaggatatactttttttttgctcatgaggtctacccagaaaaatttcacagtaaacgaataaaactttctcctcttgcaactttgtttacccctatctagttcttgcagacataacaacaaacgttttttatacctggaattcatgaatgtgttctttgctttctctacctaggcagaatccagcaaataacattcagaatgatccttaagtggaacagaagcacatgctaaatggtcactgtcggagagggaattctccggccgggtggcggaacgcacccgccctaaatcctaagatgaggagggggcctaagcgttttgcttgctagatggaatcgggaagaacacaagaacacacaagggtttagagtggttcaggccgccggagcgtaataccctactccactgtgtgttgtattgaatctgtgagctcgagagcttgagtgtatgtgagcgtgtaagtgtctctgccttgtaacgtagtgtgccttcccttttatagctcaagggaggcacatacaaggatactgagccccgacatgtaggcccaggggcaaaacggaaggaagtaactaacgcttataacgcctgggcgatctccgagcgccataatgtccgtagtgcatatagtattgatatgccgcgctgcttcctcggtaacacgcgagtgatgatgagcatagtgtacgccgcagcacgggtgtactgcctgccaatggaatggacaggtacgccgcctgcgggatggcctggtcgccgcctgccagcggagtggacaaggcacatttaatgctgaggcggcacatcgcctgccagtggaatggacagggctcattaaatgccgaggcggcacatcacctgccagtggaatggacaggcgacgcgccttatccgcaataaatgcaggggccgcgcggcccagaggccttacgtcaggctccgctcgccggcttacgtcacgggtggtaggccacgtggcagcgtcgggtctccgcctgagcggggagcagaagcgtacacggtatggtccagacatgtgtcggctccggaccctcgcctggtcttgattgaggcctgggtattctttgtcccagaattccgggaccttgctgtgagtggctcggaccccacacagaggggtccgggacccgtcccaggggttcggttcgcgcccgtggaggtcctggaccttacccggaggtccggtccgcatatataggggtccgacactttcccatggtggtccggacccactgttgatgccttggagtatatcgtcttctctggccacgtggcggccccggagccgtccacgtggtggggtggggtgttgtttaccacgcgactagagatagccgcgtgggcaccgcgtctttatactgtagtaaggggtacccctgtttcagggtaccgacagtggcccccgggcccacctcaggggaggatacgagcttgcaggtggggccaaagcttgattggtgattggcgcgccgcttccgtgcgcttgctgacgtaatcactgctagtttgcagagctattagtaacttttctaccctttgcaaaaggaaggttccttcaccaggccaggttacggtatgcaccgaaagtacgaataattagacctgctgccattcttaaaacacacctgtgtcactacagttcaaaactgcaacaaaacagatgcataatgagaccgaggaacccataccattaccgatgggaggcccacaaaagaaagctatgattaggaatccgggagtggtttaagctcgtcaaagaaaaggagttgttagcgattctcgtcaaggaagtgttccctcgactcgaccctcctcgttcgcttcggtcacgccaactgccacgtctgtccctgcggctgactgacccgcggcccccacgcctgatggttgtgccaaaccacgcgtgaggcgcctcgatgccgctgcattggttttgaaaaatcaccttctctgtcttctgcggcggccccgagtgatggaataagtcttgggcatctagaggacaatagtcgcttttgactgtcctctgtagtcctttagcatctagaggacagcttgactgtcctctgtagtctctttagcatctagaggacaacagtcgctttttgactgtcctctgtagtcgctttagcatctagaggacaacagtcgcttttgactgtcctctgtagtctctttagcatctagaggacaatcctgttgtgtagtgtgtgtgagaaggtgtggtagtgtagcccctagggctataaatatgtgtccccaacccctctaagggtatggcattgtgtagtgtttgaggaaataaacagaaaattgccccaactcatagtgtcatcctcttgatgagagttagagtctctctactgacaattggtatcagaggcaaactatcctgcagcctaaacatctcgtgctcatctccttcccgcgcctctccccacactcagtcgacagcaagagctccaactgttccttcctcccctactcagacgagcagcctttcgtctgagacagcctcttccacacgcagcgacccctcactagcccaccatgtccctacgctcggccactttgagtgcgcggcgccagcaggaggccgaggtcgccgcggcacaagaacgcgagcgagcagcagcagctgctgcagtgacagcggcgagggcagcacggttggcggcggcggaactggcagcgacgagagcggaagtagaagcagcggaggcggcggatgctgcacgtgcggcggcaatagagctcgaggttctgcgcggcagtagagctggcagctctgcttctgtcgacgacaacaccgacgaagaggtcaggctggcgagggaagcagcgcgagagcaggcggcacagtgggcagccgcgcatccccatgggggcgcgcgtggcggtagcccggataggcgccgacgcgctgacggcgctccaggcgggggcgcacgcgacggcagcccagacaggcgtagacgcgccggcggtgctcccggcggcggcgaccgagtcgacggagatcgcggcctttacaggcggcgcggttctccctccccggatcggtaccatggtcgccgcatggctcaggccattgtcagggacatcggtcccggcggtgggtggcctaccctcaccaagaccaactacgtcgagtgggccgcggtgatgagggtacggctctaggttcgccacatgtgggaagcagttcgttacgacgacgtcgactaccacgaggatcggcgggcgctggatgccctcattgctgcagtcccacccgagatgcagttttcgctttcccagaagcggactgccaaggaggcctgggacgccatcgttgcgacccgcatcggcagcgatcgtgcccgcaagaccacactgcaggcacttcgcaaggagtgggagaacctggccttcaagccaggtgaggatgttgatgactttgctctccgcctcaacactctgttgcagaagatggtgcagttcggcgacgacacctacgatgaggagagagctgttgagaagctcttccgttgcatccccgagaagtacagatagattgctcgctcaatcgagtctctgctagacctctccacgatgacgatcgaagaggcgattggtcgtctcaaggtggtcgacgacgacgaaccacaggctctctctgggcctatcactatcggcgggaagctacatctcactcgggagcagtgggaggcctgccagggtgacaagaagaaggagtcctcctcgacacgaggccgcaaacgcggcaagccgcgcaaggcgcgtggaggcgcccaggtcggggcgcgaggacatgctgaggatggtgcacgtggaggtgcccaaggcggcgccgtcggcaacaagaagccggcacgagacgacggctgccacaactgcggcaagcttggccactgggccagggattgtcggcagccacgacgtggccaggccaacgtcgcacaggcggaggcggaggaggaggccctgctcctggcacatgcaagcatcgagccatctccagcggcaccggccgcagcgacactcctccaccttgatgagtcgaaagcacgcgctttcctcggcgacggctccaacaaggacatgatcgaaggatggtgcctcgacaccgacgccactcatcacatgaccgaccgatgggagttcttcaccgagcttgactctagcgtccgaggctccgtcaagtttggggacgcctccggcgtagagatcaagggcgccggctcagtcgtcttcaccgccgcgtctggtgagcacaggctgctcaccggagtctactacatccccgcgttgaggaactctatcatcagcttgggacagctggatgagaacggttcgcgcgtggaggtcgagcacggagtcatgaggatctgggatccctctcgtcgccttcttgccaaggtacacaggagtccaaatcgactatacatcctcaatgtgaaggtggcacaaccttactgccttgctgctcgtcgagacgacggggcatggcagtggcacgagcgcttcgggcaccttaacttcgaggccctgaagcggctcagtgccaaggagatggtacgaggcctgccgtgccttgaccatgtggagcaattctgcgatgtctgcgtgttgacaaagcagagacggctcccctttctccagcagtcgagcttctgagccaaggagaggctcgagctcgtgcatggggacttgtgtggcccggtgacaccagccacaccaggaggacgacgctacttcttgctgctcgtcgacgatctctcccgctacatgtgggtgatgatccttagcagcaagggagaggctgcgaacgccatcaggcgtgtgcaggtcgctgcggaggcggagtgcggccgcaagctgcgcgtgctgcgcaccgacaacggcggcgaattcacggcggccgagttcgcgtcgtactgcgcggatgagggcgttcagcgccactactccgcgccgtacagcccgcagcagaacagcgtcgtcgagcggcgcaaccagacgattgtggggatggctcgggctctcctcaagcagagaggaatgccagctgtcttctggggagaggcggtggtgacagcggtttacatcctcaaccgctcgcccaccaaggctctcaacgggatgacaccgtacgaggcttggcatgggcgcaagccggcggtctctcacctacgggtcttcggctgcctcgcgttcaccaaggagcttggccacatcagcaagctcgacgataggagcaccccgggggtgttcattggctacgcggagggctcgaaggcctaccgcatccttgacccaagaacacagcgtgtgcgcacggcgcgcgacgtagtgttcgacgaagggcgaggatgggcgtgggacaaggcggtggacgacggcacgactccgacgtacgacttcaccatcgagtacgtccactttgagggagctgggggagtaggcaactcttctccgagcaggtctaccccagcccccaagtctccaccgactccagcgccacactctccagctcctgctacaacgagctcttcaccaccacgcactccagccacgactccggctacagcgatctcttcgccaccacgtactccagcactgacgataccctctccgggaacgtcctctccgacaccagctcgtgtcgagcacgacccagtggagctcgtgacccctctgtcccgcgacgaggagtgcgtcgacgcgtgctacgacgacgagccgttgcggtatcgaagggtggagggccttctcatcgacccgtcggtgccaggacctgcatctcgcattctggcaggagagttgcatattgcatgcgacgatggtgagcctcggtctttcgcggaggccgagaaacatgcggcttggcgtgccgcgatgcagtcggagatggacgcggttgagacgaaccgcacctgggagctcgctgatcttcctcatggtcatcgcgcgatcacccttaaatgggtgttcaaactgaagagggatgaagccgatgccatcgtcaagcacaaggctcgcttggtggcacgcggtttcctacagcaggaggggatcgacttcgacgatgctttcgcccccgtggcacggatggaatccgtgcgactcctccttgcgttgtcagcccagcagggctggcacgttcatcacatggatgtcaagtcggcgtttcttaacagcgacttaaaggaggaggtctacgtacaccagccgccaggttttgcgatccctggcaaggagggcaaggtgttgcgcctgcgcaaggctctctatggcctgcgacaggcaccgagggcgtggaatgccaagctagattccacgctcaaaggaatgggtttcacgccaagcccgcacgaggcggccatctatcggcggggcaatggaggaagtgccctgctggtgggtgtctacgtcgacgacttggtgatcaccggcgccaaggatgcagaggtggcagcgttcaaggaagagatgaagaccaccttccaaatgagtgacctggggcatctctccttctacctggggattgaggtgcaccagggagacttcgggatcacacttcgccagaccgcctatgccaagcgcattgttgaggtggctgggctcaccgactgcaacccagctctcactccgatggaggagaggctgaagctgagtcgcgacagcacgacggaggaggtggatgctacacagtaccggcgtcttgtggggagccttcgctacctcgtccacacacgacctgacttggcatactccgtcggctacgttagtcggttcttgcaacggccgacgacggagcatgagcaggctgtgaagaggatcatccgctatgttgcggggactctcgaccacagtctctactacccgaggtgccctggggaggcacaccttgtcgggtacagtgacagcgaccacgccggtgacatcgacactagcaagagcacaagcgggatcctcttcttcctcggcaagtgcctcattagctggcagtcggtcaagcagcaggtggtggccatgtccagctgcgaggccgagtacatagcggcgtccactgcttcgactcaggtgctctggctagctcgactgctcggtgatctcctcgggagagacactggcgcagtggaactcagggtggacagccagtccgctctggcattggccaagaaccccgtgttccatgaacggagcaagcacatccggctgagataccacttcatccgagactgcttggcagaagggagcatcaaggcgcgttacatcaacaccaaggatcagcttgcagacctgctcaccaagccccttgggaagatcaagtttgttgagctttgctccaggtccgggatggcccaactttctcacaagacgacgcccaagactttgggggagaatgatggaataagtcttgggcatctagaggacaacaatcgcttttgactgtcctctgtagtcctttagcatctagaggacagcttgactgtcctctgtagtctctttagcatctagaggacaacaatcgctttttgactgtcctctgtagtcgctttagcatctagaggacaacaaccgcttttgattgtcctctgtagtctctttagcatctagaggacaatcctgttgtgtagtgtgtgtgagaaggtgtggtagtgcagcccttagggctataaatatgtgtccccaacccctctaagggtatggcattgtgtagtgtttgaggaaataaacagaaaattgccccaactcatagtgtcatcctcttgatgagagttagagtccctctacttaggcgcagtactggcgcgagcggcggttcactctttctgcacccaggaactgacgcccaaggagtatgacttgtggtcctgggccaccgtgtcatagtctgggccgttgttttcggcggagatggagaggcgcactactgcgggcggcggttcgctcctcgcgtggcggttcgccttctctgcacttggagaccagcacaccagctgtatgacttgtggacccaggcccccgtgtcatagactgggttgcattggtgcgcgtcgggcgagattttctgcggcgtctcggggcgcgagcgggagagtcttccttgaaaaaagggattcaccccgcgtgtagtagttacgctttcgcattctctcccaactgctgcgccctttcgccttcgagctctccgcgcccctttgcattcgcgctcttctgcttcgcgccgccgtagtcgccatggcctcgttagttcatcccgagcgtttccagtccgaggggacactcaacttggtgcgcaacctgctcggatggagtgcgtcggcgttcgccggaagtatccgcgccggcgccactcccctcggcgatctcgccgccggggagttcgtgctcttcgtctcctacctctcctgcgggttggcgctgccgatctcacccttcttcttgctgctgttggaggagcttggcctccagcttcagcacctcacccccactccatcctccaggcggccatcttcgcccacctgtgcgagatgttcgtggggggtgggcgccctgcacttccctcttccgctatttctttgtgctggtgaagtcggggaaggctaaagaccacctcagcgcctactacttccagacaaggccggattcagtcggcgcctacatccccacccttggcggcgcaaggtgggagaactggcgcgatgactgggtgatcgtcagcgccgaggctaacgaccgcctcaccctgccgagcgacgggccaagactcgaccggaggcagtgaagggccaagccatccttggcgccggagttccagttcgtactggacaggatcaagagcttggcggcgggcggcctgacgtcgatgcacgtggtcggagatttcctgaagcgtcggatcgcgccgctgcagcagagggcgcgtctacgttgctggttcaccggctcaaacgacatcgcccggatccagcgcgggcccggggaccgacctgtcctgggaggagctggaggttctggtgaaggggattactggtgagtccttcgtccctgagtccctaatcctccccgagggtattctcgcgctctgcgacgacgcagggttgaggacggcaattttggctacgctgtcgaccctcgacgagagcggcgtggcggttcgccagaccggcggctgggacccccaccgtgggatccggatctccgatgcgccggctggaggcccccagactgcggcgtggctcccagcgccttcgccagagcttcccgcgcctccgccgcacccccgccccttggacaagggcaaagggctgcaagcagctcctcagccccaggcggcgccggggtgtcggaggaagagaggcgacgtcggctgcgccacgccgacggatcgtttgttttggacccccccgttggggccgaggaggctggctcccagaagcgtcagaggactgctggtggggccgaggagaccggctcccaggcctagggcgcgcagaggcgcgtcagtcctccgccaccacaaccatcgggtccgcctccaccacaaccaccaccaccgtcgggttcgccaccgccaccaccacccgggggcgatctcccccaggggcaccagcagcagcaacaacaacagcagcagcagcaaaagcagcggtcgccccgcttccagggccgctggaaggtccagggccccaagtaagtgcaacccctttcttccattaatctgtttatcatgtcgatgggtcttaacccttcctttgcttgtcagggcttcctccccctctgctcccaaagtcgtgcctcccccgcctccggctgctgccgccgagacagcgccaccggccccccaggctctcgctgggggtccggcagcagcggcgctaacgccaagcggtgccgcagcggcggagggggtctccactgcaccgacggctgccacagcctcaacgacggtgatgccgtcgagtacaccgtcggcagcagcagaggaggccccagctgcgcccgcccccgccatcgaggtcgacgcggggggcgcgtccagctccatcccgccgcccactccggaggagacagaggtgatttttgggcggcggctccggtccggcgccgagccagaagcagcgccagttccccttccccgggtgctgtctcgcgcccatcaggccctccaagagactgaggcggcgatcctgcgggagtgggaggcgctcgaggccgaacaccagcgactggcgtacccggctggaggagcgcaccaaggcagcgtcccgccagttcgcctccgagcggttcgagcttgagcgggaccgcaaggactacaaggacttccagaaggtgtacgcccgggagctggaggtggcccggaaggagaagaggctggccaaggaggagcacttggaccagagggaggaggtcgtcacggagctccaggccaagctgaatgccttcaacaaaatcctggaggagcagcgggtccagcagaccgcggctgtggagagcctgcaaaggctacagcgagagctggatgacaaggccagcagctttgccctggccgaggagaacctcaaggagaaggatgcttccctggataagcgggcggcggatctcgcctggcgggagaaggacctcgccttcagggaggaaatgtttgaaaggcgggagaagctgctggctgatcatgagctcgaggcggagaaggagcgggcgcttgaggagcgggtccgccagttcgaggcgtcacaggcagcaccgggcccccaggcggtggaggcgatgcagaagacgcttgaagatcttcagcatggttattaaagcgtcgtttaaacgacgattaagcgtcgtttaagcgctaaaacgtgattaggagttaaagcgtccgtacgttttaaaaaactgcgtagaacgtccgttttggacgtttaagcgacgtttaaacgtcggaacgcgcgttctggacgttttacccgttctacggacgttctgtgcgtctatgagttcttgggccttaatgggcctttaaccagcaagcttgctccagcagtcaaactgcccacacgcacagccctagtcgccaaactgccacacgcacaaccgcggagccgccagagccagacgctgccgccgtcgggcgtcctcccgccctccaggtacgccgccgccccctcctccctcctccctcctccggtcccccctcctccctcctccctcccccggtcctccctccacctacagccgccgccagtgcgcagtgctccaggtccaggcgcaaccgcccagtgcgcagtgctcctgctccagcgagccgccagtatgcaaccacccaggtcggcaggtccagccgctgttcatattctgctgctgttcgtatccaaaacacagtgcacactgctccagcgagccgccagccaccagccagtgcgcaatgcgcagtgctccagccagtgcgcagtgaagcagccagcagccagtgcgtagtgctccagccgccgctgctcagtgtggctgcaacaaccaacagtataaatgtataataccattctactgtgtgttgcaggctaaagtgtgacagtgaatttcaagtctgaaaagacgtttcaacgttcgtttaaacgtttaaacgttgaaaagttggttcataacgttttaacgttttaccgctttaataaccatgatcttcaggcggagcagcgcgccggggtccagcgcatcgccgcatgggtcggtgaggcgagcacgacactggtgccgctaggggtgagccccatcccggtgtcggagctgccgacatccatctctgatgcgctccgggtgctggactccgccgccgaccgcctccgacgcctggactagattcttggcgcccgcctggaggccgagggcggcaggctctgccgggcgatgatcgagtacatcctaacgtgcttccggagccacgacccggccatctccttggagccggtgatcgctggtccggtggccgacactgaggacgctgcccgggaggctgttcaagatgccgtggaattggtggccgaacgtttccagcgggatcctgctgatgatgagtagctggatctgcagagagaaggcaagggtcccgttaggaagcggctttgtaatattttttggttttgtaagatacttttgggaagtattaatctaacagtgacagaacttatatgtatgctatttgtctttgctgtgtgcgtcgttaccaacttctccctggtacttggcccccctgggatgtaggctcgacgtgtcgaggctggatgccagtacacttaagaaagaattggtgacctggcccccaggaggtagtatcgactgggacctagacctgcacacagccttggctaggaagctttagtagtgcacccatagggcccactaactggtatcttttatcctttgattcacgcaacaggacctgcaggatttaggccgggaagccaatccgtgtgtctagaccctctggaccacaactctaaatattagggcacccgtcgcagagtggtggagcgtgtaggcttagggtacgggaccaggctaagcgtctacacagctccggaccaccccaggggacgtgtgtccgttctctagaaccggaccccaggttgttggacccacaggactatagttccaaatactagagtacccgtcacggagtggtggagcgtgcaggcttagggtacggaaccaagctaaacgactacacagctccggaccaccctaggagacaagtactcgttctctaggactggcccccaggccgccggaccccccctaccgagggatccccaactgtaagcctggctactcaattcggatgtcattataccagcaagggtgggaactgtatgggtggtttagataaaaaatgatgctcgtaaattgaagcaaaaataagaccatcacaaaaacaaatctgggggtgaatcttttctttataacttgatattcatgagtgtaggccaacagaccgggtttatgagggcggacctcaccgggctgacgtacatatatgcgcaacttagttacaaaggaagaaaactgaatccacaggcttgtttttatgggaaaaacttacggagatgctctatgtttcagggattgggaataggctctccttcagttgtagcaaggcggacacacccgggtcggcatatttctgtcaccttgaagggtcattctcagctgggggagagtttgtggagcccttctcggttcagtactcgccttaggaccaggtccccgaccctgagctccctactatgcacgaaccgttggtggtagcgcctgagcgcttggttgtaccgtgcatttcggatcgccgctcgccatctgcgctcgtcgatgaagtccacgtcctcacgtcgcagctgttcctgcatagactcatcgaaagcctggacctgtggggagcccataatgatttccgggggaaggcaggcttcggccccgtagaccaggaagaacggggtctccccggtagctcggctgggtgtggtccggttcctccatagcacggacggaagctcgtcgacccaatttgcaccatgccttttcaagcagtcgtaggtgcgtgtcttgagttccctgaggatctctgcgtttgcccactccacttggccgttgctccttggatgagccacggacgcaaagcagagctgggtgccgatgtcctcgcaatactcctggaagatccgacttataaactgggtcctgttgtccgtaatgatacggcttgggaccccaaatctacagacgatcgacttgaggaaagcgacagcagcaccctgggtgatattgaccacaggggtggccactggccactttatgaacttgtcgatggcgacgaagagaaaccggtacccgccgacggccctggggaatggtcccaggatatccaccccgcatacggtgaatggcccaggagggtggaatcatctgtagagcctgagctagtgtgtgtatctgctttgtgtggaactggcacgccttgcatgactttaccatctcagctgcatcctggagagcggttggccagtaaaagccatgcgggaaggccttaccgaccagcgtgcgggatgatgaatgacttccacactctcctccatggatctccgtgagcaactcatggccctcctcctgggtaatgcaccacatgagaatgccgttggcgccacggcggtagagatccccttccaccatcgcatagcgtttagccaaccgcactatacactctgcggacacatggtcttcaggaaggatattttccttcaggtagtctcggatctcgaagatccatgcatcgggaccactctgagatattggctgcggctctaagggactggcaggatctcctatagcacacacagtcttcggtgggttctgtagatgggacgccaccgggaccgctagcttcgaggtgctagtctcgcccccttcgcccagttcggccggctgggcggtgggtctcagcagccgtctttcgaagacgccctcgggcacgggtgcccaagttgacgccctcacggagaggtcatttgccgccgagttgtcagcccgaggaacgtgttgcagctctagggcagtgaagtccttttccagcttcctcacgtgaagtaggtacgctgcgagcctgggcttgttgcagctacactccccgcggacttgcttgatgatcagctgggagtcccccttcaccaggagctggcggatccctagggatagggccgccgacaagccaaagatcagtgcttcgtactccgccatgttgttggtggccttgaactcaaggtgcaccatgtacttcacttgatctccgctttggtcgatgaggaccactccagctccgccaacttgctgacgggcggatccatcgaagaagagcgtccagtggggctcggtgaagaccggacccctgggctccgcaggtgtggggtccgaatcgggatccggacccccaggagcgctcgggggaagcgtccactccacgatgaagtcagccaggacctggctcttgatggcgtggcgaggctggaagtccagctggaactcagcgagctccgcggcccacttggcgatgttgcctgtggcgttagagttgtggaggatggcccttgacggaaaaggaggtcaccaccacgaccctgtgtgcctggaaatagtggcgcagcttcctggacgcaacaagcacaacatagggaaggttgtgcgtctcaaggtacctggtcttcgcctcgtggaggacctcgctgacgtagtagaccggcctctgaacggtccggaccccggcagccggtcccgagtcctcaggttcctggccttcttgtgctgtcctttcgacgaccagcaccatgctcaccgcttccgcagccgccgcgatgtataaaatacaacggctccctaggctctggggctaccagtattggtagggacaccaggtgctgcttcaactcttggaaggcttgttccgcctcttcggtccaagagaatgggccggacttccgcaacagcttgaagaagggtagcaccctctcagccagccttgaaatgaagcggctaagggcggctaatgaccccgtaagcttctggacgtccttgatacgggctggaggcctcattgccttaatcgccttgattttctccgggtttgcttcaatgccccggtacgaaaccaggaacccaacaacttccctacggagacaccaaagacgcacttgtccgggttcagctttgtgcgggttgtccgcagcctgtcgaagaccagggtcaagtcttcccctagggtcgaccctctcttggtcttgactacgatgtcatcaacgtatacttccaccttgtacctgatcaggttcccaaaagtcttactcatcgcccgcacaaatgttggcaagacgtttttcagaccgtaaggcattacgacatagcagtaaagcccatccactgttacaaaagcggtatgctttctatcttccctagacatctggattttatggaaaccagaataagcatctaagaaagacaaaaggtcgcacccggaggtagaatccacgatttgatctattcgcggaagtggatacgggtccttgggacaagctttattaaggctggcgtagtcgatgcacatctgaagcttcccattcgccttggggacgatgactgggttggccagccacactaggtgatgaacctcttcgatgaagccggcgtctagcagctttcggacctcctttcggatgaagtcctgtcgctcgacggactgtctacgaggctctcaccggcctggcgtctgggctgatcttcagatggtgctcgatcacctccctggggatcccaggcatctgcgacagctcccatgcgaacacgtcggcatttgcccggaggaaggcgacgagcgcgagttcctattttttctccagatcacccgcaatgcgagtggtctgggaggaacctgctctgagctggacggccttgacggagacgtcgtccgctccggatggccgcaccttcggcaccttggtaggcgccttggttccggagatcggggggttcctccctccgtcgtccgggcgagcagcttctgccgccagggcgtgcatcttttccacaaccgcaagcgcagcggcgcggtcaccccgcacggtgaggaccccggccggagacatcttgaggaccaaatacccgtaatgggcaatggccatgaaacggtacagggccgacctgccgatgatggcgttgaaggggaggttaacctccgcgacgtcgaactggacgttctccgtgcggaagttctcggtcccgaatgttaccgggagtgcgatgctcccatggggatacaccggttgtgggcccactccgaagaatgggcgagagggtcccagccgggaccctgggatttgcagctgcttgaatacagcatgactgatgacgttgaggccggcccctccgtcaatcagaacatggtgcagccgtatgttggcaatgacaggggcggtgatgagcggtagtataccggcccctgccatgttgtcggggcagtcggatgccccgaaggagatggtggtgctcctccacctctgatgtggagtagccttcgggacccctgggaccgtcgaaaggacctctcggcgcagggacttgacgttcctgcgggaggtgagctcccagctcccgccgtacatgacgtacaacttcttgtagcggtcggtgtcgtcaccggagtcggagtccccagtgaaaacgtccttcaggtccccctcaggtgactgatacccgaggcccccctcaggtgactgatacccgaggtcccgttctcccgcggccacatcaccgtcgtcgaccttctccttgccaggccggcgacgaggcggggagccatccttggacgtctgctcgcgtcgctcgttgacgcgcttcgcgagcttgatgatctcgcggcactccgcggcgctgtgccgactgttggggtgcacagggcatgagccgctgttgcccccctgcggccgtgggcgcttgttgcgcttgttccggcccccagtcgcggctgcgacgaccggagcagcagacgacaacttctcgtggccgcgattcttcttctttttgccgtcctgagcgacggcacccgagccacccgtctgggcaaccccgatctgtggtgccgagtgccatgcacggccctcggcagccctggcacacttgtcggccagagcgaagagcgtggtgacagtttccacgtcatgcgtggccaacttctccagcatcttttcatcacgtaccccctggcggaaagcggtgatgatggaagcatcggagatacggggtatagtccctcgtaccttggtgaagcgggagatgaaggctcggagggtttccccgggctcctgcctcactgcatggaggtgagcctccacgccatgccgttgataagtgctggcgaagttcgctgtgaaccgcgcgcagagctcttcccaggagtagatcgatcctggggtgaggttcatgagccaagtccgagccggcccagacaaggctacatggaagtatgtcgccattacatcagtgtctccacctgctgccgtaatggcggtgacgtatacctgcaagaattccgacggatttgacgtaccgtcgtacttctccggcaggtgtagccggaacttggatggccaagtcgccgcgcggagataatccgccagcgcggcgcagcccacgtcggccaacgggacacccgcctggatccgggcgtacgttggagtttgcggtgcaaccgcagcgaagtcgtagtcgaggttgcgaccctcgacgttctgtcggcgctcacgcgccctctccagagagaggcaggcatcctcacccgcacgcctgcggtttagttctgcccgcaggtcataagacctccctagagagactggagcgtcctctcctgcacgtctgcggttgagctccgttcgtaggtcctcagtcggtgcggccctcaccgagggtgagcgtactgacgccgacgcctcatattgacgccgggatgaccgaggcctgggcctggctgagccagaatgcgccatgccgagcagacggtcgacgtcgtcacgccactgcttcatggcccccagcgaggccgtggagctaggagggtggcgtagcaactccctggttgcagacaaggccccaggcgcagccctcgacgccctggacgtttgcgcaggagtgtgctgccgcgtagagtgcatagcagcagcaccaggcgcagggaggttggtggcctgcggtgtggaagacgtagcctcctccatcaggaagtcctcgggcatgaaatcatggtgctcgacgatgtggaccatggtgtcgagcagaaaaacaagcaaaaacctaatgccaagctccctacctggcacgccaaatgtcggagagggaattctccggtcgggtggcggaacgcacccgccctaaatcctaagatgaggagggggcctaaacgttttgcctgctagatggaatcgggaagaacacacgaacacacaagggtttagagtggttcaggccgccggagcgtaataccctactccactgtgtgttgtattgaatctgtgagctcgagagcttgagtgtatgtgagcctgtaagtgtctccgccttgtaacgtagtgtgccttcccttttatagctcaagggaggcacatacaaggatactgagccccgacatgtgggcccagggacaaaacggaaggaagtaactaacgcttataacgcctgagcgatctccgagcgccataatgtccgtagtgcatatagattgatatgccgcgctgcttccttggtaacgcgcgagtgatgatgagcatagtgtacgccgcagcacgggtgtactgcctgccaatggaatggacaggcacgccgcctgcgggatggcttggttgccgcctgccagcggagtggacagggcacatttaatgctgaggcggcacatcgcgtgccagtggaatggacagggctcattaaatgccgaggcggcaaatcacctgctagtggaatggacatgcggcgcgccttattcgcaataaatgcaggggccgcgcggcccagaggccttacgtcaggctccgctcgccggcttacgtcacgggcagtaggccacgtggcagcgtcgggtctccgcctgagcggggagcagaagcgtacacggtatggtccgaacacgtgtcggctccggacccccgcctggtcttgatttaggcctgggtattttttgtcccagaattccgggaccttgctgtgagtggcccgaaccccacacagaggggtccgggacccatcccaggggttcggttcgcgcccgtggaggtcctggaccttactcggaggtccggtccacatatacaggggtccgacactttcccatggggtctgaacccactgttgatgccttggagtatatcgtcttctctggccacgtggcggccccggagccgttcacgtggtggggtcgggtgctttttaccacgcgactagagatagccgcgtgtgcaccgcgtctttatactgtagtaaggggtacccctgtttcagggtacctacagtcacatattaaatgagtttgcaaaaagagaggtcaaatcatcatcattttcactagaggtacccccatcatcggaagtagtgtatttgagggtatctctaaaatgtaccttctttttgctatccttagccatgagacatttgtgactgacgttggggaagagaagacctttgttgacgacgatgttgacagcgtccttgtcgtcggaggagtcggtggagctcttgtcggagtcccattcccgtcttatgagctcctcgccacccttctttttgttgtagttactcttctttttccatcttcttcttccctttcttgtcgtcgtccctgtcactgtcacttgtacatggacatttagctatataatgaccgaacttaccatatctgtagcaaaccctcttggcgcggggtttgtagtccttccccttcctttgcttgaggatttaccggaagctcttgatgataagagtcatctactcgttgtcaagcttggaggcgtcgattgggagcctactttttggtgtaggctcttccttcttttcttccgttgccttgaatgcaacgggttgtaccttgggtgtggagatggcgccttgctccaagttgacaatatggttggagtctttgatcataagttcaaagctcacaaacttgtcaatcacctcctcaggagacatctgtttatatctaggatctccacggattagttgcacttgagtggggttacgaaagacgagattttagaataaccttgaccatttcatggtcatcccacttggtgctcctgaggttgcggacttggttgaccatcgtcttgatctgattgtacattgcttgtggctcctcccttgttgaggacgaaccgaccgagttctctctcgattgtttcgcgcttggtgattttggtcacctcgtccccttcatgcgtcgtcttgaggacgtcccaaatctctttggcattcttcaacccttgcaccttgttgtactcctcccgacacaaggaagcgaggagtatggaggtggcttggtagttgaagtgtcttatttgggtggcctcatcggagttgtagtcctcgtcgcccacctgtggtacctggctacctgcgctccaaactcaaactcaagtcctcaacaatatctcatattctttcgtggagtgaggttagatgatgcctcattttatcactccacatgcaataatcttcaccatcaaaatatatggtggtttgtctaggtgaacggaaagtaagggagcgcgtttagaaatacagggataacgaagggggatcttattatatttcttacgctcttggcgcttcgaggatgtcgactcggcgccgaaggttgaaggtgaggaagaaacggtctcgtagtagactaccttcttcatcttctttttctttttgtcacccttcttatgtgacttgatggagccggcggattccactttgtgctctttgtgcttgccgccggcctccttcgatggagtccttcattcttgtttcccgaaggtctaggcttttccccggtgaccatctcgacatcacttcgagttgttagaccctaatgaagaacctgactctgataccaattgaaagtcgcctagaggggggaggggggtgaataggcgaaacctgaaaattataaactttgaacatgcacttcacctggggttagggttagaaataaataatagtgaatttagagtgcgaaagatagttcttcttgctatgagttgctcaatcaatgcggataactttgggagctaactcaacacaatgtgagcacgggaacttttagtgagaggggagagggaagaaacagatcaaatagtgaagatcaacacaaatggacatgacgatttgtttcccgaggttcggttccaaagaacctactcctcgttgaggaggccacaaaggccaggtctatttaaaccctttccctctctcaatcggtcacctagaccggtcgagtgcttcttcttaatctcacgggtcactaagaccccgcaaggatcaccacacaattaggtgtctcttgcttgctttacaaaacacttgaaagtttagaaggagaagaagaaagcaaccaagcaacaaatgaaacacaaatcaccctctctcaagtcactaaacacttttgatcacttgacttgattatggcacttggagaggattgaaggctttgaatgtgtctttggagtgtattctttactcttgtattgagtgttgagagtggaaagcttggatgacttgaatggtggtggttggggggtatttatagccccaaccactattctagcctttggctgttctgtctgttgacgggcacaccggacagttcgatgcgcaccggacacttcactgttcactgtccagtgcgtgccacgtcagctgaccgttggggtttggagctgttgatcgttgaagtcgtctgtccttatggtgcaccagacagtctggtgcgacctgacatcgcagactgtctctgaccttctgacgcttcagactgcagcgcagtcgaccgttgctttgtgggctcattggacagtctggttaattttagccgaggagcactgagaattcccgagagcggccagttcgttgggcgccctagcctgggcatcggacactgtccggtgcgccacaggcggtgcaagtctgttttgcttcaaagttgtagaattgccctaaggtctttttctttgtatgtgtatatgaactttatgcacctgagaaaagatcaactggcaaactagttagtccataaggtttgtgatggtcgtcaaacaccaaaatcgattataggaaatgttgaggtcattttcctttcaatacctcttgcgtcactatcaagcacgtataggcatacacctgatatggggtattgtctcgtcctttccggtgtatgggtcactgtagagactcccgtgccgaggcctccacgactggaatggaccggtcccgcgattctgtgaaggcatattcatgggcgcactcgggggtgttctatcgtgttggtctgacgcattttggtattgtaggtacgacctggtcgtggtttggtgacgtagtgtcttctcgcggccgttgtgggtcgacattgtcggccggggttccttccttgcggatccactcggcggggacttggtcgttcgctccgcctcgcagccttgctcgacgggggcttggtcggtcgccccgcctcgcagccttgctcggcggggacttgatcggttgccccgcctcgcagacttgctcgacgaggacttggtcggtaaataggctagtaaggtttatgggccttgccgggtacccctttcctgggtacccgacaaagggtggcttccaatgtcgcctgcatggttgccacggatcgcgtgagctcatggaagactgttgccaaggattcgagcgtgaggggaggttgaggtgccgtggatgaggatgtggtgggttcgggcagtgaagttgtggggattggcagcatagcggaggaggccgacagggatggtggtggacggagggcctgacatatccgacactattcccaaagttaggggtgcaagaagaggaggaagagggagtggtggctagggctcccagctccttgagggaagccgacaacaaataagttgcttctgcttaatttccaggagaaatcccttacaagtatttatagtcctaagagatctaatcctgaaacagattggactctaaggcttatcccggttactgtagcgcatgaaaagtaccgagattagatcaggtcagaatagttttttaggcaaaagataaggatcgaatcggatttagttagggaacaaataaggattatatcagatttagttgataaggattggatcaaattagttaggaaggagataaggattagatcagattttgttagttggaaagagataagccagtcgtctctataaaagggacactattgtatcaattaagtgtaagcaagaattagaagcaagacttcttcttgaccggccgtgggcagaggcccccgcccggcgttcctgcaactacaaactccctctccaattccccaatcacgcgcagtccataagagtctcaaccaaattaatctgttatcaatgatttgacatttagcttttatcatgttagttaaagccttagattctgaacatggtaacctaggaagtttttgcattctagaatggactgttaaggatttgcgatcacctccatgaatgataatgtgtgtatactggactgaggattttgatttagtttctgtaaattaaatttaatgctgaacctgtttttctaggatgctagacatgtgatgtattcgtgaatataccaaatctaacatcccttttctgttgtacttcactgtatgcatattttatagcaaactagataatctctcctagtggtccagatgcttttgttcataaatcttcatgataatattgccttccattataaggtgcactagtaaacaattgtgtagaatctatttgggtcataaacttgctctaaggtatcatcggaaggaaattttagattttcatcttctattgtaatatgtccgtactctgtttggaacctgttgggaaaggttggattagatctcatctgcaatctgtcttctgtttatagggcttccagctgagacccttgtggaccggtacgtg

SEQ ID NO: 1054 - DNA, 2919 bp, Zea mays
  Intron number 1 from transcript GRMZM2G350319_T02 (locus G RMZM2G350319) derived from phytozome v7.0 (chr-ID 9; pos 2 4472377 to 24475295 reverse strand)
tgcggcggaacgcgctctaccgcccgtcgctcaaggttcagcccttcctttgtgtatctcacttcgtgatctcggtttgggccccgtgaagtcgtgtgctacgggtgttcctgttgttagatctgatcatgggagtaggatttgaacacgggacaaattctgtgagatgtttgctgatatgaatctgataatgaggtgtgtatgccaaattttgtctccggggctggaattcttaatacgattttggtagttggagtatgctaagaaatatttcatctgtttgctagattgccactggtggggaaaatgtaacaggaataggctcgaacactgggaataatactccagggcaccattgtttgttttatcattgcgaaatcagtacagtttcatgccactaagggcctaaggcagggtgttcaactattcatcactcatcagttgctcagccatgcaaaatagttctcagccatgtgaaattattactgttttctctgacttttgtatgtcatgtgtacttggaatcttaggtggacttctatagctggttattgaaagctaaaatctgttagatggcacaacacttggattagttcatattctttgttatgcaataagtcccattttgtttttcaatgaaggtgcacaactcgtggtgctggttgtttcattgctatggttagctattagctgtactgatggttatttatctgatattttatcaaatcacagacttaggcaccaatttctagctgttcacagtttgaatcagcccacccttttgctttcctctttgtactttgttttcccaatgaccaaggttgcatgctctgattttcttttccgcgtgattggttcgtttccccgtttgtgcagctgcacccgtggtgatttaaagcacacattgtttggtttccatctgtccgcgtacagcctgagcagatgcagaacacgacccccagccaggcccgtgggagatgcctcggccgcgcgtatgcgctcgtgcaggactgcaggctggtcgtatgcagctgaatgctctggcacgcaaatcgagaaggccttttaggctatttttattatatcttctaattaaaagaattattcgctgaaccgattttatatttgtgtttctgatatttttccgaacaaaactagaccacacatgctacatatatttcaaaaaaaattaatctcctatttatcttctcaaccaaccaaacaacgtctacaccagtctgcataaatctgtacaagcaaccaaacaaatatgtcttgcatgagctcaaccagacgctgctcatcctggctcagctcggataggcaaccaatcagacggtttgtgtctcttaggaatcatgctattcagcttatcatatgtttggcctctcttcaataaattatcaatatatcatgtttttcagcttcatttcatcttggcaacattttgtgatgtttgtttgatctgtgaagaagtttattcattgtcgcatgccatattttttcagttacattgttcaatagttactgcaaagttgattcttgatatgctgcacctctaatatttccttattaagcttaaaatgctatgtaaatggtccttttctaaatctagcacccccagaacttttcaatgctttgcacgctcaggacaaaccttttctgtttcattattgtgcaactaaagaacctttagctaactgggaaagtgacatttgacatttctagaaatgctgtagcttttacctgatttttgttgacacttagtactccctctgtcccaaattaaaattcgtttcagccttttaatggattcatacaataattaatgtctgtgttttgtatatgtgtctagcatggtttttaaagtggtaagacgagacaaggcgttggaccaccgcctggacgcctaggcgaggtaggcgggcaagacgcctaggcgttggacctgtggtgtctagattcatcaccatccatttgaatatagacataaaaaccaagagttaaagtgaatactatttgggactgatggagtatcatgtgatcattgcagttaatgttcattgcgttatttacttcaagaatcatgagtttgtacagaagcacctgcacattttattttcttattgatcctttttatgcatatcagtgctacataactgtggagaatataatggttaggttgtgggaaactatagtgcatgtaactattatgtcaatgtaaatatgactgcttgacattttactgtagtaggtttccctttgcaaaagcccgaaaaattcctaattatttgctcgtgtggcaatagctagtgtgacgaaccaattggtccatggtcccatcatatcataccaagttgaagacttttctattgctacaagttctcatttgagcaacccccaggtctttcatagcatgctacatataaatgctattggtaaattattgtatgtggctgcaattacaaaatcattgatggtgtgttcacaatgtgaagtaactctggatatataagggggcacatcggcagtatgtcatttgttccagcgatatatatagttatttgcagtgcaccacatacatgctgctagaataggtaaccattaaaaatttaacacccaagtgtgtaattatcaatctttagtgtcaatgtaattatcaaactatctattggccatcgctgtctgtactcattgtgaataactgtaccattgtttgctaagcagtcattttgatttgaaatattcttgtttctttccatttacatgcaattttcttcatgaagctgacattcaggttgaaaaaattaagtaatatcgaaacttggttatttgcttgtgattgttctgaatttgattgacataatttacatggatcctttgtctctcttttgtttattgatgcagctttctgaagtt

SEQ ID NO: 1055 - DNA, 9561 bp, Zea mays
  Intron number 1 from transcript GRMZM2G030915_T04 (locus G RMZM2G030915) derived from phytozome v7.0 (chr-ID 9; pos 1 48079683 to 148089243 reverse strand)
atctccaagggaaagaagggtggcaagaaaaagacgttagtttgcttgcctgttatatcccagttcttcagatctagcttgggtcgattgctttctttctttatccgttgctgatgctgttgtgtggttgcgatacttcttttatgcagcgtcgaccctttctctaagaaggattggtatgacatcaaggcaccgtcggtgttcagtgtgcgcaacatcgggaagactctcgtatccaggacacagggtaccagggtatgtttttttttgactatcgatattttttcgtactgcccctacattgtgtgttgtgaacttgcgcatatatgcatgtgtatgtagaccgcgctagtcatgcggtatattagatacgctcgttcgcgcgtttgtttgtggggactattcaggtttcattgcaagaattcgtaggagaggtaacaggtaattaagtttgttcggatttgcttgatagatagtttgtcagtatttgagatcgcagccttgcgtgcttattctaagctgttcctgaagaggtatcattcagtgcaatgcaactagaaccgcacctatcatttttgcactttctgttggaacgattattattattcaatccttttgcttttatatggacaataacgaatcgccatttacttgagcacccgaatggcaacttgtccttgttcatcaatgatctatcactgaaggtcacatgatcttttaatggcatggatatgattagtcttattaggtgccgctttgtttgcaatgttattcagaacgtagatgcactgcttactgtcctgatttttcgattgacgtactttctctggttttagattgcttctgagggtctgaagcacagagtctttgaggtttgcctagctgatcttcagggcgacgaggatcaagcttacaggaaaatcaggctccgtgctgaagatgtgcagggcaggaatgtgctcacaaacttttgggtaatgatcggcattcttttgctagcagctgttgccctttgttgtgttgtttatcactaatttgttttctattactagggtatgaattttaccactgataaattgaggtccctagtgaagaagtggcagacattaatcgaagcccatgttgatgtcaagacaaccgacaactacatgttgcgtttgttctgcatcggcttcaccaagaggcgcccaaaccaggtcaagagaacctgctatgctcaggcatcccagatccgtcaggtaacgtttctgttctttccacatatgcagcagtcgtaaaactgtagcaatttctcaaaacgtcaaacagtcacctgctatatttgcctgttatctttatacttgccatgtattgtgcgcagatccgccgtaagatggttgagattatgatcaaccaggcttctacatgtgacctgaaagaacttgtttcgaagttcattccagaagttattggtaaggagattgagaagtctacctccagcatcttcccacttcaaaacgtcttcatccgcaagggtgaagatactcaaggcccccaagttcgatcttgggaaactcatggaggtaattgctacatgcatgcaaatagatttaccagactatctccctgttacttgttatcctaaaacttgttgcttatcaggttcacggcgactacaaagaggatgttggtgtgaagcttgagaggcctgtcgagggagatgaggctgggcaggaggttgctgctgccgagtagtttgtttgctagttctatatctaggcgagtctggacatgaggttgcttatgacgtgaacttatagagttgtcttggctatgtgttttcgtctagccctaagattttgtcttgaaacaagtttaaaattaagattatttgtaacaagtgtttaggattactcgtggtgatattctgtgttcgattactgctgtactaagttccatcatcctcatttttgtttggtcatcgataatttactttctcattcgtatgagatgttctctgcttatttgttgttagctgacactgtcagttaaactagtgcccccattcttttttatttatcatgatttagtttaaaaatgaactaggactccctctcgtgtattattagttgttgttttggataagatttgactaaaacttataaactcttgactacaaataattattttattatttagttttgaaacctaatgattatatgttcttatttattttaacatgtacttttataaaagtgtaattgtattaagagtttatttgtattttaacatttaacaaaaaaatattggttaacgttatattttggagaaatataggggcccattgagaagaaatatgttatagttgacactgaagtgaggcgaagcaccaggcttcgtgagaaatcaggaggctttatgaagtctggacacttgcatagtgcctacttttgcactacccctcccataaaccccagaaacatcaaaaggcttggcgcggagctctgcatggttgacaaagagattgctccccccccccccccccccccgaagctctagcagcaactaagaaacagctggaggtgatccaacgtccttgcaaagctaactccaacactaggggcaagagagagaaaaagaaagatgacaagaagaaaggacccaagagccagacagaaagtagagcatgattgctctactctgctatgtttgcttattgcaacgatattttattttggggtttcttattttgtctcctataaagttattgcaacggtatttcattttggggtttcttattttgtctcacatgaatagatacaatacaagtctagtggggcctcacaagcagccgaacattttagattgtgtatttttacttttggataatcatagaactgataggttgcacattggctttatcttcaatgatcgttggttaattttattttggacttatgcactcgtttgcatggattggttgctttggagggttacacatcactatattatatacatgacaatacttcgtcgctccctaattttttggctttatctgttaagtgcatggaccgctctaattttaaggtgttcagttgattccctttggcataattggcattatgtatgcaccatggcacatggcattccgaacgcacactccgtgtttgttactggtcttatgaatcacaatctttatacatacgatgaacaaacaaggagaatggaagatactggtccataatagttgggagatcaatgcatcagaaaaatgaaattccctgcataacagaattgcataatctaaatgtgacataatatggctccaagaaacaaaaagagaatcttttgatgaaccatacattagaattttctgccctcgaccttatgatggtttttgttataactcttagttggttcatctggtggcttgattactatttggcaaggtgccaagttttatggagaaaggattttccacaatgagcatgcacatatggtgagatttaaatacaaaataataaaccaagaatggttcctcgtaaacatttagcgccttccacccccgactcaaaaaattgagtttctgcaatggttctctaactttagtgctaaccctgttcaacctataatttttatgggagatttcaatcttatttgcagcttggacaacagaaacaagcctggaggaagtacaacattgatgcttgaatttaatagtgcaataagtcaacttggcattctggaaattgctttaagagggcaattatacacttggtcgaacaaacaaacaacaaccactcttggagaaactaaactggtgctttgtgacacaagaatggatctcgcacttcctaggtacagaggctcatacactcgtaagagacgtgtcacaccacgtgccctgtctggttgaaataaagatatgcattccaaaacctaacatctttagattcaaaaattactggttgatgcatgataacttcctttcagtttttcaagacacctggacccaaccattatatcaactggacccagtcaggagactaatggccaagtttaaaagggcaaggaaggcattgtctaaatggcataaacaactttccaaactagccaataccattgaaaataacaagcttattattcaattcatggacttgattgaagagacgagggatctaaccatccaagagtgcaaccttagagatattctcacacaccaacttcaaaacatgctagaacaacagaaggtatattggaaacaaaggtgtaaaatgaaatggtcccaaagtggagatgctagtacaattttttttcataccactgcctctatgagacaaaatcataacttcattgctacaatacaagatgacacatgacatatgatatcttatcatgaggccaaagccaatgtattgtttgaggcttacagaagtatacttggcacttcgggggattctgaaatggtttttgaccatgatacgatattacaaaatacacaagatttgagtattttggagtcaccattcatggaagacgaaattaactcagtaattacaagcctccctaatggcaaaacaccgggtctggatggcttcaatacatattttctaaaaaaatgttgaccgattatcacttagtatttttatgatctttgtacaagctttcatgctgaaaatgtttgtatgcaaagtatcaatgggtcacacattaccttgataccgaagaaaacttccccctcacagtcagtgactagaggccaatctctctacttaacacaagcatcaaactagtgacaaagcttcttgctagtaggcttcagaatgtcatcaccaaactaatccacagaaactaatatgggttcatcagggggcgcaccatataggactgtcttgcttgagcctctaaatatatttatatgtgcagaaaatctcaaaggcaaatggttattcttaaacttgactttgaaaatcatttgataaaatagagcataatgccataacggatattcttcgtcataaaggcttcagaacaaaatggttgaagtggatagatatgatcacgagctcagggacatcatttgtcatgttgaactaagttccagggaaaacgtttcattccaagagaggagttcgtcaaggagaccctctctcaccgctaccgtttgtccttgcagctgacctccttaattccatactcaataaagcaaaagacgttggtatcatcaagctccccttaatacaacttatcattgagctcccctcgaatacaacttcagggcatgacctctcgattatacaatatgctgatgacacaattttggttatggaggcttgtcctagacaacttttcttcctcaaggctctaatgaactcatttgttgactccacaggactccatgtcaattatcaaaaatcaaacataaaccctatcaacgtgtcaaatgaaagaatggagctactagctaaaaccttcaactgcaaaattggtacctaccctttcacatatctagggcttccaatgggaactacaaaactaaggattgacacattcttacctctggttcagaaaattgaaataacgcccatcagcatctttcttcctctcgcaagctggcacgctacagatggtaaatgcggccttcaccttgaaagtcgcctagaggggggtgaataggcaaatctgaaatttataaactttaagcacaactacaagccaaggtcagtgttagaaataaagtcaagtccgaaagagagggtgaaaacaaatcaaccaaagaaatagatcggatgacacgatgatttgttttaccgaggttcggttcttgcaaacctactctccgttgaggtggtcacaaagaccggatctctttcaacccttcccctctctcaaacggtcacctagacagagtgatcttttctccttaatcaacgagtcgcttagacccctcacaaggaccaccacaacttagtgtaccttgcgttgattacaagttgcttgagaacaagaatggaggaagaaaaaaagcgatccaagcgacaagaactcaaatgaacacaaaaatctctctctcactagccactaaatgtttggagtgaatttggacttggagaggatttgatctcttgatttgtgtcttggagtgaagtctagagctcttgtatttgaatgcaatggctgaaaacttggataccttgaagtgtggtggttgggggggtatttatagccccaaccaccaaaatggccgttggggaggctgtctgtcgatgggcgcaccagacagtccggtgcgccaccagacactgtccggtgtgccagccacgtcacccaatcgttagggttctgacggtttcgaccgttggagctctgacagattagggcaccggacagtccggtgccgcaccggacatcactgttcagtgtccggtgtgccttctggcgctgatctgactctgcgcgcgctgtccgcgcactgttcacgttcactgttcacttttgcagacgaccgttggcgcaatagccgttgcttcgcatggcacaccggacagtccggtgctacaccgaacagttcggtgctacacgtgacagtccggtgctacacctgacagtccggtgaattatagcggagtggctctcagaaacccgaagctgagtagttcatagttgatctccctggtgcaccggacactgtctggtggcacaccggacagtccggtgcgccatgccgccataccagggcagtcttcggttggttttgctcctttctttttgaaccctatcttggacctttttattggtttgtgttgaaccttttgcacatgtagaacttataatctagagcaaactagttagtccaattatttgtgttggacaattcgaccaccaaaatcatttaggaaaaggtttgatcctatttccctttcacacctccctaccaacattttatttatgtacactcaagatacacaactctgtcgtgaagcaaattgacaaatacaaaaaacattgcctatggagaggtgatgatattaatgccacacgacctcctcaggcagcctggcatctagcatgcagaccgaaatagaaagggggcctgtgattctagatctcaagaaacacaatgaagaattactgatgaaaatgctatacaaattctacaacaaacaagatatatcacgagtgcatgtgatatgggacaataggtacaaaaatggttcactgccctcagaaggtagtaaaggatcgttctggtggagagatatattgaaaaacttgccagcgttcttagaaatagccaaagtcaaaacatgcaacggaaccacaactcatctttggcaagaaaaatggggcgacattctgatttgtgataaattcctagagttttttcctatatagtgaacaaggatacaactctaagacaagcaaaattgacacccatgatttaggatttgttccatctacctctatctgcccctgcttacttgcaaatgctttcattggtcacaatgcatcataacatggaactgacggacacatcagacaaatggagatgcgccaacattgcagataagtactcttcccgtaagatctatgaaatcaaacataaagtcccagaagcgccatatacctttgctctgatctggaaagcaaaatgccagcctaaaaatattcttttggctactctgcactacaaacaaaacaccaaatcagtgctcaagagaagagagatggaattagactcctacacatgtgacaattgcatacgacagaaagaagaaacatggagtcatttgtttctaaagtgtagcttcacaaagagatgctaggaaattgtcgggatcacactaacatgatctttgaacccacacattgcaatccgggatatgagaaggaaactagtataactttgggccatggagacaattatcacaatgatgtggtgcatttagaaatgtagaaatggttcaatcttcgaaaacacctctccgaccacccactggtgcaaaatcagcttcgttcaagagttgaaccttaatatctataagataagatgcgggaaacgataactgacaatgttagacaatgcatatagtcattgtaatatgacaaaatataatctgtaaaaacatatatagaaaagtaatgaaaggaatactgtaggagcccctacagtaggaaactttatcaaataaaactttacaatagaactagaatgatagaaatagaatgggatgacaatgcaattctctatgaatgtgatttgaggtccaattcagttcatccattgcaatcgtgatattcaaaaagagctcaacctaatgatttatctcctgtaaaatagtattggttctaaaatattggatatagtattaatgatcaccattagtgcttttcaaaaatataatctcctccagtagatgactaataatctccttgaatacatgaaacacatataccatgtatcgtttcctctccttttctcgtggccttctcccgtgctcccgaccgccgatgctcttatccgtcattgttctacgcatgttcgacgcttgtgcctccatctatgtttgcgagatggcgtcgacacggacactcacagactcacctgacgacgcaatgaaatagtaggtgatgtcatatcatcctgtgtccaatcgatactattccacgtgattggttcatgggctacccgcagctaggctcgcgcgcagcaggctggctggatacggtaactttgggtgtacaagcggatgcaaataaataaccttaaaataacttattcctgttgattggatgcctgtattcggacgcgtaggctcgggtggccctggctgatctgatacggcatttttctacgtacgagtatccgctcatacagcctgcgtctcctttgtgcgggtaaccaaacaggagctgagacaaagtcaatgcatacggtggtaaagatgagatggtgcgggtaaccaaacatacggattttgaattcactcgtacacctcgcgtctcacacgtgtaagtaaccaaatacattcttagacaaagttaacgcagtgatgattaaggatgtgattatacagatccgagtgaactccgtcaccgtagcccgtagtgttcctgaactcactttctctgcaccgtccgttacgctgcagatgggccgaatcagatgggccaaccatgcctcgaagcacacatatgggccacaccgcatcgtgtgcgtccatccgctcttgggtgcctgctgaccgcatgatcgaacctggaaaccctcgagtcgtatataggtagtccgctctgcctcgaagtgccttctcccgcagagccgccgacaactctctctaccgtccgataccccaagcaccagcgcggcggcggcgaccatggctgtcggaaagaacaagaggatctccaagggaaagaagggtggcaagaaaaagacgttagtttgcttgcctgttatatcccagttcttcagatcttacttgggtcgattgctttctttctttatccgttgctgatgcggttgcgtggttgcgttacttcttttatgcagcgtcgaccctttctctaagaaggattggt

SEQ ID NO: 1056 - DNA, 19356 bp, Zea mays
  Intron number 1 from transcript GRMZM2G022437_T01 (locus G RMZM2G022437) derived from phytozome v7.0 (chr-ID na; pos 4850760 to 4870115)
ctcatacaggctactactttcttctatatttgcaggtacgtaggtatttactttgtgttagttggcccttacgacatcagtttttctgtaaatattaatacattggtttatgacaatcagttagtataatggaacgatgcctaccgtagtatcatatgctcatgcatgcatgccatatatatgataccgttatttttttaaaaataatgcgtttgtttacactatgtcagttttccttgattattgatgcttgttggcaattataacagtttcagaaggacactactgaaagggaaatgtgcctttgggccatttctaagtattttggtgattaagtgtcaacacaagtgcttaaatgtgaatctatgcccatggatgaacaaagtgcaaatcacaagtaaaggtatgtttctaagccttagtacattggttatgtgtactaatatatttgtctaagtgttagaaacagagagaagaagaaaaggagaatgttggctgtgtacagccaacaggctgtttcggtctggggcaccggactgtccggtggtgcaccggacagtgtccggtgcgccaggctgcctcgacctgaagacgctgctctcgggaatttgccgacggcgtacggctaaaattcaccggaccgtccggtgtgcaccggactgtccggtgagccaacggtcggccaagccaacggtcggccgcggaatctgcgcgcgacacgtggtctggccaacggtcggaaggaggcaccggactgtccggtgtgcaccggactgtccggtgcgccagatctgcaatggtcggcaacggtcggctgcgcctgttaaggaaagaaatcgggcaccggacagtgtccggtgtgcaccggactgtccggtgcgcccgacgacagaaggcaaggatggccttccagatttgttctcaacggctcctagctgccttggggctataaaagggacccctaggcgcatggaggagacaccaagcattccttgagcactcttgatcactcacacatcaatcttgcgcacttgttcgacattctaatgatttgagctccgttctagtgtgctagtctcttgagctcaagtctgggtcttgtgtgtgcgtattcgctgtgatctttgtgtcgtgtgtgagttgctaatccctcccttgctccgtgattctctgtgaacatcttttgtaagggcgagaggctccaagttgtggagattcctcgcacacgggattgagaaaagaaaagcaagaacaccgtggtattcaagttgatcattggatcacttgagaggagttgagtgcaactctcgtccattgggacgccacaacgtggagtaggcaagttttgtacttggccgaaccacgggataaccaccgtgtcatctctgtgattgatttcttgtggttattgtgttttgactcctctctagccacttggccataattgtgctaacacttaacaagtttttgtgggcttaagttttgaagttttacaggatcacctattcaccccccctctaggtgctctcaattggtatcagagccgttctcttcaagaaagggactaatcgcccgaagagatggatcctaagggaaaggggatggtggtcgacaacaacgagaaggagtctatcttcaacgaaccgaagaatgacaagtctactgacttgagctcaagccacaagcgcaaagatgggaagaagaagaagacaaggcgcatcaaggagatcgtctactacgacgacagcgatgagtctacttcttcccaaaaggacgacgaccacaacgactacgagaaaaggaaaccggttaattcgaacttttcttttgactactctcgtattccgcaaagttcaaattcacatttgctccccattccacttggcaagccccctcactttgatggagaggactacgaattttggagccacaaaatgcgtactcacttgttctctctccatcctagcatatgggagattgtagagagtggaatgcactttgatagtacggatagccctatgtttattaatgaacagattcataaaaatgcacaagctactactgtgttgctagcctctttgtgcagggacgagtacaataaggtgagcggcttggacaatgccaagcagatatgggacaccctcaagatttctcacgaggggaacgacatcaccatgctcactaaaatggagttggtggagggcgagcttggaaggtttgcgatgataaggggcgaggagccaacccaaacatacaaccggctcaagacccttatcaacaaaataaggagctatggaagcacgcgatggacggaccatgacgtcgtccgacttttactaaggtcctttaccattcttgatcctcatttggtgaataatattcgtgagaatcccaggtacaccaaaatgtcgcccgaagaaatcctaggaaaattcgtcagcgggcgaatgatgattaaggaagcaaggtacgtggacgacgccttgaatggaccgatcaacgagccgcaacctcttgctctcaaagcaacaagaagcaaggaggcgctacctagcaaggtggcacaaattgaggcggccggacttaatgatgaagaaatggctctcatcatcaaacgcttcaagacggtgctgaagggtcacaaggggcagccaagcaagaccaagacaaaggggaagcgctcatgcttcaagtgcggtaagattggtcattttatcgctaactgccccgataatgatagtgaccaggaacagggaaacaagagggaaaagaagaagaattacaagaaggcaaagggggaggcacatattggaaaggagtgggattcggattgctcctcgtccgactccgacaacgaaggactcgccgccaccgccttcaacaagtcatccctcttcccaaacgagcatcacacttgccttatggcaagggaaaagaaggtaatcactcgtaacgctagtacttatgattcttctagtgatgagtctagtgatgatgatgacatagactactctagcttgttcaagggtttggatagaactaaaatagataaaattaatgagttgattgatgccttgaatgagaaggatagactcttagagaaacaagaggatttgttgtatgaagaacatgataaatttgtagaggcacaaaaatcctatgttttagaagttaaaagaaatgaaatgctttcttttgaactatctacttgtcatgaaaccatttctactttgaaaggtgtcaacaatgatttaaatgctaaattagaagtagcaaataaatccaattcttgtgtagaacatgttgtaatttgtactaggtgtaaagattttgacattgatgcttgtagtgaacacctagtttcaatttccaagcttaatgatgaattggctagtcttaatgcccaacttaagactagcaagaatgaatttgataaactaaaatttgcaagggatgcctacacgatcggtagacacccctcaattaaggatggacttggcttcaagagggaagccaagaacttaacaagccataaggctcccattcccactaaggagaaagggaaggcacctatggctactagtgctaaaaagaaccatgcctttttgtatcatgataggaggcatactagaaatacttataggagctataatgcgtacgatgattgttctcatgctatgtttgcttctagttcttcatatgtgcatgatagaaatgttggtagaagggatgttgttcataatatgcctaggataaatgttgttaatattcctaggagagttaatgagccttctacaatatatcatgctttgaatgcttcctttgcaatttgtagaaaggataggaaggtaattgctaggaaattaggggcaagatgcaagggagacaaaacttgcatttgggtccctaagaatatttgtgctaaccttgtaggacccaacatgagttgggtacctaagtcccaagcctaaatttgccttgcaggtttatgcatccgggggttcaagctggattattgatagcggatgcacaaaccatatgacgggggagaagaagatgttcacctcctacgtcaagaataaggattcccaagattcaatcatattcggtgatgggaatcaaggcaaggtaaaagggttaggtaaaattgcaatttctaatgagcactctatctctaatgtgtttttagtagagtctctaggatataatttgctatcggttagtcaattatgcaatatgggatataactgtctatttacaaatgtagatgtgtctgtctttagaagaagtgatggttcactagcttttaagggtgtattagacggcaaactgtatttagttgattttgcaaaagaagaagccggtctagatgcatgcttaatagctaagactagcatgggctggctgtggcatcgccgcttagcacatgtggggatgaagaaccttcacaagcttctaaagggagaacacgtgataggtttgactaacgttcaattcgaaaaagatagaccttgtgcagcttgtcaagcaggtaaacaggtggggggagcgcatcacagcaagaatgtgatgaccacctcaagacctctggagctgctgcatatggacctcttcggacccgtcgcctatctgagcataggagggagtaagtatggtctagttattgttgatgacttttcccgcttcacttgggtgttctttttgcaggataagtctgaaacccaagggaccctcaagcgcttcctcacgagagctcaaaatgagtttgagctcaaggtaaagaagataaggagcgacaacgggtccgagttcaagaaccttcaagtggaggagttccttgaagaggaagggatcaagcacgagttctccgctccctacacaccacagcaaaatggtgtggtagagaggaagaacaggacgctcatcgacatggcgaggacgatgctaggagagttcaagacccccgagtgcttttggacggaagccgtgaacactgcttgccacgccatcaacagggtctaccttcatcgcctcctcaagaagacgtcgtatgagctactaaccggtaacaaacccaatgtatcctactttcgtgtatttgggagcaagtgctacattctagtgaagaagggtagaaattctaaatttgctcccaaagctgtagaagggtttttgttaggttatgactcaaatacaaaggcgtatagagtcttcaacaaatcatcgggtttggttgaagtctctagcgacgttgtatttgatgagactaatggctctccaagagagcaagttgttgattgtgatgatgtagatgaagaagatgttccaacggccgcgatacggaccatgacgattggagacgttcggccacaggaacaagatgaacgagagaaaccttcttcctcaactatggtgcattccccaactcaagatgatgaacaggttcatcaacaggaggcgtgtgatcaagggggagcacaagatgatcatgtgatggaggaagaagcgcaaccggcacctccaacccaagttcgagcgatgattcaaaggaaccatcccgtcgaccaaattctgggtgacattagcaagggagtaactactcggtctcgattagttaatttttgtgagcattactcctttgtctcttctattgagcctttcagggtagaggaggccttgctagatctggactgggtgttggccatgcaagaggagctcaacaacttcaagcgcaatgaagtttggacactggtgcctcgtcccaagcaaaatgttgtgggaaccaagtgggtgttccgcaacaaacaagacgagcacggagtggtgacgagaaacaaggctcgacttgtggcaaaaggttatgcccaagtcgcaggtttagactttgaggagacttttgctcctgtggctaggctagaatcaattcgtatcttgctagcatatgccactcaccattctttcaggttgttccaaatggatgtgaagagcgctttcctcaacgggccaatcaaggaggaggtgtacgtggagcaaccccctggcttcgaggatgaacggtaccccgaccatgtgtgtaagctatctaaggcgctctatggacttaagcaagccccaagagcatggtatgaatgccttagagatttcttagttgctaatgctttcaaggttgggaaagctgatccaactctgtttacaaatacatgtgatggtgatttgtttgtgtgccaaatttatgtcgatgacataatatttggttctactaaccaaaagtcttgtgaagagtttagcagggtgatgacgcagaaattcgagatgtcgatgatgggcgagttgaactacttccttgggttccaagtgaagcaactcaaggaaggaaccttcatctcccaaacaaagtacacacacgatctgctaaagcggtttgggatgaaggacgccaagcccgcaaagactccgatgggaaccgacggacacaccgacctcaacaaaggaggtaagtccgttgatcaaaaagcataccggtcaatgatagggtcattactttacttatgtgctagtagaccggatattatgcttagcgtctgcatgtgtgctagatttcaatccgatcctaaggaatgtcacttagtggcggtgaagcgaatccttagatatttagttgctacgccttgcttcgggctctggtatccaaaggggtctacctttgacttagttggatactcagattccgactatgctggatgtaaggtcgataggaagagtacatcggggacgtgccaattcttaggaaggtccctggtgtcgtggaactctaagaaacaaacttctgttgccctatccaccgctgaggccgagtatgttgccgcaggacagtgttgtgcgcaactactttggatgaggcaaaccctcagggactttggctacaatctgagcaaagtcccactcctatgtgataatgagagtgctatccgcatggcggaaaatcctgttgagcacagccgcacaaagcacatagacatccggcatcactttttgagagaccaccagcaaaagggggatatcgaagtgtttcatgttagcaccgagaaccagctagccgatatctttaccaagcctctagatgagaagaccttttgcaggctgcgtagtgagctaaatgtcttagattcgcggaacttggattgaattgtagcatacatgtgtttatgcctttgatcatgttcattctgcattttgttgcttattgtggtgctcaagttgtacaaacactccctggacctcacaagtccgttgcaaagtgatgcacatgtttagggggaggtgtgttacaacttgaccctttgagactaactatgtagttgagtttgcttgatttagtctcgaaggagaattgaaagggaaaaggtggacttggaccatgaaagacttccactgcactccgataagagggtaacttattccaagttcatctcatgaactcttattgccatttgatcttaattgaagattttggtgaggcaatggggttagagggccaagattgatcccgttttggtgcttgatgccaaagggggagaaaataaaggccaaagcaataaatggatcagctaccacttgagagattttgaaaatagtagaatagagccttttgttttgtcaaaactctcttatttcaaaagttggcttcttgtggggagaagtagtgattatgggaaaaagggggagtttttgaaatctgtgatcaatctcttttggaatgactctctttttgcttcaacatatgtgtttgacttagagatagagatttgtgtttgatttacaaaaacaaaccaagtggtggcaaaggatgatccatatatgccaaaattgaatagaactcaaatttattctatttgaagtgtttttgcacttgttctagttgctttatgttgtgttggcataaatcaccaaaaagggggagattgaaagggaaatgtgcctttgggccatttctaagtattttggtgattaagtgtcaacacaagtgcttaaatgtgaatctatgcccatggatgaacaaagtgcaaatcacaagtaaaggtatgtttctaagccttagtacattggttatgtgtactaatatatttgtctaagtgttagaaacagagagaagaagaaaaggagaatgttggctgtgtacagccaacaggctgtttcggtctggggcaccggactgtccggtggtgcaccggacagtgtccggtgcgccaggctgcctcgacctgaagacgctgctctcgggaatttgccgacggcgtacggctaaaattcaccggaccgtccggtgtgcaccggactgtccggtgagccaacggtcggccaagccaacggtcggccgcggaatctgcgcgcgacacgtggtctggccaacggtcggaaggaggcaccggactgtccggtgtgcaccggactgtccggtgcgccagatctgcaatggtcggcaacggtcggctgcgcctgttaaggaaagaaatcgggcaccggacagtgtccggtgtgcaccggactgtccggtgcgcccgacgacagaaggcaaggatggccttccagatttgttctcaacggctcctagctgccttggggctataaaagggacccctaggcgcatggaggagacaccaagcattccttgagcactcttgatcactcacacatcaatcttgcgcacttgttcgacattctaatgatttgagctccgttctagtgtgctagtctcttgagctcaagtctgggtcttgtgtgtgcgtattcgctgtgatctttgtgtcgtgtgtgagttgctaatccctcccttgctccgtgattctctgtgaacatcttttgtaagggcgagaggctccaagttgtggagattcctcgcacacgggattgagaaaagaaaagcaagaacaccgtggtattcaagttgatcattggatcacttgagaggagttgagtgcaactctcgtccattgggacgccacaacgtggagtaggcaagttttgtacttggccgaaccacgggataaccaccgtgtcatctctgtgattgatttcttgtggttattgtgttttgactcctctctagccacttggccataattgtgctaacacttaacaagtttttgtggcttaagttttgaagttttacaggatcacctattcacccccccccctctaggtgctctcaactacctgattcatggaggtcatcaagcttggtataaccacccaaacatgacctgatctggttggctacgctgttctagatgcggttaatattatccgtcaagataatcccaatataaccgaagttcgagtactccctccagatggggtcccgtctccactccaagatggtgccatacgtgtttgtatctacaacgacatcgtcaatggtcaggctgttgtggttaacccagcaccatatattgactagattgttccacaatgccaagccttcaattttattacgctttgatggattacgcacaaatttgatttgaataatgcgagcgagtgtgatatctaaagttccttgcatggctggtttacgtgtgtgatggctctacttgtacttcagtgtttgtgttaatcaatatatttaataataaataattatatgtctcgtgtttattatcgattgtctagagatgtggttatatattatagtcttttttaagggccattatgttattggaaatctttaaggtctacttgtcacacttatggcattattgcttcccaatactagtagtatccaccgtcccttccatcgattaatgttgccgcaactttcaatacaatccacccgtcaatgaaccaccgctttcgagcacacgagtaataaaaatggacaaggtacatatgcaatatatactaacgactaattccttacttacggtccaatgtttggcactttgatgcattccaattttaataacgagtattatttgggcttacaccgtataattcaccaagagttacataaaaaccacatgaaagttagtatttgataaagtctcccaaaactatactccatatataattatgcacccttgctaccaaaccaccatgtaaaaacgcaaaaagcaagcacaatgttcatatgcgcgttaaaaatcaatacatggaggtacactaacaactactttatgttggttgctaaatgtgcctttagcatcctaaagacgtttgataaagacctttagcaacctataaagatggtggttgtaagtaccatcgctaaacagtcacacccgcttctaaggacaaaaccagatgttccactatacatgaaatcggatgagaatcacatgtatagcaaagtcacacaatggattatatcaaaacacattgatttattgtatcaaaaccagtatttattagataatcactatgcaacagtatcattgacgactatcaatatttgtcactgtgtgtataataatacatatattattatcaccgagatgatgcaatgtaaacaaaatagtcgacgtgtttatatatatttagagatacatatacatgctactactttcttatttgtaggtaggcacgtatttttgctagtaggtgcttacatcagtcttgtagtaaatatttggcggtcagattgcactagtacatagaagctctatagtggcggtcgactgctagctgacggccgttatctttgccgagatccaggctttgacactcgcaaaagaaaggaactttgtcgagtgtcgcccgaataacactcggcaaaatatgctttgccgagtgccttacatggacactcggcaaagtatattaccatttttttcttttttagccaaactctttgtggtttgttcctacactgtgtagacttacatgttctatttttggaacaattataaaagtgtttgctataactcatagattttgttcgtttaattgaatttcctctgataattcagatttgaactacaagccactcgaaaaatggaaaactgtgaatgcaaaaatgatagtcatgttacttagcacaagttacggccgatttcaggagcatactagaattttagagcaccacgctcactaaacatgaccgtgaacttgccatccaggtgtttaaaaattggtataaaacacaaacaaagtcataaaaccatgaaacttgtccacatgtcatgatataatgtgtagaggttgtgataaaaatttgagaatgtttcgagaaagttgtgaatcactatgtgtaaaaacctaagtctcccacacaagaaatcacagagtttcaatgtagaccaactagcctaatcctcaaactcaccacaggaagctgactgggggagattgctagcctaatcctcgaactcgtcgaagtcatcgaactcctagagacccgcctcgacgtcttcttcacttgaaaatccccgacgctacggtcgagaaattatcgcgtttacactaaacggatattaattagaatatttagtcgacatactcgtattatttgaaatttattaaatgtaaattaaaactactattagttttgattaattttttattctaatacttgtcaggctaaacaagtaattaattaattaattaacacgagcgattataagcaaaacagtttgatatcgcgcatggatagcgcgtgactcgcgaaaatggcgcggggcaaggcaagtgacacgtgaaaatagcacacatgatacgctcgaatgacgcgtgacgacgcatgacactgtgcgaaacaacacgtggacggcacgcgaaacaacatacgcgacaccacgcgaacaacgcgcgaacgacacgtccgaacgatgcacgcacacactcgacttagcgagcggacgacgcacggaacagtgtgtgcgaccagcgcaaacgacacgagaatcaacacgtgacaacgagcacatcacgcgcgagtgcgacgacgcgtgatactcgctaacagataatgcgactatacaaaaaaatattaaatgaaaattgtttaagttggtattaatcaagttaatatttatttataaaagcgcgagttaaaaactataaaatagttttaattagaaggtcatttttaataagtatcgaatgaacaactaattaaataattaaaacttgtgacgtgataaaataacataactaatacaaaatcgacgttgttacgaagttgacatgactgaaatgattcgaaatagttttatgacgtattatacattgaatgactaacaattcgtggttaagtgtaaattaaaactactatttagtttcgactaattttctattctaatagttttccggttaaacaagtaattaattaattaacacgggcgattataagtgaaatgggttgatatcacgcgcggacagcgcgcgactcgcgaaaatggcacgcggcatggcaagcgatacgtgaaaatggcgcacgcgatacgctcgaatgacgagtgacgacacacgacactgtgcgaaacagcacgtggatggcacacgaaacaacatgcgtgacaccacgcgaacaacgtgcgaacgacacgtctgaacgatgcgcggacacactcgacttagcgcgcagacgacgcacgaaacagtgcgcgcgaccagcgcgaacgacgcgcgaatcggcacgcgaccacgcgcacatcacgcgtaaacaacacacagatagtgcgacgacatgtgatactcgctaacagataatgcgattatactaaacaagtattaaatgaaatgcgtttaagttggtattaatcaagttaacatttatttataaaagcgcgagttaaaaactataaaatagtattaattagaaggtcatttttaataagtatcgatcgaacaactaattaaataattaaaacttgtgacatgataaaataacattactaatacgtaatcgatgttgttacgaagttgacatgactgaaaccagtcgaaatgggtttatgacgtattatacattggatgactaacaattcgctgttaaaaaacaacgcgacatgcgaatactactaaactgtgtcgtatttatacaaaaccaatattaaatgcaacacttaagttggcataaccacagtaacatgtatttgcaatcacttaattaaaattataaatttggtttcattgaactgttattttaaataatcgacactaaacaagtaattaattatttaacatgaacgatgtgacgaaacgattttattaaagcgcgtgaataacgactcgtgtgaatgacgacatgcacagacaacatgtgaattagcacgggagaaacaacatgcgagaaagatcacgtgcgacgtgcgctacagcacgcaaataatgtgcggaccggacaggcagcgcgcgtgcacgaacaggcaaatggatgacgactatgcgcggaacggcgcacgaacgacgtgcgatgacacgtgacttgcgcgcaagtcagacatgctgcgcgcgacgcgaatcgcacgacagcgagggtacgacggggctgtgcgcaaggggtagacgaatggtagaccggggtaggcgaagcccacctcgcgacaacggcggatggtgagacgagctcgcagcgaggcacgatgatggcgaggctgctgctacgctggggccacgctagggccgagccggggttgccacaagcaagccacgcaggctgtcacgcaggctgcaccgggcgagtcgtgccggggccgtcgcgccagctgccgcacaagctgtcgcgagggtgcgctgcgggcaggctctaccgtggcctcgctggcgccgtggggcagaagcctaaaccacgggagagtaagatgtgggagaggaagacgaggacgaaccatataggagaaaataggaaaggtgcagctcgacgggcggttggatgaggaagagaaacagtaggtcataatgttgattggcaagtgggacaatgtgcaggcgcccgtccgcgtgacgtgcacgacgtgggcgtggtttgaggcggggcgtgcggctggggagcgtggggtgcgcgctggttgctgcgacgaaggccaaacggtgaccagttctgcgagtggagagcgaacgaaaggaatgactagaaataaggaatagttgtcgtggggcccacatgtaagaatgagagggggaggcgaaatgagagcgttggtttagggagatgggtcgaacaaccgtttattttttggatttcttttcttcttttttctatttctcgtcttttcgtatatatatgcatagtagacatttatatgtatgtatatattcattttagatcaagcccaaaataatttaaataaaattaaatgcgatagcaaacaaaactatgcttccacatgaaatgcatcacacaaagcttctatagggttccattcagtaggcttatgctaatatataacaaaataacactccattgtttagaaataagaaaagaaaagcaaggaaaagaaagggtaacacatgaattaggtgaatattagaaaagaaattttatacccacaaattcagggtattacagcaaatatgtcgaagcatgggtacacatacttttttatttaggtatataacactggatttctaactatctctttgttttagttgccatcggatccggcagtttacaatctcgttcacacggcccacgcgactttattggacccagcacccggcggcgaaattagtacacgtgacttggacagtattcagtgtattaatttattattacgtccgctgtaacaaagggtgaagaaacaagaaacaaagggtgaagaagagcgtgcatgtttgaagtctacgcgtaacgcaagtagagcacgcatagacatacaaatagtcagtccaaatagtcacccgtgtgtatatatatacatgcatagacatacatagagcacgtaccatctcaccattcacaaaatatgtaaattcgattcaaaataatagtgaaaaatgataggacgatgggtattggtagagtttggagagttgttgctataatttaaaaaatgttttgctgttttttttatttttttcgattcttaatttgtcgagtgcttttctttgccgagtgtcaaaaaaaatactcggctaagaaccctttgccaataaaatatttgctgagtgttctttgccgagtgttacacacggcaaaggctttgccgagtgtaaaatagcctttgccgagtgtcaaggtcatagcactcgacaaagaatgcacacctaggcaccggtaaagcttctttgccgagtgctgtggctttagcactcggcaaagaaggaacctttgccgagtgtctcctagtgaacttggcaaagatactgacaaaggggcccgctagctatctctgccgagtgctagtccgatggacagtcagtaaagagggagactttgccgagtgtcacctaatacgctcggcaaagggaaactctttgccgagtgtcagtacagtggacactcggcataggctccatcgccgttaccagtcgtcgtgacgacaacttttctttgccgagtacctattgacactcgtcaaaagtatatgtcgagtgcctgataaaaagtacttggcaaagaagccgttgtcgatcactaccggaatttggctctttgccgagtgttttttttcgggcactcggcaaagaagctctttgccgagtgccacacaaaaaccctcggtaaaagaaaacactcggcgaagaagctctttgccgagtgttttttttccaacactaggcaaagacaattttaaaatcacattttaaagcagtaaattaattcaaatgaaaaagttttcaactacaaatttgtataactcatcatgatgtacaatttatattttgaacatttcttcatatgacaaaataaaaataaatttgttcataaaacctatatctctctcgtagtttatgaaactacgagagagatgtatagaatttgtgcatattgttagaaccatcatgtgagatgaacaaatgaccaaacaaccaaaataaactttgtagatcttgagaagttatagaagtttgtagttgacaacgttttcatttgaagtcatattgtcaatgaaaactacgtttgaatttaaaaaatttaaaaattgaattttgaaaacgacctcgaaagaaaaaaccaccaacatgaaagttgtaggtattcaagagttatgaaactttttagttgacaatgttttggtttgaaatcatcttgtcatgcaaaactatgtttgaattttgaaatttgaaattttcaaactacctcggatggaaaaaccaccaaaacaaaagttgtaggtcttgaaatgtaatgaaactttgtaattgacaactttttgatttgaaatcatcttatcattgaaaaattcgtgtgaagttttcaaatttaaaattcaaattttgtaaacggcctcggatatgtaaaaactattaaaatagaacttgtagatctcaaaacgttatacaactttatagttggtcacattttcaaatgaattcatttagtgacttaaataatcaaattactctcggtttgttatagtatgaggaatgaaaacgtaatatataaataattggtgtagtagtgtagtggtatagccgtataggatggtatgcgtgagagagaggttgcgagttcgaatctcaccattcacagaatatgtaagcgtattcgtagggtttggagaattgttgctataatttaaaaaaaattgtgttttttttcaattcttaatttgccgagtgattttctttgccgattgctttttgacactccgagtatccgaaaaaaatactcggcaaagaattctttgcagataaaacatttgccgagtgttctttgccgagtgtaaaatagcctcggcaaataacgcgattccggtagtggatgtacagtttgtcgtgctttctttgccgagtgctcggcaagtgtttttaaggccttgccgagttctttagacactcggcaaagcaactgtttccggtagtgattatagttgttgccccctgaattgaaccaaacaacacttattattttatgatgatacacgtatacgtacatgctagttcagtgtattaaattatacgtacatggtataccgtattatttagggtttataaatactagttcagggtatttctaaattaatacacttcacagcagagatggctatctcgctagcagagcacacgcgcacgtaatggccaacggccccccacatggagatggctgtctcgctagctgtgtacgcctgttgttggggacttgttctcaaatgctatgagttaagaacaaggcaacacagagaatgttaaacgataaagtccttcgtcctttgaggcattatttcccttaggatataacgatctctggacgaaggtcatgaaggacgaatcttcatcatcacagtatacattaatgaaagacgaagcatatgaaacataaaagatagcacgaataatcatataacatcattcatttaacttcattatatcatcatagagaaatagagacaatatcgaattataaatgtaccttcggcttggaaggagatgaaaatacaagtgtgacgcaaaagcaaatgccaagtcaacgtgaacagtacgggggtactgttcacctatttataggcacggggtacaacccatacaaaattacatacatgccctttacattcggtgataattctatagcactctatcgaggtctaaatggccttttcatctttaagtcggttcccttttctgcgaacatgccgaagctttcctgcttcacagcttcggcgctttgtcaacctttgtagcttttccctttctgatacgagtccgaagatacctgctcacacattttaagccgcttctcccttgaagaccttcggcgacgaagcatagacccaacacctgtatccctttggttcgttgcgttgccgagggtgcagtgaatttgcaaagaagaagttcgttccgcttctgatattatcggttccgtccaacgttttccgtccaacgttttctgatattatacgcttctgatatgtggcgccgtcgagagaaggggagaagaggaggtagggtttgctagtttttaatagaagtgatttcgatttggacgagttgctgagttgggcctgttcgggcctaatttatttagccaccaacagtcacatgtcaatcaatagcgaccaaccgtcggatgtccacctgcctctatagcgaccaaccttgagtagttaaatttctagatttttagcgaccggtggcccgtcgctgcaaatgcatttagcgaccaactgtcggtacataacttttagcgaccaaccgtctgtccctaataagggtcgctaaagatcaaccatcgtatagtgataataccatggtaccgaaagacggagagtctacaaaaatcctaagtaggtacttaaactttcaaaaattcacgtaataaagatacataaaaaaaacatgtcacgttgcataataaaaggaaaaaggagaaaaagaaaacataaaatagaattaaatatgcatccgtgttcggtcgttttacctggtgatctgtttacgtcgttaactcatccggctgtttacaatctcgttcccgcggcccacgcgactagtccgtttggttccagtacacatggttcgttccgcttctgatgtcatcgggcgctacacataacagacatgcatggcatggcggtgactgctgactgtgggatgcacgcgtgcccctgcccttgccctgctccttcatgtgactcggttccgtccaacgtttttggtaccagctagccaagtactgtgctagtaccgtgtaaacaaagggctgtactgccagctaataacaatgcaagcaggacaattagatcgagatagaagatgtcaacatgtgccgatgtttactaagtaaaagaagaaaaatggatgcaccgttatcatcgacgagctgagtattaaaatcggtagcaatatgaacgggtccataaagaacatccattgttgcatgcaatccaaatagctagtcaccgtgtgtatatatatatacatgcatagacatacatagagcacataccatctcctattctcatacaggctactagtttcttctatatttgcaggtacgtaggtatttactttgtgttagttggcccttacgacatcagtttttctgtaaatattaatacattggtttatgacaatcagttagtataatggaacgatgcctaccgtagtatcatatgctcatgcatgcatgccatatatatgataccgttatttttttttttaaaaataatgcgtttgtttacactatgtcagttttccttgattattgatgcttgttggcaattataacagtttcagaaggacactacctgattg

SEQ ID NO: 1057 - DNA, 9727 bp, Zea mays
  Intron number 6 from transcript GRMZM2G377311_T02 (locus G RMZM2G377311) derived from phytozome v7.0 (chr-ID 1; pos 1 3361504 to 13371230)
tcacgccacgacaacttgaaggttggtccttatttgcgaagttagtgagaaatgtttccactcgctctactttgtctatttgttctgcatatgttgtgattgttattgattgaattggcaccatgtgtttggtgtgtcaaattgaattttgttcctgtggaagtccaggttttgaaggagtgaataaacataatagatacttaacttgataactttgtgttttctttctttactgctagcagttcttgacgaactgcagctccattgaacttatattcagtctaaagtaggaatatcacaatttttaccactccattagttaagcacatggtttattactttattttttgttagattgtttataaagatggaaatacatttcaatatttcatgccatgttaccgtttgggtttttgatgtctaaactttttcataccttgattcattatacaatttaatttccaaaacttaccttttagccaatttatttaaattctagcatgtttgagccaattcatttttctgttgcagactgcagtagcaaatttttaaggctaatctaagaaaaataggcacaatcggaagtgtacattgttatgtagaccaaaaaagcgtttcgagaaaaaaaatttagaccaaaaaaggctggccaattgatagacttgcattaggcaattttctgaacatgttatgatattctgccccaccaaaatatggagttctattttctatgttgtgaaatgatcttgttcctgttgtgtatttgtaggtgctatgtgtcttgctatattactatattagtactatctttgttccacaaagagttacattttggttttatcctgagtcaaactatcttatgtttgaccaagtttatacaaatgatcaacatttatggcaccaaatagatttactatgaaaatatatttcgtgacgaatctaatgatatttatttcattatttgtatcataaacattgtttttttggtataagatcaatcaaactcttaagatttttttaacttataacaaaatcagaattacactttttgtaggacagaggtagttgctgcctttttagctatatggtgaagttgttagagagagacatgttttggggcatattttctattttattaagccacaccataaaccattgtaggattgggtacatatagaattagcaaaattggaatcgaagaaagcttcagtatattctaactactaaagtagatgctaatcaagataagatagatgataaggtgttgggatatgaccaactactagactagaagctgaaatctaagataggcacaaggcttattatatcattctcctccttgtgtagtgacttctgaggaatttgaaccatctcaattctagcgcgaaggtcctgaaacttgacccttccaagtgacttggtaagaaaatcagcgagttggtcctgagtgctgatgtagttggcactaacaatctccttgtccaagcaactcctaatgaagtggtacttgacctggatgtgcttgttgcgctaatggggttcttcaccggctaaggcaaatttgttgtccatccgtctaccaacggtgaccgactcggcaggtggtggctggttgcggtcatcgacaaccttaaggaggcacatcatgtcctcggtcgtcagctcgacgaggttcaatagtgtttcgcttgccaaggtgatctgcatgtattccttggggacgacgtggaggaccttctcgacgactctccttgtcgatgtaatcgtcaccgtaccgtgtcatctgctgcatttggctagatagacggagagcgaagttgttgatgtccttgtctggccagaacgccaagggatcccacccatgatacaacttctgctaggtggtttttgcgtttgtggtcgccactgatgcgtgccgtggggatggcgtcccaggtgtacttggcggtctccttgtccgtgaggacgagcaccatctccagtgggacaatggcaaggagggcctctggtctgctagttctcgtcgaagtcattgtcgtcgtacgagaccacatcctgcacctctcggccctgcaacttcactttcatcaccaagaaccactcgttgtagttggttttggtgagcacggggcatgggccatgtgctactgccagactccttggtgatggtttgatgatggaggagcctttatcttcttctttgctttggcagatgaggagagaagtcgttgggaaacagctggggcgaagagcctatgttctccctagggtggttcgttgttttttttatgatgaatgttttttgtatgctatctactggcccccgtaaggaggccttctgatgtatggtctactttagaccttttactctatcttcttaatatataaaaaaggggcgcagttctcttgcgcgttttcgagaaaaaactatggaggagccgcatcgaccatggtggccacgacgtcgctccggggaaagagacatgtgttggtgcctgtgaggactctttgcgcctttgtgtcccagccatggcagcactcgggggaaggagagacgtgccaatgcttgtgagggctccacgtgcccatgtctcgctcggccatggcatcatgctctcgctcacccgcgttcatgcgcatggccgcagcagcggtctggtgggccatctcgatcgtgtgcgccgctgcggtctctgccgctgcgatgcgatcctcacgagctgcagccgcatgccgttccctgcttccagggctactgcatgctggttgcgcgcagctgccttctggcgccatccgctggaggtgtgctcgtgggaggagtggctggccatggtgccacacaactcggctttgataccatttgttagagacttagagatagacacaggttttgcggcagatttctattttattaagctacaccataaaccatggcaggattgggtacatatagaagtgccaaacttgaaaaccaacaaagctttagcatattcttagtttctaactactaaagcagatgttaatcaagataacatagctgataaggtgctgacgtatgcactaactactacttgactagacactgaaatctaaggtaggcacaagatttattttatcacaagttgtctataaatgggattttgttggtgtgcacatatttattgttaatatttaccttaaagagctttgcaattagtaactggtgagcatcttctaatttgtactggtgccttgtcacatacactatcttggtaaagaggacgattatcttgctgtttgattggaaccgataaactactcaagtcccagctacgttttagctgttagaatcttagtagcctctaaaagatcagcaagcttctggccttttcgaatctggcctctacttgctatgtattgtttttttctcgaacgcgcaggaggactgcacgtcattatattaagaaaggaaaaggtccaagaggaccaaagtacagtgcccgtagggcaaacagaacacttgaccacactctagaccctactcataatagcaggaagaccaaaacttgctagctgcttagccccagccctctcccaacaacttaactcattcagaaataagcttttaacaaaacacatggaagggttaacaccatcaaaaacagctttgtttctagtcagccatatgcaccaagaccccaaaataatgacactgttgaagcctttctttctgaatttgggcaccttcttaagcgccttcctccaccaatcagcaaatgagatttcatcaacagcaggaatgagatccccaagacacaagggaacaagaatagcatgccaaaattgcctggcaaaactgcaagtacacaaaagatgttgcactgtttcctgctcttggtcacaaagaacacaaacagccggatgttgcagccctctcctccttagtctatcagcagtccaacacttattccttatcgccagccagaggaagaacttgcattttgggggagcccaggatttccacaaacgtttccatggctcaaacgaaattgaacccatgaaaaaagccttatagcaggactttgaggagaacatcccaaaagaagagtgcatccaaacatgtctgtcagcatcatgagagagcctaacgtcccccaaagtatcccataacaataggtattgctgcaacccactcaaggaaagagcaccacgaatatcactgacccaatgccaattatccagagcctgtgccaccgttctagaagaatacgccttgcggccaaccatacccaccacctcaggggcaatgtcctggatagtattcccatgaatccatctatccgaccagaagagagtagtagccccattccctaaaatggtaaaaaccgacaaatcaaagaactgtctaacctgacgttgcactgggagggacaacccacgccaaggtctgctctgatccgtcttttccaaccataaccattttgcctgcaatgcccagcttttgagcttaaggttagggatcccaagcccaccaagcctcagaggcctcgtgacaacttcccatggaacaagacagctaccaccattaacctcctttcttcctctccaaagaaatcctcgccgaattttatcaattgatttaataacccactgagggacgttgattgcaataagaagataagtcggaatggccgatagaacaaacttcaccaacgcagtccgcccagccaggttgagcaaccgagccttccagttaggcagacgatctgcgatcttctcaatccataacttaaggtcacaattcctcagttttttatcagaaatgggcagccccagatacctgcaaggaaacaccgcgggactgcaatgcagcacactgcaaccagcaagcacctgctgatcatcacatctaattggaatagcactgctcttgagcatattggttaccagaccagaagccgaaccaaaacagtttagtattatcttagcacaattcagatctgcttcaattggcttaatgaaaaggaccacatcatccgcatagatggagactcgactgcgaacatcagctcccccaaggccctccaacaagcctctattttcagcaacccggaacaagctgctaagcacatccataaccatcacaaataacatgggagaaagaggatctccctggcgaagacctctccgatgaaaaatatgattaccaggcgagccattcaacagcacctgagtagaagtgaataacaagttggagatcagattacgccaaacaggaccaaaccccaaatgtgtcaaaatctccatcaaaaacgcccacgagaccgagtcgaaagccttggatatatccagtttcagcagcaaactagagatcttcctcttatgaaggaacttaatcgattgttgcactagcatgaaattgtcgtgaattgaccttcctctaataaaagcactctgattagctgccactaggtcttgaaggtatggtcccaaacgattagcgaggatcttagtgaccaacttagcaaaactatgaatcaagctaattggtcgaaaatcaccagctgaggaagcatcttccctctttggaagaagaatgagatacgctgagttcagcaaatcaagtttataggcatttccatggtaaagggaattaagagcagccattatgtcgaccttaatgatgtcccagcatgtcttgtaaaattttcctgtaaaaccatcaggcccaggggccttatcagaagggagacaagcaatggtgtccctaacctcctcctctgaaaaaggctgctccaaatcagttagatccatcgcagccctgtgacaattactcaaatcaatagtaaatggcctctgcaaatcagcccccagcaggttatgaaaatactcctcaagaatttgttgcatatcatcatgattggtagccaatcttccatcttcctcaagcttggaaatgaaattctttttctttcgataacatgcatgcgaatgaaagaacttagtgttggcatcaccctcctttagatagtggatccgtgatctcaaccgagcaacagtcctttcaagagacgcgaggctaagacaccgctgcttcaacaagtttagcaaccaaacttccccactggacaaaattctgatatcctgtgccatttccagcctatgcaacacttctctgacaagccccagctgcaaccttacattacccacttctttatgcccccaggactgcaatgtgcgagctaaccttttacgcttcaatgacacatgctccaacggacaggagcccccaactggcaagctccaggacgcacccaccacctccagaaaaccaggaaatttgggccagaaactctcaaagtgaaaccgttttttccccaagcagccctctctgaccttgaggatcaaaggacaatgatctgaagatgtggtagcattactatgaagcgaagcgtctggaaaaagatcttcccaacagctagtgcaaaagacatggtccagcttaacaagagttggggcatctctctggttggaccaagtaaacctccttcccttcaaatgaatctctttcagatccaaggaattaataagcctacggaagtcccccaacatagccctgttaatattggaattgttcttgtcttcctccctgaaaatcagattaaaatctcccccaatgatccatggtcccacacaggtatttctgatttctcttaattcgtgaagaaaggaggatttaagattgtcctggtgaggaccatacactccagtgaaccaccagcaagaactatttttctcttgcaatttaactgaaaccgaaaattgcttgataactgaagccaaagaagaaaaagctccatcgcgccaggataccagtacccctcctctggtaccaatcgcagggctgtaaacaaaattgctgaaaccagaccccaaaattgagagcacatcaaaatctgaaatagaacaaagtttggtttcctgcaggcaaataaccgaaggtctaatatcaaccaccaaagatttaacagaatctctcttcacacgatcattcagccctctcacattccagattaaaaagcagcttgaatccattcaaacaaagatcaaacaccaccagcaaaccagccccaccacacctaaacaggtccattcagcggcaccgtccagccaaacagcgctgccaaagcagcaatatggacgctagagagcccagaaacaaatagcttcgcataattaccggcatcctggacagaaataacttcattatcatcacagaaacccaaatgcatgcagacctgggcagcagcctccgaaccgagttctggaggaaatttggccaccctcctgctccgccttggcataaaattactaggtagaggcttcttccttctctttggaatctgtggagttggcagcaaggcatccactggtttagtgaccaaacactggaactcgcacaagggcgaagaaatcaccatagaattatcaagacccgactgaaccaacggaccatcctgatcatccaaaatagaaggtctcaacctcctggagtagactctaaaaacaggcggcttcaaattccatctagcagaagaagcactgacaacacaactcactgccaaaatcgaatcctccctcaacacagcagccaaatcagcagagggaccatcaggagaataatcaggaaccacaacatcacacaaggccagaacaccaggcgccgccaacatctcaaccgcagcacacgggagggtaggggcatcaactggttctgccaacgaatccgaagagacagacgccgccacagcatcactgttatccatcgacgcatccaaaagccccacatcatcagagggtccaacacgcgtcgacgaggaatgaagacgagggcccagccgcgagtgcaccgaaacccgaggcaatgaggcctgatcacccagtctccgcacccaccgagcccgacgactcggccccggctcatcatcagagggatccgatggaggtggctgcagctgctcctccacaaggacaccctccggcccaataatcttcaccaacacagggaacaccaacgaacgtggactccaaactccgtcttcatcggggaccgctggctccacagcatgaaggtccaacaccttcggcaactccacgggagagcggcaccatgtactcaacctgatgaccgacaagtcctccccgctgatagaatccgggtgtagtccctgaaccaggcaatatggaccaagcaaaacctccgctgtctccagtccccaaaggtgagcagggataccacggagctcgacgtcaatgagggaagacaagacactgcctcccgaagcaaaagcctgcctagtccatctcttaatatgcaacctcaatggaggggcaacgagcgacggtcctccactaaacacctgcccagccagctcctccgaggggaagaggacaataaaagaatctggcgcagcacgacgtaggcggagcgcatcagcatcaaggccaaaccttgaggcgagcgcctctctaacctctgtggcgcaaccagttccttcttgcccaacaacgctgacgatcagggcatggcgaagctccaactcagcacggtcgagcatcctggaccgcccaataaacctcacagggcgaggaccatcctgagccgtgggcgacaagtctcccgaagatagcagcagaggatcaccgccaagaccaccactaggcccggacctgcgccttcgctgcccacggcgggtacgccgcttcccgctgatcgcggcatcggaaccaccaagcgtcgagccatccgccatggcgtggtcggcaccagtgaccgccgccggggcctccatggaaattggccgccacaccagtctgcgcacaggagcggccaagttcgtttgcctgcgcgggcactcgctcacacggtgccccggccgcctgcagaagaagcaccgcaccctgttcgaacaccgcgccgcccgatgatcagcagagaaacagttgaaacatctgccccgcagatcaaccggcacgggtctgggttctggcaggggagggcgacgagccaagcggcggtcgcgacgactctggacagtcttctagccgccaccagccctctccactgctaaccgagaaacagggcgctgagaggacaccagcgcatccctgtaggagcggcgaccctgagacgaggccacacccacggccgccgggacagcacccgcgcccgccgccgccgggatagcacctgcgcccgccgggacagcgtccgccggggcagcacccacgctcgccgcgcccgccgcgcctgctgcgctgtcgtcacgccaccgctgcgccttggaccgaccacaagcagagggccccgccgacgccggggaagaggagaggtgattggccgccgggatcggagtggtctccggcgtggggctggtggaggaaggtgaagaggcgtcgggggtagaggagagggtcaggggataggaacggtcaggcgggaaaggaaggggcgccataacaaacacacccgtagaaacttactatctcgctatgtattgtttagctttgactaggcggtacatggcaattcttgtttgttattctaattattatttattaacctattataataatggagtctggcatgtgctttttatctcttggtttctaagttgcatttgatctgatgataaagcatattcgttgtccaccattgcagaggttagcagtcaattgctggagttgt

SEQ ID NO: 1058 - DNA, 2276 bp, Zea mays
  Intron number 4 from transcript GRMZM2G088309_T01 (locus G RMZM2G088309) derived from phytozome v7.0 (chr-ID 1; pos 2 6578210 to 26580485)
aggtgaagaaacatctttttctttattttttaaaaatttccaaatacatttttttggataattgtttttttaaatacatatggtctcaaatagttacatgtgatctcaccttgcttggagtcaagttcgcagccctctctatatttacaaatctgattttgtaatgtcttctcaaactttgaactaagttcgacaaaatgttgaactaagatggatttgcatccaccgtatatggatactctctgctagctccttagtccttacacactttctccaactcgatgaagtaaccatctagtaacaagctaggcttgtaaatccgtacaatataagcctgagtatttacacagtagcagaagataatgcttaaaaatgtgagacgaacttgctgtgtagatatatatcgaggtctggatccgtcggtcagcagtttacaaattctactcaagtagttggactgtaggagctctgagtgcagtaataacaactagaccgcgtgcaaagttcacacattgtttttgctatctatatatatccgatgcatcattattaggtcagcactaaatctcccttctaaaaaaaactggaacatttaacaaagatcttaattcattagaaaaagggttcactctgggttttattattttgcatcaaaccatgtcattgtttttattgagatgcataagtaattactcgtgtgtcgtagtaaatctatcaattacattgctatttattttcgagatattagtctatagccatgtactcttatccaacattttccaagattttgggatttactccgtaaaaagaaaattgtgtgtgtggatagtgattccatactgcttactagatgtacagatgtatttaaacagaatttttgaaaaatcatttatactcatgccatgcaagcagcaaaagtacatgaatgggatggaagatactaaggccacgtttggttccattagtcatatgactaaagtttaatccatagactaatttttagtccctaccctgtttggttgtagggactaaacatattctaaacacattaaatacaacacataaagaccaaaatgcccctttttttgtttgacaccagttttattggaagagtaattggagtaaatgttgcactttagtcccttttagcacccatgtgagggactagagactaaagccaattagtccctattttagtccgtctatttggtaaaatagagactaaacaggactaaaaaaacagagactaaagattagtctctctaaccaaacagggcctaatttccctcgagtctggaaggaattaataatttaaaacaacaaaagcacactatgtaaccttcatttcatcttttagttttttttaatttacaaaaggatgaaatgaaggtgatacgccggcaatctttttattgtaaacattcatttttggtcttgaatttctatattttcccttcaaagaatctacaaatagtagttttgattattttagcaaacggaaacagtgaaaatacttctgacaaacacaataacatatatagtaaataagaaccgtcctacacatatgatacactcatgatgacaaccattttgaaaagaatggacttgaggacacatttcagctcgatcagttcctatacactccattgctgaaaatgtatctttgcttgtatttttttgatttcacctctttatacaagttgctcaacatgcaattattttctgatttaataaatgtatcgacacaattattaactttctaatttgatggcccctgcattaatgtttcaatttgctattaggcgcgcacacacgttagcttttacctttcactaaccaattagcctaagaatttgtactgtgtgtagcagtgtacaacttttgtactgttggactcgtatttgataatgcttttggtattatttgctggtcaggagccacgcaatttgagagggactaacggccagtgtgtggccttagaaattgcatgggttaaaccaccctacattttgaagcgccaagtcatttttaaagtgaaactattacattattgtgcattcaaggattacacaaaataaaatatatgtacaataaattgttttgtgtgtttcttagtggtcctacatatatagcattttatgaccatatgtcacttctataaagaaaaaaaataagacaagcttaatattaattctttgactagctatatattaccgtttttacattacatgcatgtggcagggaggagattcagcgcatcaaagctgcgaagccag

SEQ ID NO: 1059 - DNA, 998 bp, Zea mays
  Intron number 1 from transcript GRMZM2G079389_T01 (locus G RMZM2G079389) derived from phytozome v7.0 (chr-ID 8; pos 1 72680647 to 172681644)
gcgcgaccgcgtgctgcaggcgtgccacgcctttggtgagtgtggcctcctcgagatccacgccccacgtgaggaatcgcggctgtgctaattgcttccttgtgctgtcgcgtcagacgattttagtcccgcttccttcgagtgttttgatccgtggggcaatgcggatcatgatcatatgttttgcgtgtacggggatcgtggcctgcgccgcgcggtgggttcaggcctctgaggcgaactgctagattggtcagtgtgtttacgacatgtttgctatggtgattgtgtcgttgggagttttttaggtgtcgatttctgcggattttgaggtttttgtgtttattatgatgggatcctgcggcgcttagtcgccgttctggtgatgcatgcgggcttgttcataattcgcgaggcatgttcccaattactacgagtctagcctgactggccttgattttgttgcaatttctggcatattggcatgttttgatcgggttggtaatttctgagtttccgtgcgcctggctgacctgttttgtttttacttgaactagttcagcgagtacactgtgcatcccccgtttttggtatgatgaccgcttgagcagaagggaagtgatgatcaaacgtgaacattaggtgctagctccaatttggatatttgatggaaacactgtgatttactgtataattggtggttggttttagagttcatggtgtcaactgtcaaatgcttgtgccttgaaccacctgggaccagctattgtacttcatgttcccagtaattagtgacattgctgatgtgccaatgcaatgacgatacactgtttcattctcccaatttagttagcttaatgctctgaagattctgtctgctttaacatttacatgattagattttcaaatatatttaactcgtagttatttatgcttatgggtcttcattatgtgcatttgcagccgagaataactacaaaacaaagcatcttgcaaag

SEQ ID NO: 1060 - DNA, 8337 bp, Zea mays
  Intron number 8 from transcript GRMZM2G303631_T04 (locus G RMZM2G303631) derived from phytozome v7.0 (chr-ID 5; pos 3 8981248 to 38989584)
gctacagcaattgtgaacgtaatgtcttttgttctattttcccacattctaactctgaaatatttaaaaatataaccttagtgtcagctatattaacaagttgcattttggaatgaaaagcttgttaaacgaagaggatatcaaatatgatagaatgtgccatttaaatctgatagatggcagctagaggatatttcaattttgcatttagaaattgttttttttgagatttaaaccatcatcaaacaggatatttaaatctgctaaatagtactgagaaaatgttacacccagcctttattactatagcttgttttgctgcaacagaaggttgacaataggtcaattccttgctgtcgaatctactgctgaccttgcacagaagcttgcaagcagttgcagtttaatttccttgcaagagcatgacaacatccagtaggctgaatagcagccctaggacaaaagatttggctgccacaacagtcaaggttcaccagttccagttcacacacaaactagaactacctttgtgtgtgtgtatatatatatagtttatatatttggagccctggtcttccaataactaggtgaagccctgacccaatgctgccatccggttcagctgaaccatctcaagctgacttaggccccgggcgtctataaaagcaccctcagactctagggattagggtttcgggcgtggcagcgaccgcgaccgctcgaggtgcgagcggcatctggatgtcgacgacggcgtcctgcgactcgtggcacggactacgacccgaggcacgatgtcggcgagcagcggccgtgaccggctgaggtgcgaatggcggcgatcgcttgagtcacgagcggcaacggcgaccgcccgcggcgacatctgacgtcgacgacctcctccgatccatcacgtcttgaacttccttcaacgatgaccacctccgatccggtggcatctgagggcatccttcgatccggtggcctcggggccattcaccggcgacgacctcccctatccatgtttatgcctaacatgattgtgttttatgcctactacttactgtttatgcattttattgaggatttgtatgatgataaatatgacgattctcacgtggcttggttttttacggtaaccatctggattcacacacatttgttacggggatgtcagacgtgacatcacactgaccattgtaacaacattgcagatttttacgcataccactatcactattaatgctcaaagttgatgatttttatgctcaaacccgggggtgcccaccaatgtccgcatgcatattttccacgtgcacaatgaaaaaggggaatcccttgatttatggtgttcgtaactgccataaaaaatcaaatcccttaattaactcccctaatcaaatcccgtaatcaactcccctactcaactcccttgatttatggcggccgcatggacgtgggagctgttggttgggagtgaatcaacatttacgccctctcttggggcattgaaattttgatctactttttgatgctctctctcggggacgtgatagagtgcctgaaggcagtcgatgaccgcgcagagatgaggatgatggtcacaggcaagttgtgttgactgaggagtgggcggcccacatgcgtgagcggcaatctgaggaaggctcctttgggttgtccaatcgtagcagcacgaggaagtgctgcgacaaacgctcacaaaagaaggatgtcggcaatgcgtcgtgtctagggatggcaacgagtacatatccgtcgggtagtaccattctatacccgtacccattaaaaaaaattctacccgtcgggttacccatttaaaaaaattctacccgtcgggttacccatatatgctcgcgggtataaaatcttacccatacccatacctgcgcgggtaatttcacccgttgagtaccgatcactcaaaatattaaataaacatacaaaacaagtttaacttcacatataacaaatcatatacataacttggtagctagacaaatgatagctagagaagggttttattttagctaagatgggctctattagatggttatagtggcattgatgcaggtatattttacccatgagtagcctggtatgggtagtaccaacccgtacccgtctacccaacgggtagaggttcttgcccattaacatacccgcgggtagagaaattatcccgtacccgccttcatatcgggtaaaacccgtcgggtatttgggtttcgggtatccattgccatctctagtcgcatctctagtcgcgtcccctcgatatggatacttgttgcgggtgcaggaagatgggggcattgagcctaggattgcaagaatcccaagaaagaaggaaaggagtaggtgcaccatgtaggctgaagacaacaaaccaatgcttctaatggagcaagtgtgtgtgctgaatgatgtggttgaagagttggagtcaagtgcaaagtagagcatctccctcgacgaatctcgggtctaggttcacctcaggagtggtggcggcgacatggagtagaggtggtacctgactggggctagcaaccacataacccgacaacaaggacgcgtttgcgaagctagatgtcagtgtggttggctctgtgaagttcggtgacaacttgtgggtggacatccgtggccgtgacaccatcatcaagtgctagaatgatgagcatcaagcgctgatggatgtgtacaacaacctgaggcttcggtcaacatcgtgcaactggatgagcgtgggtgccaagtcctcatcaacaacaacgacctacacattcgcgaccgctaacgccaccttcttgctaaggtgaagcgatttgagaaccatgctgtatctcaagctagcacaatcgatgtgcttggccatgaggcaaagtgaggaggtgggcacacttgatatgtgcacttcaacttcaatgagtttgggagcctgacatgccaggagatggtgcacaatctctttgtcatcaagcgcgctggcgagcttcgtaataactgcctgacagggaagcagaggaggcccccatttctgaaactgggcaactattgcatcagtgatatccttaagtttgtccacgatgatctatgtgggccaatcactttggctacgcatggaggatggcgctgcatcctactgctggtgggcaaccacaacgacttcatgtggctgcaacttctagcatgcaaggatgtggcagtggcagtggcggtgatcaagggcttcctggcgtaggtgtaagccaagtctaggaagaaaccatgtgtgctcaggaccaatcaaggtagggagttcacttcagtggagtttgtcgagtactattccgagcatggcatcgtgtgccatctcttcacgccgtattcaccgcaacagaacggagttgttgagcggcaactagatgatggttggcatggccaggagcatgttgaaggccaagcggatgatgacagagttctgggtgaggctatttctatggtagtctttatcttcaatcacacgtcgacaaagagtttgaaggagatgacaccatacgaggtttggtacgagaggaagatggacatgtcgttcttgtggatgttcggttgccccacctctccaagctagaggaaaggagcacgccgatgttcctaggctatgaggctgggagcaaggcctaccggctatatgatccgtgcgaaggatgagtacctgtgtcacacaacatcgtctttgccgcgaaggcgacatgggaaagtctaggcacaaggggaaggtgttcataggatgtttgttatcgagcaccttgtcatccatggcggtggcggtggcggcacatgccaggaggagctagggagcgctgcatcgaaggagacaccggcccctggtgggcatgcaaacttgcccacgatgggcgggcaagcagtccccagctgtggcagcacaggctccaccccgatagatcaagggacccctctgttgagcccggtccagttagcgtctttgccaagctgacttgcacccccatatcaacacctcccaccaaggcgaggaagtctgcctccgcaccatggagaatcttattggcaacgctgcaactccagggatggcgagcagagtgctcggcgacatgagctgcagacatagaaatagaaggtggtggcattatcaatgtgtgaggcagagtacattgcttggctttagcagcatgccaaggagtttggctgcttcggctgctgtgcgagctcaccagaattgatgctcacacaccagcactgatggtggacaaccaaccctgcaatctttcatcgccaagaaccatgttctccacaactggagtatggacatcaagtatcatcctcgagttcgtcgagattggttggcagctcgcagacatcctcaccaaacctcttgggcgtcttctgttcttggagcctaggagcaaaattggaatggtggatctcaggctcaaggagtagcagcaggattaggggaaggattgcaaaataatctgcctcttgctttgcttgttttgctgtgacagaaggttgacaataggtgaactccttgctgtctaatgactctaatctacatctggccttggcaaatgactcctcaaaatccgcgtatgctgctatctgctatgttttgtggaagacttgggcccctggcaaatgtcggttctttctatggctgatggctcataacaaatgttggacaacagataggttggctaaaagaggcttgactcaatcgcttctttgcccactttgtgaccaacaagatgaatcgataaatcacttgctggtgggctgctcctttgcacgtcttttctggttcgaattgttcaagccttttggactgcagggcttcattccaggacaggatattgacgattttgatctctggtggtgttccaatagtgctcggcttgatgggctgagtaagaagggctttgactctttggtcgctctgggtgcttggatgttgtggaagcatagaaatggtgtggtcttcaatggttcctccccgagcctggtggtggccgttcggctggccagggaggaagctattatgtggtccttggatggagctaagggggtttccttcctccatgatcaaagccgtgtgggatagtttctctgatgttattattgttggggtgtctgccagctgacaggcactctggcttggctgggtggggttttttcttgtgtgtgtgtgtgtgtgggtgtcttctctttgtaatgttagttctggggtctttccccttttcttcttagtacaatgatacacagttctcctgtgtgttcgacaaaaaaacatctggccttgctgtgacagaaagtctggggaagggataaagcaaggcaagcctccccctaaatgtggagaggctgcttcgaacccgtgacttggaagcaattgcagtgtaatttcataagagctaacaacttccagtaggctgaatagcagcactaggacactggttccgcttcacacacagactggaactgtctttgtgtatatatatgttgatatgataatgaaaggaagcagtttaattcaagcagcatttgctggtgctcgtgtctgtgtgttctgtcattcggtgctcacctgtgcagtgctgcgacagctgccaacagctagatgtctggatgaaaaagagtgtggacactggacttggagagaatcagtgcaatgcacaagttatccatttaaaatagaacaccttgtaaaaaatttgatcaaagagatgacagatgaaaataactaaggaagatattactctagaaaagatggaaactgatactcaactcaactaatcaagaattcttcaattgtaaagatcagttgtggcagctcaataacataaccccattttctttctatgtatgtaaatatatgtaaggagaagcaacaagaatgaatgaactagcagagctgttttcacttgaaagtgtgttcagcttgtcaccttcattttcttcagtgtgtttagaatccagatattctgcacaaatctgcatggttaagtccattctcgaaagatgcacttataaacaagtcaaatgagatatagtaaacactggtagtaaaacttttagtgcactatggatcatggttatcaaagcggtaaagcgaggtgtggtgactgactactgccttacacttaagcgactaaggcatgaggcgacaccttaacagcccaaggaaaacttaaaaaacagcttagagcagtagatagtaagaaaaacgaaaaggaaaaaaggaaaagaaaggaggaggagcaagtagttgtctggctcagcccaccaaactattcatctctcaaactcccaaatgatcaaatcccaatcctctctagtgccgctccaccactttcgttctccaatctccactgtcattccgtctccacccctctctgtctcttgcttccctctctcttccgaatgtgctgctttgctaggaggaacagaagggctttgtaagctgcagctcgatggaggacaaaggaggtgggatgctgcaggctagcgcctattgggggaagatggccacgacccgcgcaggtggccacacgactcaatggcgagcgaccaacaacttttctcgttggcgtgggagaaaatgttggtgcgggcaagctgcgatttatgtttctcctcctgctctcccgctcattggtgtgagaatctatcgcggacctgctctctctctctctctcccactcgctatatttcgcttgcgcgttccttctcttagtttttcctgccgtttcctattcctcttttcccgttgcctagaacagaggcttccctgtatggcgtctgtcattagcgatttaatttgaatcagatgccaaagcgacattgccgcaagcccgtaaggcgtatgccatacatatataagacgtgcctgctaggggcttgtttggtatagtttttttcctgaagagcttttctaagaatctggatttgtagataatataactgtcacgagaatctgaatatcatgaggcctactgcggagaaagatggagtccatagggtttaggatctaggaagcaacaaattcctcccattgcgacgactcggcagattatgcgttcatgttgatttgagcgattttcacagaagcgattctcacaaaagcggactgagaagcaaagcgtttagctgacagaatcggattttgacagccataatctgattttaagttgaaacaagcaccttctatgtcattgcgcctgcagcgctttggtgcttaaatgacaccaaatcaatgcttttggtaacactgctatggatttttatcgaacgcgcaggagaactgcgcatcttatatattaagaaaaaggagatagaggtctaaaatagacccagtacaagctgccaaaaaaaatagaaaaaaatagaaaatagatcaagacagaaaaaagaagaaaaaaaagggggtgggtatccaaacaacccccagccccaccagcacataaggccacaatctcctaagatctcttgcccctgccaagccccaccgaacagcatcctcatgaatatgctgcatgatgatgctgatgttgggggatgcaccatcaaacacacattcatttctatgcttccatagccaccaagccaccagaatcactaaggaattaaatcctcttttttggttttttggcacctgacactcagcttctctccaccagtcttggaaggtcgttgttgccaatcctggagtcaggcgatgcagccctaccttgtgcaaagtctgccaccaagtgtctctggcaaacacacaagccactaagatatgctgaactgtttcctcctgctggtcacaaagggggcaccttacaggatgctcaagacctcgtctgcttaatctatccgctgtccagcaacgatttagagaagccaaccaaatgaagaatttacaccttggggggcccaacttatccaaattctagtagccggctcaaaagagactgaaccagccataaaacgatcatatgccgatttagtggaataatctccagatacactgctatggattaagtctgtaaaatattttatttgttttgtagtagtgatctattgagcattgccaatttttatcattgttttggagttgaaattatgttgtagttttgtaaacttgcacaccttgatatgaatttaccttctttaaaatgtggaatatgcatccttttttttgccacacgtcaaaacattcacaatttgtttaaacaatttatgtaaggtaataaagaggtttataatagtcatctatgttattgcagctgctggaccaggaaa

SEQ ID NO: 1061 - DNA, 10964 bp, Zea mays
  Intron number 1 from transcript GRMZM2G126096_T01 (locus G RMZM2G126096) derived from phytozome v7.0 (chr-ID 1; pos 1 53931616 to 153942579 reverse strand)
gaagagatccacacggccctcacggaattccgaaggtaattttgtttagttgctcctctctgttcgtcacttcgtgaagtagtgggatctaggtttgggaaggttttctcctccatggccatgatgactcatgagctatgtccccatccttcctgcctcccatacctccaccatctgtcgcctcctcttctctgtcgtctgactcgtcctcgccatcgcggcgcctcctcctttgccttcactgtctccactagccgcaaccgccatcacctgctacaacctccgcctactgttgccttccactatggccgcgtgaatgactcgttctgagccttcagcggcctcctcgctcggcaaattctccgctggcgacaaggagaaggtgctcgctgccgttggcatacacacatcaacttctctgcgctacctgcttcctacccaaccccgaacctccataagctttggatctgggtagaatcatgatgtagattgcggatgctcatgtcacttatatactagaaacttctagctattttagtatctagctgctagcctactaccatggtgtgatcagttaagatgtttcttgtgtgtctactgttgggaccatgcttcgtggccgaaggtcctgcagaaagaaatagcttcggctgaagctgctcgtatgtgacgccgaaggcaccattcatgaagcttcggtattacagcatatccgaagatgaagggtcgaaccgacttaaagatagaatgaccttttagtccataagggtctgagtcattgttgtaaacttttatgaagggcatgattgtaattcctcacaggctgtatcctgtgcctataaatagtgaacaatattcctttattgttcacgcattcctgtaattgctaacgcatcactcgagaattattgtttgtcaaggcaaaggtataaatgtacctaaacgttgtattcaaatatcttaaattcatataataagatatgtgaatgatgtcatttattttcaatgtatttatctttaatgttccatgttttactttactttgtattatccttataagtttaattatgaaggtgaaaccttcgtaatattatgttcgtgaccttcgtccgaagttcattaaatccttgtggagataatgcttcggcggacgaagggcattgatatttaacattttatgttgccttgttcttaattcatagcatttgagaacaagtccccaacattggcgcccacctccggtgaactcacttccacttttttgagctaatggctttgttcaacaatcaagctggagctgcttcggctctgaagctggtactcccgataacaggcggttcatgctcagagctagccaacaagaagcagaagaaggaggcacagagaagggtacaacatgtcggggtgcagggacccttcatcaagtcaagatggtctcacattccaattaccttctcccaagaggatcttcaactcaaggattacccacacaacgatgctatggttatctcttgtgtgatcaaaggatttctggtccataatgttttggttgatacaggcagcgcagctgatatcatatttgctaaggccttcagacagatgcaagagcccgaagacaaaattcatgatgccacacatcttctttgtggcttcggaggaaggcagattgtagcactcggcaaaatcaaaatgccagtgaccttcggatttatcaacaacacaaggactgaacaagttgtgtttgatattgttgacatggaatacccttacaatgcaatcattggtcgtggtactctcaatgccttcgaagcaattcttcatccagcttatctttgcatgaagataccttcggaccaagggcccattgctattcatggaagtcaggaagctgccagaagggccgaaggaaattggacagactcaaaagcaatccaaaatatagatggagctgaagcttgtgagcaatacaagttcaaaagggaaaaagctgcttcggctgatcagccgaagcccatgctcttatgtgaggacatagcagagcagaaggtgctattgggatctcaactgtccgaagaacaggagaaaaccttgataaggtttttgttcaacaataaagatgtttttgcttggtcagctaatgatctttgtggagttaacagggatgttattgagcactcgctcaatgttgatccatccttcagacccagaaagcagaggcttcggaagatgtctgatgacaaggccaaaggtgctcggaatgaagtgaaaagactcctcagtgccggagttaccagagaggtaaaatacccagaatggttggctaacactgttatggtaaagaaggccaatggtaaatggagaatgtgtatcgattttactgatctcaataaggcctgtccgaaggacgagtttccattgccaaggatagattccctagtttgatgcagcagcttcatcagagcttatgagtttgctggattgttattcaggctatcaccaaatttggatgaagaaggaggatgaaccgaaaaccagcttcataacccctagtggaacatattgttaccttcggatgcctgaggggcttaagaatgctggaggaagcttcagcagaatgacagcgaaggttcttcattcccagataggcagaaatgtgctaacttatgttgatgatatcattgtaaaaagcacgaagcaagataatcacattgctgatctgcaggagaccttcgctaattttagacaggctggtttaaagttgaacccagaaaaatgtgtcttcagagtgaagaaagggaaatttcttggctgtctagtctcaacaaaaagggattgaagctaatccaaacaaaatcgaagctatccttcgaatggagccaccaagtacaaagaagggggctcaaagattgacaggaagactggcatctctcaacagatttatatctagatcagcagagagaaacttaccatttttcgaagtactgaaatcagctgaagtttttcaatggggaccagttcagcagaaagcctttcgaagagctgaagcaatatttgatagacctaacaacactaactccaccaacgccagggggctccttctgttattatatgtggcagcttcgcactcagcggtaagtgcaagcactcgtcccgggagaagcttgaaggccaagttcaaaagcaagcccctatatactttcgtatcagaagttcttagtctatcaaagaaaattatacggaattggagaaggtactgtatgctgttttgatggcctccaggaagcttcgacattattttcaagcttacaatataattgttccttcttcacaaccattgaaggacatcatgagaaatcgagaagctactggaaggattggaaaatgggctacagagctcaatgaattttgtattgattatgtgcataggtcttcgattcaatcccaagcgttggcagacttcattgctgactggacgccaggggctcaagaggaagaaacgaataaagatgccgaagtatggacagtgttttgcgatgggtcttggggaaccttcggagcaggagcagctgctgtgttggtttcaccttacaaagttaaaacttgttatgcgacaagacttgatttcagttgcacaaacaatattgctgagtacgaagctctgctcttgggtcttcggaagttaaaggcaatgggaatcagaagggccattcttaaaactgattcccaagttatttctggtcatattgacaaaagctacaaagcaagagatccgaagcttgaaaaatatttagatacagtccgaaggattgaggcttccttcgaaggtttctctgttaaaaatattcctcgtggagaaaatgaatatgctgatctattagccaagtcagcagcacaggggctgcccttaccttcgaaagtatttttcgaaacaataaaagcaccttcggtcgagcttcttgaaagagcagtcctcaacatatcccctgtttatagtgaagattggagaactgagatcatctctttccttcagggcaatcttctttcagatgacgaagcttataacaggaggatagaagcaagagctcgaccatatgtcataatagaaggggaattatacaagcggggggtatgttccccgttactcaagtgtttatccagagccgaaggcatagaattgatgaaggaaatacatgcaggcctgtgtggatcccacattggatctaggcctttgcttggaaaagtttttcatcaaggattttattggccaaaggcagcttcggatgcagcggatttagttcaaaagtgtgaaggttgtcagaaatgtgcaagagatcaaaaacaaccttcgtctttaactcaattaatacaacccacttggccgttgcaaaggtggggccttgatttgctaggtccattaccaccagcacaggggaacttaagatatgttgtagtggcagtggaatatttttctaagtggattgaggcaaagcctttagccacaataacttcggttactattcaaaagtttttctggcaaaatattgtttgtcgcttcggagtgccgaaggccattactgtggataatgggacacagtttgattctgaagctttcagagaattttgcgatcaaattggcacgaagatccattttgcatcagttcgacatccggagtcaaacagacttgttgaaagagctaatgggatcataatgacagggataatgaagctaatcttcaatcagcctaggggaaagtggccagaagaattaatcaaagtggtgtggagccataacacaacaatgtcaagatcaacaggttttacgccattcaaactattgtttggtgacgaagcaataaccccggaagaagccaaagcaggatcaataagaacagtagcttcggcagaaggcgaagaagcagttgatcactctgtggaaaaagatgctatagaagggatcaggcttcaagctgtggaaaacatcaacaaatatcaagctgaaacaataaaatggcgtgacagaaaggttaggctgaagaacattgagccaggacacttggtgcttcgaagaatagccaaccctgagacagtaggcaaattgcagctgaagtgggaaggaccttttttggtagcatcttcgtcaagacccggttcctacagattgaaggatatggatggcaacgacattcctagatcatggaatgcggatgagcttcggcgatattatgtttagcttaatgtaatttcctttttctattcttttttgtggcacccttttcctttccaaagggggagaaaggtttttaatggggccacaacatgtaattttccttattttaattctataagagtgatatcccccaaaaaatgtaaatgtaaatgcaaaggaaaaagaaaagaaaacagggagaatctcaaaagtcgttcctaagggaatgcagagcttacagcgaaaaataaacgctgattccgccgaaagtaaaaggcgaagaagctcctaagggaggcttacagcgaaaaataaacgctgattccgctgaaagtaaaaggcgaagaagctcctaagggagtcttacagcgaaaagtcaacgctgatacaccaaaaagtaaacggtgaagccgaaaagtaaacgaccaaaagatttgaatcattcccaaggggatgaagggctatgattatggtttttgaatatgtgtttcgatattcagttgcacgatacattacatcatgtcatttgcattcataaacattcatttagacatatatagaatcttcatcataccacacaaaaaagacagatgcttcgacaatgaggaaaaatttcgaagaaagagattttttttcatgcttcgttgtgtacgaaaagaagggaatgtgtttttcgcctttggctcaaaaagagaagtttcgtccacaacaaagcagattgtacacggataaaggagacaaaatatattacaaggtatgtacaaatttacataggttttttccatagttatattacaaagatcccttcagaattttttgtaggaaagtctattatagcaactatcaagcttcaggccgtcatacttcagcttcgtcatacttcagcttcgtcatacttcagctgcgtcatcctgcacatattaaagagcagaataagaaaggtgcaaatttcaaggagaaggtaaaagtaacaaatataagtttcttaccggcttaaggtgacttcgagcttcgtcaccagccatccttcgcccgccatttacccaaatctgggtcataaatctatttccgatgcttcgggctaggctcgagatatcaatcaagtctgctgctgacaagctgaagtttggtctgttcacaattttttcgtgcgtacaaccagccttcagaaaagcggcagttgtgcctcgagaagctaccagggcgcagaaatcggcatgcccaccaataacttcgtcaagagcatcaacctcgccttcaatatgttccaaggtgctgggcaggttttcggctgaaggtgaaaatttttcagaactggctccgatagagtgaaatacgtccttcagccgctgcacgcatcggctgccgaaatttaggcatttttcttggagatccttcaatgatttttgcatatttgaatttttctcgacctcagtcttgagacttgcttcaagcttctccttttcttgctcatatttttctgactttttgagtagttcattctttaaactgtcattttcggcttggacctcagtcaaggagccttccatagactgaataataaagtctttcttctctaaagcaccttcgtgttctttagccataatttcaaaatcttgaatggcgaagtccttcttcttcagaacagattcgtaattttcatctttttcttctaaatctttgatgatagctttgttcttctcctcttcaagatcttgttgcatttttagcactttacttaataatatactctgccaaaacaaccttcgtcagaaaaagacataaaaaataataataatatttttaccttaaaattcgcatagagcaagctgccggcgacatgatgtcgctggtacctgcagaggtctgcttctatcttcggcaggccaacgcttttggagagggttctaacaattttggcctcggtgcgattccaaagacatcttagcttcccttcgttgaccccaccaaatagcatagcccctgatttatatccgcaagatatggcatattttttcaattcttctttttcggcgtctgttaattcttgtccaagcaaatcttgaaagttaaaatctccttcctccgaaatttcatcaatctgctctttccccttttcagttgccgtgttcaccgcagccacaacagcttcttcctcagccattttcagaagtatatcgtcaataacctcaagtgtggtttccaggttcgaatcttcggtggtcccggcttcggctccggtagcttcggctccagcagttgcaatttcagtggtttcagccctggtagcttcggctgcggcggcttcggcttcggcggtctcggcaataacaatttttgacgccgataccggtggcggcgtctgatgaatcacatctgtcacttgaataattctgcgttttttcagctttgcaggactttctgctgccgaagcttttttgtccttctaaaaaaactttgtcagtttcggtgccagcggacttagcttgaaaggcaaagattcagtcattaccttcaaaatttcttctacttcagcagcagaaggtgtcgcaggaacttcctcatctcggaccaatctctctggttctggagatgcaggctttggagatgcaggctttggagatgcagctttcctttttcttggagcaactaccttcggttcaaacttttctttcttcttttttggttgatcttcgtcgtctttaattaaagtgctagctactcttttccttttctgcccttcggcacccttgtctagccgctcgtagtcagggtattcaaagcctatagcatcaagcactctgtttagccttcgtttcggccgggtgtcgaaggctgctgtcatcaattgatcctcttttttagaataattcccaagaatttcagtactcattacttcgattgttttgagccattcttggcaaggtgctttaaaatatttcttgaatttatagtggtagggcaagcagacaagctccccctccttcttttctctttcgagcttcggcatagcccattccttcgtagttggaaatatcttgaaagccaaaaattcctgcactaaatctctagtgccaatgtgctctgcaataatcctgaatttagccaacgcgatttgcgttggaccttctggtgtcatactgcattggggtctggtctctccgaagatcagttcaagctgactctgtactagcttctctttgtcatcgtcaacttttatgtagaaccattccgatttccagcctaccggccacttgcttcggtagctgatcacaagaaattttgtagtcttccgataggcaaaattgtaacaaccaaaattttcatgtaacccatcctttctggccttagtttggtaatgtagctcgtgtacccggcagaaaccttcggcaaatggctccaccccctggcttcggagagcccaaatataaacactaagcctaacaatagcattaggagttagttgatgaagatagatcccaaacttctttagtacatcgacaatcatcctattcaaaggaaatctcaaaccagctttgaggaaactcttgaaaatcactatttcatctttctgtggcttcggggtagtttcttctccaccgaagcgaatcagctttttctcatcttcgctaaagtagcccgactttatcatcttcggaaaatcagctttggagatggttgactttccgaagtctaggtggctaggcttgctcggtactgcgatactgtgatcaccttcagaatcagtctcttcaatatctgcttgttctgcttcagcagcagggttgtcttccgatgtcaccaatccagatcgcttcattgcttccgagataggaacagtttccgcagctttggcttcatctccttcgcgctcaactctagcagtagagcgcactctggccatttgattttgaatttcttgaaaatttcttgaaaattaataacctttcttccgaagctcttcttctgacgaaacaggcaccaaactggagcttcgtttgaatgcgaaagtcaagcttcggctatggttaaaatttttggcagcaaaacagtgcaatagcaatgaatgctgtggtaacttcacacctacctgtctgtttatatagtgctgcaggtaagaaggtgaatcgtcaggatttttacactaggcaaacagttgctcgcacccactgcatggtgggccgcaaaaaccaaaatagtgaacctgcatggtgggaccgctacgcgctcgaaaactgtatcgtttctcgacaacgagctcagggaaggtgtttttcggaccttcggcttcctgaagcctaagagatttttttcacggatcaagctcgttacgaaaaacgatctagcaccgcgaaggggctactgttgggaccatgcttcgtcgccgaaggtcctgcagaaagaaacagcttcgactaaagctgctcgtatgtgacgccgaaggcaccattcatgaagcttcagtattacagcatatccgaagatgaagggtcgaaccgacttaaagatagaatgaccttttagtccataagggtctgagtcattgttgtaaacttttatgaagggcatgattgtaattcctcacaggctgtgtcctgtgcctataaatagtgaacaatattcctttattgttcacgcattcctgtaattgctaacgcttcactcggaaattattgtttgtcaaggcaaaggtataaatgtacctaaacgttgtattcaaatatcttaaattcatataataagatatgtgaatgatgtcatttattttcaatgtatttatctttaatgttccatgttttactttactttgtattatccttataagtttaattacgaaggtgaaaccttcgtaatattatgttcgtgaccttcgtccgaagttcattaaatccttgtggagataatgcttcggcggacgaagggcattgatatttaacattttatgttgccttgttcttaattcatagcatttgagaacaagtccccaacatctactattccctgcaattcctggtaactagtaaatggcgcgccctttgcgcacgtgagaaaaaacggtaatataagtcataacaatattatgttggtttgaggttgtacatgcacatttcataatctaaatgataatttcatattaagtaaaagttcattttgtactggttgcagatttaaagtgttatcactattaaatttcaatcattatgaaaactgccttgcaaactgaaagatcgtagccttaaggcagcacatttaaaaatactattgaattttctgagtaatatttcagtagtaccgtgagtaatgaaccaatgataattcaagacattctaagaccataagttaaagcatgtttttgagtaatatttcagtagtaccgtgagtaatgaactaatgataattaaagacattctaagaccataagttaaagacatttaataatattttctggttgcttagatctcttggctatatgcgccaattgcaaatgctcactatttcagaatacaatttttcaattagacatagctagatcgattttattcattgtcaaaccagacatgatgtttttttaacattgggtggagaactttatccatctatatataacgttttggaccaagcaagaaattgacacaagatatctagtgttgaatataattgatgcattacaatttcttctttattgtgttcgatacctttttcatttattcatttacattttaaacgtacagaagaccctcgtattgaatacgagaaa

SEQ ID NO: 1062 - DNA, 20064 bp, Zea mays
  Intron number 7 from transcript GRMZM2G141185_T02 (locus G RMZM2G141185) derived from phytozome v7.0 (chr-ID 3; pos 1 75353086 to 175373149)
tgttttctactattggttcatactgttattttcaggtaagctacttttctatgagttatttcttccttagtcaccctgagaagtcgaatattgatccactctattaaatattgatttaaaaactcgacttgcacgtgcattgtattaagaataccttctcacacatgtcgagaaaactcccgctccacccatacatagcggcattatggtccatgtgagaactgttgaagtgtataagtagattggctaccttctttcatcagcttaagcttttgagttgaactggttaatgtgttcactctaacatggtatcaaagccagaggtctcaagttcaaatcctgtcagaggctttatttgtgcctccactcatttatttacatgtttgtgtctttctctctagctgcacatgagtgggggtgttgaagtgtataagtggattgtctaccttctctcatcggtttaagcttttgggttgaactggttagtgcgtccactctaacaagaacgaccacgatcggggccgaaccttagacctgtgctttagcgtgggacaaatgaggagatttttttaaccctagcctcccccactaagagtcaaactcaggacctgagaagtgctattcataccacctaaccaactcagctagaggtcctttcgcttaaatattgatttaagacaatcatgcacttgctttgttagtcattcttgttaggttgttatgtgacgggtctagagcccggcccaagaggctcatttgggttaggatatgtaacctatgttctgcattgcatacaatcacaatctctcctttcatggtatcctgagcctcttcttggagccttgtaaccgctgacgccaccatggtcggcatgcttccctcctccattgtcgtcgcctccccatcccctcttctgttggcacactgctaagggccgctatcgtgggagtcgtgggtgtgcgcacacgggtttaggcacagtcgtcgccgcgagcataggtgtgtgcgagcggggctgaggtgcacgctgctgctcccatgggcacagatgtcgtcgaggcgtgcgtcgccgctatcgaagacgacaccctagccagtcccgtcgcgaatgcgggcacagctggcctaggcgcaacttctttccccgtactcccgttgtatctcccttcttccgttcttctctggtgcgatggtgcccttcccagtgccgctgtgggccactatcccctcgacgatgttgttgctgctagtgtcgccgccaagtttgtcgttgccattgcttgggagcatgagcgggctacttctctcgctttggagcaagagtgtgccaccaccgatgttcttgctcaccagcttgcggaggccgatcaaaagcttgagggtgttgtggtctctgactccttccccgaatttaatgatattgaggttttctatgtaagtagagggactctaactctcatcaagaggatgacactatgagttggggtaatttttctgtttattttctcaaacactacacaatgccatacccttagaggggttggggacacatatttatagccctaggggctgcactaccacaccttctcacacacactacacaacaggattgtcctctagatgctaaagagactacagaggacagtcaaaagcgactattgtcctctagatgctaaagggcctacagaggacagtcaaaaagcgtctgctgtcctctagatgctaaagagactacagaggacagtcaagctgtcctctagatgctaaaggactacaaaggacagtcaaaagcaggctgtcctctagatgctcaagacttattccatcattctccccctaagtcttgggcgtcgtcttgtgagaaagttgggtcatcccggacctggagcaaagctcaacaaacttgattttttccaaggggcttggtgagcaggtctgcaagctgatccttggtgttgatgtagcgcgccttgatgctcccttctgccaagcaatcttggatgaagtggtatctcagccggatgtgcttgctccgttcatggaacacggggttcttggccaatgccagagcggactgactgtccaccctgagttccaccgctccagtgtctctcccgaggagatcaccgagcagtcgagccagccagagagcctgagtcgaagcagtggacgccgctatgtactcggcctcgcagctggacatggccaccacctgctgcttgaccgactgccagctaatgaggcacttgccgaggaagaagaggatcccgcttgtgctcttgctagtgtcgatgtcgccggcgtggtcgctgtcgctgtacccgacaaggtgtgcctccccagggcacctcgggtagtagagaccgtggtcgagagtccccgcaacatagcggatgatcctcttcacagcctgctcatgctctgttgtcggtcgctgcaagaaccgactaacgtagccgacggagtatgccaagtcaggccgtgtgtggacgaggtagcgaaggctccccacaagacgccggtactgagtagcatccacctcctctgtcgtgctgtcgcgactcagcttcagcctctcctccatcggagtgggagctgggttgcagtcggtgagcccagccagctcaacaatgcgcttggcgtaggcggtctggcgaagtgtgatcccggagtctccctggtgcacctcaatccccaggtagaaggagagatgccccaggtcactcatttggaaggtggccttcatctcttccttgaacgctgccacctctacatccttggcgccggtgatcaccaagtcgtcgacgtagacacccaccagcagggcacttcctccattgccccgccgatagatggccgcctcgtgcgggcttggcgtgaaacccattcctttgagcgtggaatccagcttggcattccacgccctcggtgcctgtcgcaggccatagagagccttgcgtaggcgcaacaccttgccctccttgccagggatcgcaaaacctggcggctggtgtacatagacctcctcctttaagtcgccgttaagaaacgccgacttgacatccatgtgatgaacatgccagcccttcagggctgccagcgcaaggagtcgcacgaattccatccgtgctacaggggcgaaggcatcgtcgaagtcgatcccctcctgttgcaagaaaccgcgtgccaccaagcgagccttatgcttgacgatggcgccggcttcatccctcttcagtttgaacacccacttaagggtgatcgcgcgatgaccatgagggagatcagcgagctcccaagtgcggttcgtctcaaccgcgtccatctctgactgcatcgcggcacgccaagccgcatgtttctcggcctccgcgaaagaccgaggctcaccatcgtcgcatgcaagatgcaactctcctgccagaatgcgagatgcagggcctggcaccgacgggtcgatgagaaggccctccacccttcgataccgcaacggctcaccgtcgtagcacgcgtcgacgcgctcctcgtcgcgggacagaggggtcacgagctccaccgggtcgtgctcgacacgagctggtgtcagagaggacgttcccggagagggtaccgtcggtgctggagtacgtggtggcgaagagctcgctgtagccggagtcgtggctggagtgcgtggtggtgaagagctcggtgtagcaggagctggagagtgtggcgctggagtcggtggagacttgggggctggggtagacctactcggagaagagttgcctactcccccagctccctcaaagtggacgtactcgatggtgaagtcgtacgtcggagtcgtgctgtcgtccaccgccttgtcccacgcccatcctcgcccttcgtcgaacactacgtcgcgcgccgtgcgcacacgctgtgttcttgggtcaaggatgcggtaggccttcgagccctccgcgtagccaatgaacacccctggggtgctcctatcgtcgagcttgctgatgtggccaagctctttggtgaacgcgaggcagccgaagacccgtaggtgagagaccgccggcttgcgcccatgccaagcctcgtacagtgtcatcccgttgagagccttggtgggcgagcggttgaggatgtaaaccgctatcaccaccgcctctccccagaagacagctgacattcctctctgcttgaggagagcccgagccatccccacaaccgtctggttgcgccgctcgacgacgccgttctgctgcgggctgtatggcgcggagtagtggcgctgaacgccctcatccgcacagtacgacgcaaactcagccgccgtgaattcgccgccgttgtcggtgcgcagcacgcgcagcttgcggccgcactccgcctccgcagcgacctgcacacgcctgatggcgttcgcagcctctcccttgctgccaaggatcatcacccacatgtagcgggagagatcgtcgacgagcagcaagaagtagcgtcgtcctcctggtgtggctggtgtcaccgggccacacaagtccccatgcacgagctcgagcctctccttggctcggaagctcgactgctggggaaaggggagccgtctctgctttgtcaacacgcagacatcgcagaattgctccacatggtcaaggcacggcaggcctcgtaccatctccttggcactgagccgcttcagggcctcgaagttaaggtgcccgaagcgctcgtgccactgccatgccccgtcgtctcgacgagcagcaaggcagcaaggttgtgccaccttgacattgaggatgtatagccgatttggactcctgcgtaccttggcaagaaggcgacgagagggatcccagatcctcatgactccgtgctcgacctccacgcgcgaaccgttctcatccagctgtcccaagctgatgatagagttcctcaacgcggggatgtagtagactccggtgagcagcctgtgctcaccagacgcggcggtgaagacgactgagccggcgcccttgatctctacgccggaggcatccccaaacttgacggagcctcggacgctagagtcaagctcggtgaagaactcccgtcggccggtcatgtgatgagtggcgccggtgtcgaggcaccatccttcgatcatgtccttgttggagccgtcgccgaggaaagcgcgtgctttcgactcatcaaggtggaggagtgccgctgcggccggtcccgctggagatggctcgatgcttgcatgtgccaggagcagggcctcctcctccgcctccgcctgtgcgacgttggcctgaccacgtcgtggctgccgacagtccctggcccagtggccaagcttgccgcagttgtgacagccgtcgtctcgtgccggcttcttgttgccgacggcgccgccttgggcacctccacgtgcaccaccctcagcatgtcctcgcgccccggcctgggcgcctccacgcgccttgcgcggcttgccgcgtttgcggcctcgtgtcgaggaggactcccccttcttcttgtcatcctggcaggcctcccactgctcccgagtgagatgtagcttcccgccgatagtgataggcctagagagagcctgtggttcgtcgccgtcgaccaccttgaggcgaccaatcgcctcttcgatcgtcatcgtggagaggtctagcagagactcgatcgagcgagcaatctgcctgtacttctcggggatgcaacagaagagcttctcaacagctctctcctcatcgtaggtgtcgtcgccgaactgcaccatcttctgcaacagagtgttgaggcggagagcaaagtcatcaacatcctcacctggcttgaaggccaggttctcccactccttgcgaagtgcctgtagtgtggtcttgcgggcacgatcgctgccgatgcgggtcgcagcgatggcgtcccaggcctccttggcagtccgcttttgggaaagcgaaaactgcatctcgggcgggactgcagcaatgagggcatccagcgcccgccgatcctcgtggtagtcgacgttgtcgtaacgaactgcttcccacatgtggcgaacctggagccgtaccctcatcaccgcggcccactcgacgtagttggtcttggtgagggtaggccacccaccgccgggaccgatgtccctgacaatggcctgggccatgcggcgaccatggtaccgatccggggagggagaaccgcgccgcctgtagaggccgcgatctccgtcgactcggtcgccgccgccgggagcaccgccggcgcgtctacgcccgtctgggctgccgccgcgtgcgcccccgcctggagcgccgtcagcgcgtcagcgcctatccgggctgccaccacgcgcgcccccatggggatgcgcggctgcccactgtgccgcctgctctcgcgctgcttccctcgccagcctgagctcttcgtcggtgttgtcgtcgacagaagcagagctgccagctctactgccgcgcagaacctcgagctctgttgtcaccgcacgtgcagcatccgccgcctccgctgcttctacttccgctctcgccgctgccagttccgccgccgccaaccgtgctgccctcgccgctgtcgctgcagccgctgctgctgctcgctcgcgttcttgtgccgcggcgacctcggcctcctgctggcgccgcgcactcgaagtggccgagcgtagggacatggtgggctagtgaggggtcgctgcgtgtggaagaggctgtctcagacgaaaggctgctcgtctgagcaggggaggaaggaacagttggagctcttgctgccgactgagtgtggggagaggcgcgagaaggagatgagcacgagatgtttagggtgcaggatagtttggctctgataccaattgtaagtagagggactctaactctcatcaagaggatgacactatgagttggggtaatttttctgtttattttctcaaacactacacaatgccatacccttagaggggttggggacacatatttatagccctaggggctgcactaccacaccttctcacacacactacacaacaggattgtcctctagatgctaaagagactacagaggacagtcaaaagcgactattgtcctctagatgctaaagcgactatagaggacagtcaaaaagcgactgctgtcctctagatgctaaagagactacagaggacagtcaagctgtcctctagatgctaaaggactacagaggacagtcaaaagcaggctgtcctctagatgctcaagacttattccatcattctaggcatacaaagtagttgtcatcgctaacctacatgttaaggcggctggtgtccaaaacatatggttgttggttctcgtcctcctcgacccgacttccacttacgccctctggcgtgacctcgtcctcaccctgcaacgctacaccctcacaaccgtcttggtgctggatggacaacatcatcctttcctagatccttggcaccatcatcgtcgagttgcaagacatcgtccacaagcccgcggacattgctcgttaggcctaggttgccattgaggagcactccatcggcagtcgtgaggcccacgccctccacctcgacgtagccttctgtaactttatccacggggacatctccatcaccgagtactattgtcacctaaagggcatggcggactccctgtgacctcagcgagcccatttcagatcgtaccctcatcttaatctccttcaaggcctcaatgagcatgacgatcatctatggggctgattactcagttcaagccgtttccctccttccacactgtcaacaatgatctcagcctcgagttcacgaaggaggcacaggtcccctttaacaccaccacaacaccttagaactccagctcttgtgggaagcctcaccacaccactccatccactacaacacctggggcttgctctcatgcttgtctgctccatcgtcgagagtccctcgtcgtcctactggctctggtgcttgtggtagccgctgccagtggaggggtggttatggtggtggtagcgggaagggtgatgctcccttgccatcactctacaaccagtggattggccacatctctctgtggcctgactcagccatggtggttcttcactacgcctacaacaactgcaatcgtcaaccctcctcactatgcccatgttcaacaactttgggtgtcctggaccacctcgtatggctcctacaacaccatactagccttcacttattccacaccatacccacttagtttggtcgtggactttatggactgatgggtgggatcaatagtcgcttgctaactcgtttagcacgatgactttggctcctcccgttgtcacagactaggtgtccgactccagtgcctcctacgacaccactttggatgctagtatactcctcccataccccacccttctatcattgtcagaaaatgatatcattcttccggttgccttagcagacaattcggttttcctggttgtttccgccttaaggacgttgttgttgcctccaatatcatgtaaatctattatttgtttgttagtttactactgataattcttgttctatggagtttgatctttttggcttgtccattaaggatcttgccacttggagtcttctcgcttgatgtgatagctctaggccctgtatagtctgtggcttcctgcttctactatttccgctactccctctagcacttggtatcgtcgactcggtcatcctagtcctgacgtgttgtccaagttgtctcatagctcagttatctcttgtactaggtgcactcatgagcatctatgtcgtgtctgttagctaggttgtcttgttatactttccttccctagttcctcttagactgtgcatgcttatgatctcattcactgtgttttgtggacctctcctcttgtcagtgttttgggatataagtattatttggtggttcatgatgattgtctcattactcgtgtgtaagtagatggactctaactctcatcaagaggatgacactatgagttggagcaattttctgtttatttcctcaaacactacacaatgccatacccatctaagggttggagacccatatttatagccctagaggctgcactaccacactttctcacacacactacacaacaggattgtcctctagatgctaaagagactacagaggacagtcaaaagcgactgttgtcctctagatgctaaagcgactacagaggacagtcaaaaagcgactgttgtcctctagatgctaaagagactacagaggacagtcaagctgtcctctagatgctaaaggactacagaggacagtcaaaagtgattgctgtcctctagatgctcaagacttattccatcattgtccccctaagtcttgggcgtcgtcttgtgagaaagttgggtcatcccggacctggagcaaagctcaacaaacttgatcttcccaaggggcttggtgagcaggtctgcaagctgatccttggtgttgatgtaacgcgccttgatgctcccttctgccaagcagtctcggatgaagtggtatctcagccggatgtgcttgctccgttcatggaacacgaggttcttggccaatgccagagcggattggctgtccaccctgagttccaccgctccagtgtctctcccgaggagatcactgagcagtcgagccagccagagcgcctgagtcgaagcagtggacgccgctttgtactcggcctcgcagctggacatggccaccacctgctgcttgaccgactgccagctaatgaggcacttgccgaggaagaagaggatctcgcttgtgctcttgctagtgtcgatgtcgccggcgtggtcgctgtcgctgtacccgacaaggtgtgcctccccagggcacctcgggtagtagagaccgtggtcgagagtccccgcaacatagcggatgatcctcttcacagcctgctcatgctctgtcgtcggtcgctgcaagaaccgactaacgtagccgacggagtatgccaagtcaggccgtgtgtggacgatgtagcgaaggctccccacaagacgccggtactgagtagcatccacctcctctgtcgtgctgtcgtgactcagcttcagcctctcctccatcggagtgagagctgggttgcagtcggtgagcccagccagctcaacaatgcgcctggcataggcggtctggcgaagtgtgatcccggagtctccctggtgcacctcaatccccaggtagaaggagagatgccccaggtcactcatttggaaggtggccttcatctcttccttgaacgctgccacctctgcatccttggcgccggtgatcaccaagtcgtcgacgtagacacccaccagcagggcattttctccattgccccgccgatagatggccgcctcgtgcgggcttggcatgaagcccatcctcttgagcatggaatccagcttggcattccacgcccttggtgcctgtcgcaagccgtagagagccttgcgcaggcgcaacaccttgccctccttgtcagggatcgcaaaacctggcggctggtgtacatagacctcctcctttaagtcgccgttaagaaacgccgacttgacatccatgtgatgaacatgctagcccttcagggctgccagcgcgaggaggagtcgcacggattccatccgtgctacaggggcgaaggcatcgtcgaagtcgatcccctcctgctgcaagaaaccgcgtgccaccaagcgagccttatgcttgacgatggcgccggcttcatccctctttagtttgaacacccacttaagggtgatcgcgcgatgaccatgagggagatcagcgagctcccaggtgcggttcgtctcaaccgcgtccatctccgactgcatcgcggcacgccaagccgcatgtttctcggcctccgcgaaagaccgaggctcaccatcatcgcatgcaagatgcaactctcctgccagaatgcgaagatgcagggcctggcaccgacgggtcgatgagaaggccctccccccttcgataccgaaacggctcgtcgtcgtagcacgcgtcgacgcgctcctcgtcgcgggacagaggggtcactagctccactgggtcgtgctcgacacgagctggtgtctgataggacgttcccggagagggtaccatcggtgctagagtacgtggtggcgaagagctcgctgtagccggagtcgtggctggagtgcgtggtggtgaagagctcgttgtagcagaagctggagagtttggcgctggagtcgatggagacttgggggctggggtagacctgctcggagaagagttgcctactcccccagctccctcaaagtggacgtactcgatggtgaagtcgtacgtcggagtcgtgccgtcgtccaccgccttgtcccacgcccatcctcgcccttcgtcgaacactacgtcgcgcgccgtgcgcacacgctgtgttcttgggtcaaggatgcggtaggccttcgagccctccgcatagccaatgaacacccccggggtgctcctatcgtcgagcttgctgatgtggccaagctccttggtgaacgcgaggcagccgaagacccgtaggtgagagaccgccgacttgcgcccatgccaagcctcgtacggtgtcatcccgttgagagccttggtgggcgagcggttgaggatgtaaaccgctgtcaccaccgcctctccccagaagacagatggcattcctctctgcttgaggagagcccgagccatccccacaaccgtctggttgcgccgctcgacgacgccgttctgctgcgggctgtacggcgcggagtagtggcgctgaacgccctcatccgcgcagtacgacgcgaactcagccgccgtgaattcgccgccgttgtcggtgcgcagcacgcgcagcttgcggccgcactccgcctccgcagcgacctgcacacgcctgatggcgttcgcagcctctcccttgctgccaaggatcatcacccacatgtagcgggagagatcgtcgacgagcagcaagaagtagcgtcgtcctcctggtgtggctggtgtcaccgggccacacaagtccccatgcacgagctcaagcctcaccttggctcggaagctcgactgctggggaaaggggagccgtctctgctttgtcaacacgcagacatcgcagaattgctccacatggtcaaggcacggcaggcctcgtaccatctccttggcactgagccgcttcagggcctcgaagttaaggtgcccgaagcgctcgtgccactgccacgccccgtcgtctcgacgagcagcaagacagcaaggttgtgccaccttcacattgaggatgtatagccgatttggactcctgcgtaccttggcaagaaggcgacgagagggatcccagatcctcatgactccgtgctcgaccaccacgcgcgaaccgttctcatccagctgtcccaagctgatgatagagttcctcaacgcggtgatgtagtagactccggtgagcagcctatcctcaccagacgcggcggtgaagatgactgacccggcgcccttgatctctacgccggaggcgtccccaaacttgacggagcctcggacgctagagtcaagctcggtgaagaactcccgtcggccggtcatgtgatgagtggcgccggtgtcgaggcaccatccttcgatcatgttcttgttggagccgtcgccgaggaaagcgcgtgctttcgactcatcaaggtggagtagtgccgctgcggccggtgccgctggagatggctcgatgcttgcatgtgccaggagcagggcctcctcatccgcctccgcctgtgcgacgttggcctggccacgtcgtggctgccgacaatccctggcccagtggccaagcttgccgcagttgtggcagccgtcgtctcgtgccggcttcttgttgccgacagcgccgccttgggcacctccacgtgcaccaccctcagcatgtcctcgcgccccggcctgggcgcctccacgcgccttgcgcggcttgccgcgtttgcggcctcgtgtcgaggaggactcccccttcttcttgtcaccctggcaggcctcccattgctcccgagtgagatgtagcttcccgccgatagtgataggcccagagagagcctgtggttcgtcgccgtcgaccactttgaggcgaccaatcgcctcttcgatcgtcatcgtggagaggtctagcagagactcgatcgagcgagcaatctgcctgtacttctcggggatgcaacggaagagcttctcaacagctctctcctcatcgtaggtgtcgtcgccgaactgcaccatcttctgcaacagagtgttgaggcggagagcaaagtcatcaacatcctcacctggcttgaaggccaggttctcccactccttgcgaagtgcctgcagtgtggtcttgcgggcacgatcgctgccgatgcgggtcgcagcgatggcgtcccaggcctccttggcagtccgcttctgggaaagcgaaaactgcatctcaggcgggactgcagcaatgagggcatccagcgcccgccgatcctcgtggtagtcgacgtcgtcgtaacgaactgcttcccacatgtggcgaacctggagccgtaccctcatcaccgcggcccactcgacgtagttggtcttggtgagggtaggccacccacccccgggaccgatgtccctgacaatggcttgggccatgcagcgaccatggtaccgatccggggagggagaaccgcgccgcctgtagaggccgcgatctccgtcgactcggtcgccgccgccgggagcaccgccggcgcgtctacgcccgtctgggctgccgccgcgtgcgctcccgcctggagcgccgtcagcgcgtcgacgcctatccgggctgccgccactcgcgcccccatggggatgcgcggctgcccactgtgccgcctgctctcgcgctgcttccctcgccagcctgagctcttcgtcggtgttgtcgtcgacagaagcagagctgccagctctactgccgcgcagaacctcgagctctgttgccgccgcacgtgcagcatccgctgcctccgctgcttctacttccgctctcgccgctgccagttccgccgccgccaaccgtgctgccctcgccgccgctgctgctcgctcgcgttcttgtgccgcggcgacctcggcctcctgctggcgccgcacactcgaagtggccgagcgtagggacatggtgggctagtgaggggtcgctgcgggtggaagaggctgtctcagacgaaaggctgctcgtctgagcaggggaggaaggaacagttggagctcttgctgccgactgagtgtggggagaggcgcgggaaggagatgagcacgagatgtttaggctgcaggatagtttggctccgataccaattgtaagtagagggactctaattctcatcaagaggatgacactatgagttggggcaattttctgtttatttcctcaaacactacacaatgccatacccatctaagggttggagacccatatttatagccctagaggctgcactaccacactttctcacacacactacacaacaggattgtcctctagatgctaaagagactacagaggacagtcaaaagcgactgttgtcctctagatgctaaagcgactacagaggacagtcaaaaagcgactgctgtcctctagatgctaaagagactatagagaacagtcaagttgtcctctagatgctaaaggactacagagaacagtcaaaagtgattgttgtcctctagatgctcaaaacttattccatcatcgtggacttctcctttgcgtttgaagtctgacacatccaatgattgcaattcgcctggtcgatccctgggaccgaccagacgactaatcgcgattagggacgaccagggcgactagtcgacccctagtcggttcctggtcatcctagaccttttagactagtagttatacttatataggtatatacatatataaatatacctatatacattatataaattagaacaaacagttagcataaacaaaatagcagtttggaaacacagatataggtacaagtcactactcatcactggcttaggattacagcaatcatccactagttccgcactggcagaactccagagaaggggagaaggggggagcaggaggaaccttgagatgacgagctcatcttgtcaatggtgttggagtagccactggtatctagactagagcaggcgagcagccaagcaggctgaggggcgcaaccggtatttggactggcaggcgagcagccaagcaaccagaggggcgcaaccggtatctagactagagcaggcaagcagccaagcagacagaggggagcaggcgccgttgaatggagcaagacaacagggggcgcgggtgagcagccgccggtgctggagatctggggcgtagtgccggtgctggagatctggggcgcaaccaccggtgctggacgttgggcaaaagagaggaggcacagactagactgggttttggcggctgcatattggcaaaggagaggccaggctaaaagatcatatagatgggctaaaaatagcccaatactaaaaccctagtcgtggtgaccagaaattattaatcgggcgattagtcgccctaatcgacgactagtcggacgactagacaggctaatcgagtcgtccagctagtcgagtacaaacaggcgaccagcccgactaatcgcgattaatcgcgactagtcggacgacttgaaatcattggacacatctaccaccctttctcacttattctcttgggtttccaatcaattcagtagcattatcaatgttgttcggtgcaacagtaaataggagagtttgataacacttcgtcgcgtgccttcgtccttctccactgtgttcagtttcggatgtcttgctcgtacacctctccccagatctacaaggctgagcacatgattcgcaccactaacaacattatgtgatctctgttcttttcaacatgtccctactctctactgggttgaaagtcttcacacggccacctaattaatcaccttcccaccaagacgatcagtgctcccacctttcacttcgcgttgtttgccaccactcctgcttacgagcacttccttatctttggatgcacctgctatcctaacctttctgccacaaaaccttaaaaacttgcatctctcgacccattgtatctttcttgggtactccccttataggtgtacattcaggccacccggcccggcccaagcccaaaaaggcccgatccgtttaaatttcgagctggaccgggccggcccacgacttgtcacgtaattgcttaaacgtgtcaggctcatttcggacagcccgaaattcaatttttggcctaaaattcacatcagggcccaaaattcacatcagagcccaaaattcaaaacagatttaataaaacaaataaaagagtataactagcatcgtctctaactttgtgttctttatcaagtataatcattttgttagaaggaaaaagagtataatcagctatatacgtagttcgtaagttcagttcattatctaatgttcacatactctaattcaaagctacaaaaaatatctaactagcatcatctctagctttgtgttatttatcaagtacatgaaagtgtggaatgaaatgtggttttaataaatatatggaccttttcgtgcttctatatgggccatttcgtgtctgccttaaacgagtcgtgctcgtgcccgcccatgggccgcgacctcggcccaaatccggcccaatatattgtgttgtgccggcccgacacaaaaatgtttcgggtcatgccatgcctgggtcgtgcttttttcgtgcttcgggctagcccatcaggcccgacccaaatgtacacctataactcccctggtcctaagggatacccatgtctcgatgttttcacccaccgcctattgatctctcgacccctcactttcaacgagtcagtattcccttctccacttctccctccaacctcgtccaagaggtggtttcctttcttgagattggcaccatggcgccctccagatagccaccacttcttttctccatgtagggttcttctcggtgcctctgaccacgccactcacgtccttggaacgattgatcgtgccacgcacggccccaacgtccccttctacgccgcttgcggccccaacctcccatactgcattttatgcggccccaatgtcccttgttgcacctcacgcttgatcaccatctttggctgagctacgtgtgccaactcatgccttgatttgcttcgccacactggtgcatgtctatcagcgtcgtgcacaagaaggtgccctgatctgctcttcggtcaagccgtcaatgtacatccttctctacttcatcatgaacctcgtcatgtccatccaatgatgactcgacaggctgttgggatccttcgaggtgttgacctcatacttccctcgacttcaccactggtctcccccatactatcatttgtccatcatgccttcgtcgatccttatcggcaccacgctatagaggaagagtacgaggctctccttgtcaatcattactggggcttggtgtcgtgtttatctggcggtcacatggtgattggcaagtgggtagtgggtctggactcacaagaggaagggcgacaaatcattggataagtacaaggcccaatgggtccttcaggtttgactcagcgtctcgatatgaactacgatgggacttttagtcttgtggtgaagttgtctactgtcagcacagttttgttgctggccctctcgtagtcttggttggtccatcggttggatgtcaagaatgtctttctccatggcaccttgactgaggtcgtgtattgcaattagtcgtccggtttcatcgactcggctcattcctacatggttcgctgtatgatctgaagcaagcaccctgtgcttggtatagccggtttgcttcgtttttgctctcgttaggtttcaccgaggctaagtcggacaccttgttgttcatttattggagacgcaatgacattgtctacctcctctatagcgatgatattgttcttgtcgcctcttgtacagtggcggagccagagcccggcgagcctgggcacgtgcccaggctctgccgttgaccgcctgaaaaaatgaagcacttcttaccgcggtcgaccatgccgtccttcaccgtttcgccccagtcatcacgtcgtgcagcgctcaccaacttctctccactgacttgattggcccgtccacatgcctcgctacttcgatgctagtgctagctgcgtggcgaggaacgatagattttttgaagcggcgaggtgagggacgtcacaattaactaattcggtactggcctcacagtagggtagggttgaacagattgggtggccacgattcgttgatgcggttcatttacgtttttgggctttttggttgtgactggacaatttgggccgcttggttcgtatcaggtttaaacccttgatggatattggttaggtttaaatcgttgacctgacatttgcaattgcatttgttagatttgacgacattaattttttgtgatattctataataaataatatcaagggtattgatctgatatacggggaacatacgaccacaacgccaagacacgcacagtgggtcaatggcgcaacagcacaagaagagaaagatgtttagaaatgggaagcatgacatgccgccctgccacgccgggtgtcgttcgccgtcgttctaagactgtgcccaggcttgtgttccaagctggctccgccactgctcttgtatgaccatcttgtagcacactatttcagcaatgcaacaggagttcgctatgaagaatctggtcagcttcaccatttctttggcattgcagttgagcactgccccgaacattgttccttcaatagcgatagtatactctatacatacttgagcgtgctggcattatggactgtaagctttgtgctactccagtggatgcttaggcgaatgttttctcaggcaccagtgcttcagttagtaaccccattgtctatcgaagccttagcccttcagtacatcaccttcaccattgcggggggatgggggcttcaatacttcaccttcatcaggtcggatatctcctgtgttgttcagttggcatgcctccacatgcatgattcttgggagctgcatcttactgctgtgaaacggtataccttcgaggcactcttgactatgaccttcttctccggcggtcctcgccgaccgagctcgtcctccaccgatgctgactggaccggttggctggacacacgtaagtccacttgtggctacgttgtattccttaggggtaaactcatctcctggtcattgaagcggcagcctatggtctcccgcttgagcgtcgaggctgaatattgtgagtggcgaatagtgtggatgaggtgttctagctccgctagctcctacaagaacttcacagccccctcaccaggagtatccttgtttgttgcgataatgtcagtgcagtttacctctccatgaaccctgtccaacacctgcgcacgaagcatgtcgattgtcgagattgatctcttcatttgtgagtgtgtcaccatcagggatgttcgagtcctccatgactttgcactttgtcgatttcactcagtctcaacatctatcatgactagagtttcaactgcggggggtgttaaactgttatgtgacttgggcctagagcctggcctaagtggtctattagggttaggctatgtaacctatcttcagtgcaatacatcacaatctctccaaattacgtcctggaatgcaatgaaatcatttgtctttcttaatgttcttatgatagatacgtggagatgagtttttgttggttaaaaatgttcagagtgaatcatatttccgcatattctatgtctgtttcctccaactatgctgccaggccttttaagattgggatcgttcttttttacatctatgcttactttaacttacaggaac

SEQ ID NO: 1063 - DNA, 8947 bp, Zea mays
  Intron number 3 from transcript GRMZM2G031625_T02 (locus G RMZM2G031625) derived from phytozome v7.0 (chr-ID 2; pos 5 116877 to 5125823 reverse strand)
agggatcttctggagctagctactactgatccctggtatgtctggttagctggcggctatagatgtaataaccatatggcctttgttaagagttcgtgcttaggtagcatcttctgccttctggttctggaggtggaacatatcaatgctctagttggagtttattttcccaattgcttgtgctcttagagctgttgccgatttggtgtactgtgatttggttagtttccagctagtggtgaggacttgggatgaaacatgcatgattttctatttgcttttgatttgactgaatgcttgactcttctagtgtcaaaaagcttgttcaatgccactttggaatgtaccaatcagtagattcaaattttggtttcaattcctgatttggactccattgtaacagaaagatgacaacatatggaattgtctgtatgttgaattactggtatttgctgtcagaaagttatccttccgtttagtggttttgtatctagcttgtggagagaatactgaccacaaggacttgaatagttggatattatagtagcaaagacaccaaggtaccctagaaaatattgctaggggatcaagagcttaatacacaacgattttttatagagttttaggccgcagtgtgcgtaataccctatgtatttttgctgaacttggattattgtatatagatgctgtacaatgttacaagctccaacccaataagccacgacaccttgttaaggagggagatgagacaaactagattaactcaaactgttgcagccttggccgggttgaattgaactcctttggtttgggtttggtggaactaggtgtgacatctttggtgtgatcaaactttctgggcctaaattgaatgctgctctactactcctttcatagtccaaaggagcggtagttttacatgtatataccacatgtggtccctatatatcacaaggccaactctccatgtcctgtcttgtggctgtgatcatatgtcctgcaacaggcatgcaccggtgtaatcattcctgtgagacgagtagctgcgggtctgcctactgtgtattaatagttcctagtatggttcctcgtacgctttatcacaatttagaacccctgtattgctagtgacgactataacggttctcccaatcctgcagcaggcaagatcacctgtgcagatacattcgtaaatactaaagtatgtttgagcagcagcctcgggtacacttgccccctgtgtgcatgtcagggcgaaggtgtgcccgtaatgttgtgctggcatttaacgcgagctctgttgtagttatctcttctcaaggtgactgtcacaccggctgctggggtaggtatgataattgataacttacgcctatggataccaagacctgggctaagctgtcccggggcaattggttgtcggtaaagtctcttgtagtttattatattgcagctattgctcggtacaccatgcgtgcccttgtgtggttacaggaccgatgcgtgcaccatgtagcgacctcaagtgcactacagtctatgttgcttgtctgcatgctgagtcagtcccattatgtcacatatcgtgcatttgatatgttgtactcgagacttatccattaagctattgccatggatagttttctgggcatttaggtgcggggcccatgactcgtgccgttctaccaccggttggcccgccacatccattagccccgagatagggctagtatgtctgagatgaccacaccttggccgtaggtggtagggatgcgaggttgggggtcatggcctgtagatgtagacgcggcaacgctgaactggagacaccgtgctagcgcacggcgactggctaggatgtgggaacgtgagaggtaaggagataatccttagagtaattctcctctgaactttgttcaatcatctcctatgcattatatagcacagacaccctaatacatcatctaatttgactccaacaacctaacaaccttttgacttaatctatctagctcatctcctattttgactctctgctaacaaaccctcaccctatctggccagcggctaggactcagtgtccaactcgccctggccttcttacatagctggttgggccttgggccttctagtatagcggtcataacatctctctgctcctcgacgaacagctcgtcctcgagttggtgatctaggtaggatttctggaattgcagaagaggttcccaggttgcttcagcttctgatgacccttcccagtgaacaagaacatgccatattcccctccgaagccgagcacgtaagatctgtactggacgaggatgcgatctgccattctccatttgaggcaagggtgctggcgctattggtggggtcccaaagaatggtcttaagaggcccacatgaaagacattatggattcgagcttctgctggtagttggagcctgtatgccacagtgccgatcctctccttgacttgcaagggtcccgggcagcgagtatcaagcttcccttttggtcgttccaccaatgatagagcctggcgattgaggagtctgagccacacctagtcgccaactttgaactcgaggtcgcggtgctttgcattgtagaaccttcggccgtgctcttgtgcctgatgaagcctgccacgtacctctgataagaactgatcacgttcctgcagcatgctatcaaccttagttgtagtggatgacccattctggtatggtagcagcggtggagggtccctgccatacactactcggaatggagtggtacacagggatgagtggaaggctgtgttgtagcagtattcgtcccaagggagccaatcaacccaagctcgcagacgatccccagtgatgtacctcaaatacattgctatgactttgttcatgacttctgactagccgtctgtctgggggtggaatgttgtgctcattcagagttttacccctgccattttaaaaggatcacgccacacgtttcctgtgaagactgggtcacgatcactgatgatggaactgggaaacccatgtaggcagacaatgccttcgaagaatgaacgagcaactgatgtagctgtataatgatggccaagggtgatgaaatgcacatatttggagaatctatccaccactgttaagatcattgatttgtcatggacttttggaagacctccaatgaagtccatcgatatatccgtccatacctgtgatgggacgtccaatggctgtagaagcccggacgagtgaagtgccactgtcttgttttgctggcaggctgtgcaagctcgcacccagtcacgcactaaggccttgtccttgggtacaaagaaatctgctcggagtctgtgtaatgtcttctgaatgcctccatgaccggctgtgagtgctaactggagaattaggggaatcaaggatgaggtagtaggcacaaagacccgatgcccgtggtggatcaggccatcagtaatgttccatgggctgcccagtttaccagacctaatctgctcctgcatactttgccattcactgtcctgaggacacttcttgcgcaggtcattgtacagctggaatgacgggcttgagattgctgttgatcccagaacttcggcctcttgtcaggacaaagcatcggctactgtgttgaaccagcctgcacggtattcaactgtaaaatcatagccaaaaagtttgttgatccattggtgttggggaattgttgcgaggcactggtccagcatgaacttaagactgaagtggtctgtcctgatgatgaactgtcttccccataggtatggtctctactttctagtgccgaacagcttggatgaggccaattagcttgcgctcatatgctgcgagctcgacatggcgtgctgcaaatgtccagctaaaaattgccagaggtccggcttcctggtgctggacagctccaaacccggtccctgaggcatcgcagccgacgacgaacgactgttcaaagtttgggagctgcagaacaggagctgtggagagggctgttttaagtgcctgtaatgcttgctcagagtcctcaatccactgaaaggagtccttttgagcagtttggtgagaggagctgcaatcaatccaaaatccttgatgaatttgcggtaataatcggctagacccagaaatccccggaggcctcaggcagctcgaggagctgaacaggaggtgattgcctcgaccttactgttatccgtggttactccttgtgctgatatgacatggcctaaataagcaatggaatctgtcccaaactaacacttggactgtttggcaaagaggtgattagtttgtagggattgtaggactgctttgacatgttgtaggtgctcagaccatggtgcactataaatgaggatgtcatcaaagaaaaccaggacacactttctcaagaatggatgaaggacctcattcatcaaactctggaaggttgctggtgcgtttgtaagtacaaacggcatgaccaagaactcaaagtgaccatgatgagtgtgaaatgatgtttctgaatgtcatcaggatgtacccggacttggtgatatccggatcacaaatccagtttggtgaagacatgggcaccgtgtagctcgtcaaggagttcttccacaatggtattgggtacttatctttcactgtttgttcattcaagggccgataatgaatacaaaagtgccatgatttgtcctgcttccttaccaatagtaccggtgctaaaaaagccaaagtgctgggtctaatgattccttgcgctaacatggatacacactgcacttcgagctcatccttttgcaactgcgggtagtgatatgggcgtactcctaccggtgcgactcctggcttcatgtgtattctgtggtcacagtggcgagctgggggaagatcgcgtggttcctcgaatattcctgcaaactgctgcagcaggcggtccattaacggagtcgggtctgcgagagcagcccgagctgctgccctcatcagaatgtcgctgcgggtggatccccatcccttccatagaatgcatttgctgtggcgctagaatgccatgcatagatcatccaagtcccatagaattggacccaaagtgcggaggaagtcgacacacaaaatcacatcaaggctgtcgaggggaatggcaaaagttttcaaactgaattcctgtgatgcaaaccgaaagttgaggcaattggcaatccccttgcaagcaactttatctccattggccactgctacggtgagacccgaacatgggcggaactccagtccaaggcactctgctatcttttgattgatgaaggtgtgtgtagatcctgtatccaataatgccacgagttcactgccctggatgatgacttggagctgcatagtgtcctcggtgcggatcccagtgatgacatgcaaggatataaccggttctggctctgttgtggctgtttcctctggtactctcctgtcgctgtcctcatccatgacttcaggtagaaaagtctagagcagcagtgtccccggacgtactgctcatcacaattgtagcataatccttgacgacgtcgttccttgacgacgtcgttctgccatctctgaaggtgtgagacgtttgaatgagcgcgtcgactgtgtggtgcatcccgtctggactgctgtaactggtggtgcggatgatgatgggtttggtgtggctgttcgggctggtggtctagtgctgcgtacttttgctggctgtggaagggtatccaaagtttgtgatcgtcgctcataagccctcaccaacttaagggcttgatgaagatctagggcccctatgagctcgacgtcgaatgcgatctggtaaccttgctgtgaatagctgtacttgctgccgacaataatggctccacgtgacccaacaatgcgcagaaccgttcttgatactccactgtggtgcggaactgcagacgtgccagttcgcccagcggattctgtcggaggggtgggccgaaacgctcgttgcagagttcccggaagcgctcccatgacatgttggcgttatcacgttccaccatgtcataccaggttcaggcaacaccaatcaggtgataggatgctagccacactttgtctccttccagagttcgctggtcgcggaagaacctgacgcagtgattcagccatcccagtgggtcacctttgccgtcataggttgggaattccaacttgtagtagtgaggaatgccactggcggtggcggaaccctctgggtggccagatgggtttgccaacgaggagggtaatgatggctggaaggaatgcagcgatggtggaattgctggtatgggtgatggggaaggagggaatggtatttgatgtatgggaaagcgcggtgtggtggaggtggatggcaatgggagcatgttctgcatggtggccgccgggaggccgccttatccgggcaggccatgtgggaagtctggcggattggtggggaaggggtggagatggtggggcgtgattcaatgtcggtaacatgtgtggacagatcagagaatttggtggctaggtcggtgacgatcttgaggacgtggtcgagtttctgatcggatcccgtgatgttggtagcgacggaggttgctgtcgcgtcgccgtccatggatcatggcatatccgataccagattgagatggctacgccttggccggaggtggtagggatgcgaagttgggggtcgcggcctgtagacgcggcggcggcggcggactggagacgacatgctggcgcacgacggctggctgggacgtgggaacgtgagaggcgaggagatgatcctttcttagatcagttctcctctgaactttattcaatcatctcctgtgcattatatagcatagacaccctaatacatcatctaatttgactccaactacctaacaacgttttgacttaatctatctagctcatctcctattttgactctttgctaacaaaccctcatcctatccggccgtcggctaggactcagtgtccagctcgccctagccttattctatagccggttgggccttgggccttatagtatagactttgccggtcataacaatgtcatccagtccttgattcctctggagggtccttgagccctaggggtatataccatcaggtgaaccatgatgtgaggtgccctaggggcttattttgttagttgctcctgggctcgagggacctgagagcttacaccatcttgtgccacagggcgcgaggggcccgggccttacactttcacgcgaggggcccgggccttacactttcaggtgtcccaggacacgagggatccttggggcttatactgtcaggtgcccgggaggccgggacgcaaggggcctcaagggcttataccataaggtggcccaggacgtgaagggccttgggagcttgtatcgttaggcgccccagggcgcgatactgtcacgtgttccagggcacgagggcctccgggggcttatgcctgtatgccatggtatatggtcctgaaaacttagtttagaatgcatccttgtataaacttactttgagagttgtggcccttcattgaccggggcggccataggccccaggagcagtgtcccctcgtctggggacttggaagtcagtcacctgcctaaggatctttgagtgtgtcttggcagcagcctgtggtaatgccttttctcgggcgctgacagatatggtcgtgtgttaggctaccagtctggctttcttaccttggtagtcactacttttgtgtttttgtaagttagaaaagatgcgcctgtgggaagttacttttagggctagtttgggaactccatttttccaagagattcctattttcctaaggaaaaatgaactaatttcgcttgaaaaaatggaaatcccttgggaaaatggggagtttgggaaccctaatttttctaaggtcatgtttgtttcctttcattttgaggaattggaataggctatttttttagaatgtggcattccaccactttctaaagttatcatataagcctatatcaaattcatgggatgagagatgtaaattgattctatagatttacatgttatttttccgatgtacaacttatagcatactcttctacttgcttcactataccataaatatagtatataactatctctctcaaatgatttaggataatatacaaatatattacatatataaatatatgaacttaattagttttgtctaaattataattattaaaatggaattcaattccaacgaaacaaacgggcctaagggttttttattttcccaagggaaatcagttcattttcccttgggaaattgaaaatcttatgggaaaatagggtcgccaaactagcccttcttaatggtatttttacgggaccggggcttaaaggatgtacctagcatgcttggctggcttcttttgtgcattactcttatataatcgttctttcaagatgtagctcaaacatagttgcttatattcccttcgcccactagaagatgtttaaggcagcctaattagcattcatgcactgtattctgtcctaaatttcatccttgtatgagtagagtgagttggtagttctcaaagggctcttttgcccacgtgcttcctaggatatgaatatcacagtaataaaatggtatattttccttctttctgctgccatagcatgagttccaagttactaagggtgtatttggttgcgggacagccaggacaacgacgtccctggcgttctctctcgtccctccaattttgagggataactggggacaacactgagagagtcctgtctcaatcattgaccctgaaccaaacaaccttatttgagtgatcgtcccgtcttgtcattgcaaccaaacacatcctaatttgcatgttttttccctctgcaggtgcttgtt

SEQ ID NO: 1064 - DNA, 1955 bp, Zea mays
  Intron number 1 from transcript GRMZM2G155991_T01 (locus G RMZM2G155991) derived from phytozome v7.0 (chr-ID 10; pos 141620883 to 141622837 reverse strand)
atccgggtacgtctgaaattactcagcttgctgattgctccttgcttctgttctccacttgtcggaatgaattttattttcacgcgtcgtgcttaggcttaggttacgtcgtcctgatgttgatcccgctaaagaaaattcggtcaatccgagcgtccgcgttactcttctgtttatatataaaaaaaagaaaaaaaatccatacacaatttcctaccaaaatcattcggcagcgctcgattagctcctctgcagacgatcgacaccacggcacggcagtttctggtgcaagggagaggatcgcgatttttgggcgaaaaaagaggatgatttagttttgatcgtttattctttgtcccgtgaggatattaacgaatcgattttaaactccaaagggtgcaacttgctagtcggagtcacaagatttcaaggtttggggcggcgacttccaagcaaagtcggacttttgcaacaaggattcctttttgactgggcacgcgtgcggcctaggcatgtcacgccagccgtaatcaagcttgtgccttttggagccttgctctgcgagtctgcggctcctagtagaagtagcctgatgcacatgcacagcacagctccacggctccacctgcctgttgcattgagcctgttctaaccgatggtatatcatcggaaacagacgagtggaatgagatgtatcatgtcataaagtaaattaatttatttatattttgctaccaagtaaaaaattagtactcgcctcggaaaagctgccacttgatacaggtgaaatccggtggattttttttccttttttttgcggcaaatggtgtgcaagtatcagtaacttgcattgctcgacttgaaccacatgtctaatcagaactatcaccagttgagacatggaccaccctataaattagcacctgaagtgttgcgtatatctcgaactgaagcagggaagatatccgtcagcatgatactcaggatgcggccatgtgcgttgtctactaggttttggatactaaacagagaagagtgcaattcgtagcttatgagttcggagccagctaactgttgctgaatgctgacctgttaagccaaaccgttactgcattgtaatttcagttctttggccttgggccctctaatttaccataaatgtttgaaatgctctcgctccacaaaaacgataaaaaacgatcagattcgagtgctctcctccctctcctcccatctatacttatatggctctccaacgaaacaaaaacggagtggctccgctctattctactcttcaaccaaccaaaaaaaaatggagcgactctattctgtttgccaaacacagaataaaacgacttcattctgaaaaactgaaatagaggcgctccgttctatttgactctaaaaccccgttctattttactctaaaaccaaacgtacccttagtgtcactgaatagcatagctgttcttttgcagcatttctgcagctagctgtattggcaggcttctttgtttaagcaatactttttatttgactctagaaacatttgggtattttattcatagacctgtttggttggtggccaggcaacacaccattcaaccccaggctggcaggccaccaaaaatggacgcctgggattgctgtctttccagggtccaatccgagcaggccctatgtgcctttattgtcaattgtgtcgaacacttgctgcctgaatcagtatttagtatttatagtcattgtgtatagaacacttgctaccagactcagtttgtcaatgtgtgtaagtttgtcaatgtgtgtagcacactacttgctccaagaatcagtcttttgttgatgtgtgtagaacacttgctgctagaatcagtattttgctgatgtgtgtagaaaacttgtaggcggaatatactgacgcattatttggttcttttgcatgtttatataga

SEQ ID NO: 1065 - DNA, 8841 bp, Zea mays
  Intron number 3 from transcript GRMZM2G053713_T01 (locus G RMZM2G053713) derived from phytozome v7.0 (chr-ID 2; pos 2 26964499 to 226973339)
atattgatttaacattctccaaggagggtttcatgtttcacctgtataattaaattttgtaacattatattcatacgtcaaaaaatgattcttctttgtgttcaatgcaggaagcattacagaacaattttgaatctggttcaacagcgaccgtggtcttgatagctgatggacaaattatatctgccaatgttggagattcaaaagcttttctgtgctccgaaggatataatctgcaccatcgaaatagttacgtttcattcttcagttttttagatttcagatgtaccagcctagttgaatattgaaaaaccctcgacctgcggggggtaagacagcccccaaacattatattaagaagaagaccttctcatagaggtcgagaaaacccctgaaatcctgccccacccatacacaacggcaccatagcccatgtgagaaacgaccgcgactgggactgagccttagactgtgctttggcttgggacaaacaaggggatttttttaaccacgacttggaattcgctcccatggggagtcgagctcaggacagttagaggcccttttgcctagttgaatattgagtcacctctactagatggtgttaaggcccataaggcccatatgcctatatatatgctacagtacctgagggggctctcacctcacctaatccaggttagtcacatggtatcagaggaggttagggttagggtttatgtctaaactcgatccggatccaaatttttggcgccgtcgctgtgctgccatctcgtccagctctccggcctgccgtcgcggccacctcttccctcctctgccgccgtcgtgcggtcttccccatcccccatcccgcagccctctgccggatctaggcctgcgccgtccgccgccagggcgggatctccgccgcgtagtccgtcgccagacctgcgccgttcgctgccagaggaactcggtcgccgctctctccttcaccgtccgccgccaggggccgcgcgtcctcagccggcgccgtccgccgcggccttccagtggcagagcgccatcgatctgtggccagggatctcgccgtcctcgccgtcctctgccaggggcagagcgccgtcgatctgcggccaccggatctcggcctgcgcaagttctgcggatctgctctgccggaaattggcgcatctcgccgtcctctgccagggaccggatctcggcctgcgcagtccgctgctagggacaagttccgcggatccgctgctctgttggaaatctgcaccggccgtcgctgttgcggacagggccgcggatctgcgacgtcactgctcccgccagccgctgttcaactcggcttccgcgcccaggacccccgtcaactcgtccaagtcgggttgctctggtttgtttggtctcaggtctcctgttctccctggtttttgattcaattcaatatggcgacaaaagctattgttgtcaatatcactcttgatggtcaaaattatccggagtgggcttttctgtgttgagactgcactcccgggacatggattactcttccatttgactgatgcggcacctgttcttgctgatgatcgtcgcaatgttgctgatatcaaaacgtggcagcttaatgatggtaaagtgatggctgctatggtgaacaacgtcaaaccgtctatgattatgagtttgtctaaattcaaaactgttaaagccatctggtctcatttgaaggagcgttttgttcaggacagtggtgctctattacacactctcatgcagcagacatgttattgagcaaaatgatatgagtattgatgagtactactcaacctttgatcgcctgatgagtgctttgacatcaatggtgcctgcttgtaccgctgatccgtgtccggctcataagtttattgagaagttcttcacttacagatttgttatgggcgttcgggccgagtttgattctcttcgtgctcatttacttcagggttctgacactctcacaatggctaaggcgttgtctgatttacttgctgaagagactcgtcttaattctctgttctctactggtggtaatcctcacagtgtgttggctgctgcccagaaacctaagaatatttttaagccttgtgatcattgtggcaagaccaatcatcgatctgagctttgctttgtcaagttccctgataagttgactgatttccgtgcacgacgtgctgctcgtggtcgtggtccaggaccatctaatagaggctcagttgctgttgctgccacttcgtccgcctgtacttcagagtcggcctgggtacttgattcaggagcttcctttcatgtcacatctgatcagtcaaagttggcttctactacacctgtaacagatggtgcttcagtgcagacaactgatggtactgtatgccacattactcataagggttctctttcagatccacactttacagtacctaatattttctttgttcctgagctatctatggaccttctttcagtaggccaaattacggatcataattgctttgtcggatttgatgactcatcttgttttgtacaggaccttcgcacaggggaagtgattgggactggccgttgccgtagagctgctcctcgcctctacatcttggactctttgcggcttccttccttggctacatctccagcgcatgtgctttcagctaccgttgcttctgttgcgtcttttgcccagtggcatcatcgtctaggtcatttgtgtggatctagattgtctactctaataaagtcaggttgcttaggtcatacttcggttcagtctgattttcattgtaagggttgtcatcttggaaaacaaatacaacttccatattttactagtcattctcattctgttgaaccctttgatttggttcactctgatatttggggtcctgcaccttttgtgtcaaaaggtggatataaatactatgtcatttttattgatgatcattctcgctacacctggatttatttcatgaaacgccgctctgagctgatttctatttataaaatctttgctcgtatgattcacactcaattttccactcacattaaaacctttcgttctgattctggtggtgaatatttatctgataatttctgccagtttttgacttcagagggtactcttgctcagctttcttgccctggtgctcatgcacagaacggtgtggctgaacgcaaacatcgtcacattatagaaactgcttgcactttgttgatatcttcttttgtcccttcacatttttggggtgaagcagtttctactgcggtttacctcatcaatagacaaccgttatccaaactctggcaaaacaccgggtgaagttcttttcggaactcctccacgatatgaccaccttcgagtttttggatgtacgtgttatgtactattatcacctcgtgaacgtactaaattgactgctcaatctgttgagtgtgtttttcttggatacaaccctgaacataaaggctatcggtgttatgattcatcttctcgtcgcatgcgcatttctcgagatgtgagcttcaatgaaaatcgtcccttcttttacaactcttccactcattcttctttttattccacagagtctacctccttcatgagctttcctcccatctttgaaacttcatcagtatcaccacctactgtttctaccctagatgtccttattcccatcacaccaccttccacttccacaccatctcagtcttactcttccaaaccacctgtcactcagacttacatttgtcgtcctcgctctactcccacggccagtcctgatgatgatcctgttgctgatacttgtactaacactgatgactctcatgttgtttttaatcaggggtttcatcttcgtgaccgtggcactattgcagctccagatggttcttgttctgttttcgtggatgccattccattcctttcctctcgtcctcttcatctcttgatgtcatattccttttaagttttaacaatatactccctccggtgcatcaataatcgacgttctagctttagtccaaagtgcacgataaattggcgtttcacgcggagcgagcagtcactctcgattgacgcagcaagaagtaaattcaacaggcgtccttggcctccacgcatgcaaaatggaaaaaattttttggtcttgcgtgagtcaagaatcgaacctgggtctcctgcctgggaaggagtgaagaggaccactccgactattaaagggatttcgctaggaatggaaaagagtggtatttattagttccttggtatgcgagaagctgtccaaaacgtcagtttttggtacaccggagggagtataggttaacagggtattgacccttgcttgcattgtgaatatcaggcattctttttctgtggtttgatatccttagaggcagtggcggatctaggattgatctaagagggaggctactaagctaaggctataaaaaaattaaaccaaacaaaaaagatctaattaatttttaatatgatacaagaagcaagataattttatcaaatcaaactaccaatacctagcagactagcacagggtcgacagttcaaagcaaagaaaacaggagcaggcagtagcacacggttcttttcacctaatcaccttcactggttcagggattctgactggcgttaggttcagcagcaggcagcagcgtccagacgcccaaccgcgtcgtgcatccagcgctcaaccgtccagcaaaactgcaaaagcaaaacaggttcagtcaccggttggagcagcaagcaggagctggcgtctggtgaggggccgagggcaagctgctgacggaccagaggacgaacgcgtgctggtgctggcgtgctgccgtgtgcccggggcgcgcgacggagaggcggagagccgtgctgcgccagcgaggctgcgatggcatgcccgcgatggagtgtcgccccgccggtcgctgggtgccgctgccgacgatggagggccatgtcgagtgtctagccgtcgaggtgtcgccgtgtgcaggggtccgagcggtggctagactgtcgatgcggctgggaggggctaggagcggggagcgggtgatgctgtgatggagctgagccgcctgagtgtgacctatttttcctggacttcgtggacctattcgctagaactactggccgcgaccggggctgcagcctgggcagccccggacgtggatccgcccctgcttagacttagaggcgtagattcatgtttttgtggtatcagtttacatcataatcacataagatgtgattgtcatgtttgggtccagatttcctctgtttagtcagctgagagccctttgtgttgtggtcctgttagcttcccatggttagtaggtggctaggtgctaagtatatatgagattggtaaaaaaagtattctgtaatttcatttcttagctaatgaaaattcaggtccgcctgttggaaaaagattgcccatgtttaggatttgacatccctgttcatgatgcagttattctagcaacatgggaaaaaagtgcataaaagctttgttgtaaagccaaccatcataacccatcaaagataaatcacattattatttacttaattctggcaattgttcatatccaagtcatctgtgtaggctatttctggtcattgtgatgctgtctgcattttttgtcagtatgaccttattcctgtgcaagattctctccaacaccgcatcatattctatcatagggcctaaaggtcacatcctttttatgttatcagctagacttacacaccgatatatggtgaaacagtccttgagttgacactgtttatctgccgttattggatacctagttgttcttgtcttagatgctttatggtgcgataatttcaccttggtcgatggataatgatttgtactccctcagtttgaaattgcaaggaacattttctttcactaggacaagcctttgacgctttggccaacaatatttctttgttaatacacggttttttcaatactaagtttatgttattatatttgtattggaaaaatatttgcgattatgatccggtatcatataaatgacatgctctattgagattgtcaatcaaggtcctgtgcttattagaaatatgtgtagtaacagatgtatatcatgttacttgtactccaagtcatacttgaccatggttattaaagcggtaaaacgttaaaacgctatgaaccaactttttaacatttaaacgtttaaacgaacgttgaaacgtcttttcagacttgacatagaagttcaaatatagaataaattcatacataagttgagttcacaaaccaaatagcataaaaagaaacagatcaagttcaacaacacaagttcaaccacacaagttacaacttttatgcatgctcagtaaccatcattgaactcatcaatattaagaccatgagcatccatgccttgattatcaccatcttttccactattgcttccttcaatttcatcttccacatcaagatcatcaaggaatatattcctcatcctcgtcatcttcatttgctaaattagtttcctcttcttcaaggtcttcattccttctcacacacccaccaccagctcccctaggaaaattacgacctctgagatgtgcagatgcaccaatagcttcatcaacttggtcccatgataaattgaaatcatctccaagagcattgctaacatgagaataattagctaatggatcaacccattcattatcccaatcaaagtcttctaaaatcaaagtcttctaaaatcaaaggatcaaagtttttcccttcctcacgtattttttgaaacctatcagtcatctttctgttgtatgaaacatataccaagttattcaaccttttgtgctctaacctattcctctttttggtatgcatctacaagtggaaataaaagtaacctatgaagaactgaggataaaaaagtagtggcgaatagaaattgaataatttgactagctcacttacaaatttaaatgtactccaattccgctcacaaccggatgatgaagcacaaagactaacaatctgtcttgcaaacttatataattcaatagtacgaccaccatatgcaagccaccaatcaactaaaatggcaagaacaagaagattatatgctacatgctgaaaatggagggaaggctatcaattttagaatacttacgtggattccttgtttgtgcattttttatagccattggatttgcaaatgcctctctttggttctcatagcgtgtgattggtttcctgcatttgttcggcctgtgccatggatgcaatatatttcaccttttctcttgtttggttgactggattgttgacacgacgtgcattagctcatgcaaaaggtggcctcggaccagactgcggccatacgcgctagggtagctgcgctgcgcatgcaggctctgtgcatacggggcgaagttggcctcgctctccacatacaaaaaccaaacatgcggataaagaacaacttgggcatcaatcttctctctaagatcctcatctaccaccattttgacaagcgcatcattaaagcaaccccttagctctccaacatagccttcatcatcacctgctttgatgttgtagaattttctagggttcaaatatagtgctgctccatataatggggtatccatttggttcgcccaatgtcaatccacaatctaagtaacgttttccttaccaatcccctcaattctcttttgtaacatagtagacttcttaataattagcacattgaatcaaccctcgctttcccgcctcaacatagtatgcatatttccatctgggatcatttgactttggccttcgtgactgatctttgagtgggtcataggagtcattactttgatcggcagacaatgcctcgctatttgttgccattgaaattcactgtgagcaaaatcaacaaatcttaggcgctggctggctgctggtcttgcggagggaggagggggagccgcagaggtgagaggtcacaggtcggtggagggcggcggcgcagtggcctatggccggcggtctgcggcgcagtggcctgtggcatgtggccgggcagcgcggcgcagtggcttgtgggcggagggaggggggaggagggaggagggggccgcggacgtacctggggggccggctgagggggtgaccgtagctccacgcgctggctgggcggccgggagagctccaggcgctggctgaggaagaggaggcctccacgcgtgctctggctgtaaacctaaaggcctaggaaggcccactaatgactagaacgtcctcagaacgcttaaaacgccataaaacacgtttcagacgcttaaacgacgattcaacgtccaaaatggacgttctacgccactttactagaacgttcggacgtttcagctcctaatcatgctttatcgcttaaacgacattttaataacaatgtacttgactatatatatggaagcctccccccgaaaaaaggtgtaaggtgttcccctaattctctacggtcctaatgaagcaaacaaattgctccttgtaatttcaaatggagggagttggtcgcaatcaccaatcacccagaaccaatattggtttatgcatgaattggatatagcaggctgcttaatatttcgttagtttcagttttagggaaggatgctcaataaaagttatgcattttgctttgcatattttattttccttattagactatgttctagcgcttcgggtgaataacaatatgaaagcttgcattgtatcagggaaacgaaggagaaagagaaactcaattaatcac

SEQ ID NO: 1066 - DNA, 13420 bp, Zea mays
  Intron number 2 from transcript GRMZM2G360615_T01 (locus G RMZM2G360615) derived from phytozome v7.0 (chr-ID 10; pos 39950635 to 39964054 reverse strand)
cgcggctgtgccgtaacggcattcgtcctctcctggtgcgtcgtgcgtgtcttaaaccctagtatcacacctaaacgccgtattctttccttctttcttctttctctgatctgtatgtagcgtcatgggcatgcatgccacggcttgtagattgatccgtagatttagttcgatttgggtacatttgtttctcagtttggtagtaggtacatacactttgggcttgtttggaggcaagagaattggagaggattgagggggctataatcaccttcctattcaaaattgaatagaaagtgaattcaaaatcgagggttgcaaatcggtatctgtttgtgaaatagcctccatggtcttttataaaatttgaagatgtggtgtttaaggggtttagttgttttcagtagtactggatgttattgcttcgctaactgacaaactgttgtgttctatgtataattcagacataaattatttttggctctttgctagtgattgtttttagaatggactgcttattttcaatatgatagaatatcagtaatgcacttattgatgaatgttttatcaacataggcttggaattgtctaccagactaccggttttacctcttccattagtgtaagatcagcggaagcaatttctccataatcatttgataatattgtaaatgtaggtttagaatgctgccatggcttatatattaatgaaattatattatttcaattcattctatgaatacgtcgcaactcatttggttgaattatatggacctgcaacagcttagggcctgtttgggaacacattattttcttagtcccaagacaataccgtgatatttgatcataccatggtattttagaccaaaaggtgtttgggaacaccaataccacggtatttttggagtcaaaaaaactttggtctggaccaaagttttttgcttgcacgtaggtgcagtcttctcttctacactacaactaaaatactgtatctccaaacaggtgttggattggacgatgtaaaatatagcacagttatgtcatagcatataataaactatagttgtgggtttgagaaacagagtttccaaacagacccttattatgtgtccaaatggtgaataacaattattttttcttgaacagcgcaggagagctgtgtgtcatttcattaagaaagaaagataacagttcatcatgaggggaggcatgtgtactgcccctccccacaccaacagtttagagtgcgccacacgcaatgacaaacaaacggccctacatgacaaacttacgtgtccagtccagccttcgtgccccaccgagtagctccttgagtgtcgtgttaccagcaagacaatagagctcggtctccttaccaacttcttggcagactaaagggacactaggattaagaccctcaaacacacacgcattcctatgcttccaaagagtccaggccacaaggatgactagggaattaaaccctttcctcttctcctttggcaaactgctggctgcccaacaccaccaggcagagaaagttcgcacatcaggttggggagcaactgcctgcagaccaacacacataatgattttggtccaaacctcccgggagtagacacaagaatgtgatgtatattctccacatcctgatcacaaaggaggcaaaggcagtggtgcggcagcccatgttttgacaggtgatctgctgtccaaaacctgttcttgattgctaaccaaatgaaaaacttgcatcgaagaggggcccatgttttccaagtcattttccaaggtgcaaacttaactgaacccaaaaagaaggcgttgtaagcagatttagaagtgtacagccctgaatttgttagcttccgtatgtgttgatctgaaacagcaggctgcaaggtaaaatcatcaactacttcccagagcttcaggtattcgacaagcacctgtacagtgagggcaccctggatatcagcagtccaagacctgcagcccaacgcttgagaaacagtgcgttgtctccttgcccgtttaggaattacctgaaagagattaggggccagctcacctacagtgcaaccgtgtagccaacgatctgtccagtatttagtggcctgaccatccccaaccttggtctccagggcaacatcaaagaaagcatgggcattacggggtacctgaaaaggcagcccttcccaaggtcgagaagaatccgtttttttagccacgaccaacggatgcacaaggcccaacccattgattcaaggttgagtatcccaagaccaccatactgtaacggcctctgaaacttttcccaagagacaaggcaattacctccattagcattttggcggcctgctcataagaatccccgccgaagtttatcaatgctctaatgacccacttagggagatccatagccatcatatggtggataggagtggcagtgaagacaacgcagaccacaaccagatgcccagctcggctcaacagagaagcctttcaaattgggaggctagctgctattttatctatcaatggcagcagatcagcctttgtcggtttctgaattgtgggaggtatttcaaggtatttgcatgtaaagcccttgatctcgcaatccatgagcccagaaaggagcagcaaatcagcatcagtacagttaaggggagttaccgagtttttactgaaattaatccatagtccagaggcatgaccaaaagcatctagaagctgagatatgagagataaattatttcgagttggactgaggaacgaaatcacatcatcagcatataaagaaatccggtgctttgcttgaagaacatccaatggttctaagaaattttcatgggcagctttggtaactaaagcatttaagactttcatggctagcagaaataacattggtgacaaagggtctccctgcctcaacccccgttgatgcaagattggactacccggctcaccattaaccaggacatgagtggaggaggtggagaggagaaggcataagaggttacaccatttacgaccgaagcccaaatattgtaagacctcgaacaaaaaaagcccaagacaccgaatcaaacgctttagtaatatccaacttgaggaggatgtgaggttccttcttcctgtataagcatctagccatttgttgcacaaacaaaaaattatcttgtatgcttcttcccttgacaaaggcactttgattgattgacaccatatctggtagctggggcgccaaacaattggctaatagctttgtgaccaacttggcaaaactgtggacaagactgatgggtcggtagtctttaacttcacaagcatcagctttcctaggcagtaatgagatgaaggctgaattaagaagtttaaacttggacacacatagcttaaagagtcgccaaaacatcgccttggatgatctgccaacaagacatgtaaaaacggccagtaaaaccatcagggtctggagctttgtcaagtggcatgtccttaattgtgagccaaacttcttcctcagataaagcttcctccatggaactcagatcatgctgctgcagctgcaatgcagcgagattcagcgtgaactccctttgttctgctgttccaatgagtttctcatagaaataaaaaacagcagcatgtttttcttcttgcgtggtgacacatcgaccctcaacctggaatttaggaatgaaattctttttcttgtggtatcttgcgtgctggtggaaaaaggaagtattggcatcaccctcccgaaggtgaagtatctgtgatcgaaggcgggcaatagtgcgctgaagggaggcaagtccaagacaatgcactttgagttttttcctctgccactccttgccactagagaggtgttactgatgcatttgtaggctgccagtaccagaggcgtaggcgccaggatccagcaaaaggagcagcagaatcaaacaaggaaagtgatcagaaaagtggctagcaatcgggttagtaggcaagcttttattacagggagatatgcattagtttgtttccagagtaaaggatatgcattagtttacttccagtttcagttatttagttccttttgaagaggtcgcctcatactataaaggcagacccgtagtttgtattaggatcatcgaggaataaagtctccctgcagttgggcgggactatctcggtcatcgtggctcggcaagctgccagccgcgatgacgacgtccgcctacctagccacagttcttaccctctcagatctgttcttggttctagcctcctcctctcacctctacggtcaccaaagaggccctccagagggggccacatcaatttggtatcaaagaccagtggagcatcgacacctctgtccggctccatggggaacgttcctgaggattccattgaagagaagctggaccgcctgctcgcccaagtctccacgctcaacacgcacatggcgctgcacgatcagcggctcgcgcgtatggagcagctcgtcctgccggggaccgataccgcggccggccttcacggcacccagcagagcgcgggcggcggtcacaccgacaaagggggcgccgccaagaacgacgcggatcctctacaggagtcggatggatcccccttgccgctcgaccgtcatctccacgatcgacgtcgcgccactggggcgccttctgatgacaacgacggcagcgccaccgacgactccctcaacaccgattggcgggaggaccgccgcatctccaagggccggcggggcgctggacgtgaggacttccgtccggacgacaggcgcagtggggatttccgtcgagaggaccggcgcggagggcgcgatcccgctggtggcgccttccaacggcgccgcaactggcgaccagagggccgcgaccggcgtcggcgggacgatttctacgaccgtgatcgctacgaggatcacaatcaacggcccaaactgaagtttccatcgttcgacggtgaatccgatcccctcccatggctcaacaagtgcaaaacctattttcgggggatgcgcacactcgacgacgacagagtgtgggtggcgtccctgcacttggacggtgcagcactggattggtacttcggcttcgagctcgactacggtctggtgccgtggcgccgctttgccaagtacatcaacatgcggttcgggcctccgctgcgacacaatagcctggcggagctgaaggacttgtatcgcatcggcaccgtggaggactaccagcgacagttctcccagctcctgtgtcgcgcgcaagacgtcacgccgcaccagcaggtcgagctctttactgcaggcctgggggaacccttgcgaacggaggtcgagctgaagcgaccaccgaacctccaaacagccatgagcttggcccgggctcacgagcgtcgacttacccacgctgcaccaccagccggccgatcgtcctcaaaggccctccctccggcgaccacgtctaagctggggggtgcaccacgacctcgcatgaagcgactctcgtcggaggagctggcagccaagcgcgccaatggtgagtgctatcactgcaccgagaaatatacgacagaccacaagtgtgcaggcaagggcgttttcctcatcgagatggacgacgacgccgacgcggagtccgtataagaagagctggggatctccctgcacgccttaacagggatcgacgtgggcaacacgatgaaactcccagtcgtcatcaacggagtctccctggtcgccttggtggactcgggatcgactcataccttcatccaggagggactggtgtccaagctggggatcatggtggaacgccggaccggcctctccatcaaggtggcgaacggcgatcgtgtccccagcacgggcgtatgccgccaggtggctatctccatcgacaaggacaccttcgacatctcctgctacacactcgcgatggatggcttcgacgtcgtcctcggggtacaatggctgcgtaccctagggccgatcttgtggaacttcgccgacctcaccatggcgttctggcacaaggaacgggttgtctgctggtccgggatcggtggccctcagccgcagctcgctgcgctggccgtcacgagggatctcctgacgaccctactcgactccttcaccgacatcttcgacgaaccgcgcgacctcccaccccctcgatgccatgaccatcgcatcacacttctgccaggaacaacaccagttgcggtaaaaccataccgttacccgcagctgctgaaggatgagatcgagaaacaatgcgaggctatgctgcagcaaggcatcatccgggaatgctcatcggcatactcctccccggttctcctggtccggaaagcggatgggtcatggcgattctgcatcgactatcgtgagctcaacagcaaaacggtaaaggactcctttcctgtcccagtagtagatgaactgttggatgaactccgagatgcgaggttcttcaccaagcttgacctccgcagcggatatcatcaagttcgcatgagtccggacgacatcaacaagacagcattccgcacacaccgcggaaaatttgagttcctcgtcatgccctttgggttgacaaacgcaccctccacctttcagtccttgatgaatgacgtcctcaaagcttatattcggaagtttgtcctggtattttttgatgacatactgattttcagcaagacatgggcagaacatttgcagcatgtgaaacaggtcttccaagtcctacgcgacaacaagttattcctgaagcgctctaagtgtttcttcggggaagaaacagtgtcttatctaggacacatcatttccaaagccggcgtcgccatggatcccgcaaagatcgaggcggtggaggcatggcctcgcccgcagtctctccgggcgctgcggggcttccttggcctcaccggctactaccgcaaattcatcgctggctatggcgaggtggctgccctgctaacagccctcttgaagaaagaggcctttcggtggtcggacgctgcggatgcagctttcctacaacttaaacattccttgatgacagcaccactcctccaaatgccggacttctccaagcgcttcatggtggactgcgatgcctcaggagcagggttcggcgctgtgctccatcaaggtgatggtgcaattgccttcttcagccgtgcagttgcgccccatcaccagaaattgcccgcttatgagcgggaattgatcggtttggtcaaggccgtccgcaactggcggccatatctctggggacgtgcatttacagtcaggacagatcattacagtttgaagttcatcttggaccagcggctctccaccattccccaacacacatgggtcagtaaattatttggctatgatttgactgttgaatatcgtccgggcaaattgaatggtgctgcagatgctttatctcggcgggaggaaccaatgggcactgtgcgcagcatatcactcccaatattctcgctgtttgacaacttgcgagatgaggcggccactaattcctaggtgcaggctatccgtgctcagttggaagctggaacagccaaagcagaatggactgaagtagatgggttgctgctatttaaaggcaagatcttcgtcccagatgcatcagctatgtggccactcctcttggccgatgcccatgatggggcgcatgaaggtgtagagaagacggtgcaccgttggcgggctacattttataatgctcatgccctccaacgaatcagagaatatgtgaagggctgctccgtatgtcaacgcaacaagtcagtccacttacaccctgccgggctactgcaaccattaccaattccagcaggtatttggagtgatatttccatggattttgtggaaggtttttccaaggtgggcggtaaatcagtaattctcacagtggtggacagattttccaaaatggcgcatttcattccattaggccacccatacacagcagcctcagtcgccaaggccttctttgatggcattgtccggcttcatggttttccttgctccattgttagtgatcgggacacggttttcactagtgctttttggaccgagctgtttcgcttagctggggtcaagctgcacatgtgttccgcctttcatcctcaatctgatggccagtcggaagtggtcaatcggatcattatcatgtatcttcgctgcctagccggcgaccgtccaagaacttggttacagtggttaccatgggcagaattttgttacaacacttcgtaccactccgccctcaaatgttccccctttcgggtagtttatggccgagagccaccaacattattagcttaccatcctggtgtcgcaaaggtggcagcggtagatcagcagctccaggaacgagatgaatttctgactgaaatcaaggaaaggttggtacaagcacaacttgtgatgaagacatatcaggatcagtcacgacgagaggtcgaattccaagaaggcgactgggtatggctccgtttacaacagcgaacagcagtgggtgtcatcgcggctgctccgtcgaaattgggtcctcgcttctttgggccataccaggtaacaagtcgcattgggaaagtctcttataagttgcagctgccagcacgtgcccggatccacgacgtcttccatgtatccttgttaaaaaagtttgaaggcacaacaccaaccgccatagttccattacccgaaattctgcatggcagagtcattccaactccagacaaggtcctcaaggctcggctgaatcgaggagtttgggaactcttagtccattgggtgggtcgaccagcatcagatgcctcttgggaacaattggaagacttcacacagaagtatcctctttttaagctcgcggacgagctgtttcttgtggaggggagaaatgttactgatgcatttgtaggctgccagtaccagaggcgcaggcgccaggatccagcaaaaggagcagcagaatcaaacaaggaaagtgatcagaaaagtggctagcaatcgggttagtaggcaagcttttattacagggagatatgcattagtttgtttccagaataaaggatatgcattagtttacttccagtttcagttatttagttccttttgaagaggtcgcctcatactataaaggcagacccgtagtttgtattaggatcatcgaggaataaagtctccctgcagttgggcgggactatctcggtcatcgtggctcggcaagctgccagccgtggtgacgacgtccgcctacctagccacagttcttaccctctcagatctgttcctggttctagcctcctcctcctctcacctctacggtcaccaaagaggccctccagagggggccgcatcaagagggcacgacgatcccttgcaatctcaatatgatggagaacctctttagccatgctaagctgaattttgatgttgccaactttcctctgactccacctttgcaattccatactaagctgctgcagcttgatatagaaacgctcaactggacaaattgctgagacaggagcattccaattttgttcaactgcatccataaaacttggcagcttggggcaaaaattctcaaaatggaaacgccttttcccttgagtcttcaccttcaaacccatcaagagggggcagtgatcagacaccactgaagcagcactctgaaggagggaatcaaggaacaactcatcccaatcagagcagcaaaaaacacggtccaggcgagcttcctctgatagggcggaggtatacctggtgaataacagtaatgctactatggatggatgaattagcaacataggcttgtaggtttttaccagtttcagctgttccattacctcaagaacagtggaaggcctatgtaaccctcacaagtttagagcagtttctacatgatcatttgataatactgtaagtgcagttgcaaaattctttgatggcttatacattagtggacaacacggcgttatattctttgaattagtcccatgcacaagtgacactctgctcatttaattctatagacctgttacaagtgacactctacataatcaatgttacgagctatttttatcagtagtcttttacatgttacatatcatgtatctcccaacccttttcttgtggggcattgaactggcggagatacctgctgcttataaattagtaaccgtggtttgctatgtactgcacagtttttgtgaaaccagaaccatcatggaaaaatttagatgtttttcagtaatcgttactgttggggacttgttctcaaatgctatgagttaagaacaaagcaacacaaatgttaatggttaaagaccttcatcgttcgaagcattatctcctttatgatataatgatcttcagacgaaggttatgaaggacataccttcatcatctcaattcataatgaagaatcaggatcatatgacatatataaataaaacatgaataatcatatgaagttattgaactatttatattttatcatataatcatgaataaatataaacgatattgaattacatttataccttcggtttaacagaaggtgaaaatccaagtgtgacgtacgagtgaatacaagtcagcgtgaacagcacagagttactgttcatctatttataagcacatgacacaacctgtgtaaaattacatccatgtccttgataactaactataagcgtgacacaaattatcatgaactaatcggtcttttcctatttaagtcggtgcaccccttagtctcaaggcatgtcattatgccgaagctccctagatcgtagcttcggtgtataccttcgcgttgtgtctgctttcgtgccatcctgccaaaggtgtttttgcttagaggaccttcggcgaagaagcaggcctcccaacagctactacttagggcctgtttggaatggagggatgaaaaacaccgaaaaggaagaaagcacaagaacaggaaagaagtgtagtggccaaacagaataatggaaaacataggattagaagggttagtgttcaggatgctggaatgaaaaaaacattggaaaatttggaatcggaaacttgtttgcttggacttgatgtggttctctttctcaagttatgatcaggtagtctgctcatctctgcagacgtaaaagagtgtttcttttagcaagctactgacatatgttccatttgacttactaccacacattcgtgaagtattgatcacttctatctcctttctgttgctttcacactaatgtcttcaagatcgatcttatcatttccctcaagtcccatctatcctcacctgggcaccatctctttcagcccacacgcagacaattcccatctggcaaggacagattgtttgtgttgtttcatttgggtggaggtggacaacattacactcagcgcagccgcttggtacgcatggaaaacagaaggcgagagaagaggctatgatgcacttgatggtgcactatcactgtagcaatatagatcttgctttcatgctgttggccaagatccagttgcttcttgtaggttcattcacctctgttttctctctcaagctgtttgcctcgagcatctgcaaaattttttgggtataggcagatgttgttgcattttatgaagcgaagcaatccttccggaggaatggtgagatttatccctcaaatccaatctgcacattcgaatgacccaaacatgaccttaaaatattcaagttgtgatggtgtccctgccgccatcactctgcccctaaactttttattcacccaaccttttcattgagccagattattgggaatttgttgactgccttatttcattctcatatagccctagatatccataagttttgtcattagtattccctctgtgataccactatcacatgtaattgtttgatttgttatgctcttgcaatgcacatgctttttcgctagttttcgaaactagaaaaaactcttctacatctataagaacctcaaggtgcttggttggtggccctgaatctgaagttttatttgcatctcttgagtccttaacgggacgatacgtgttaaaagcttcctccactatgatccaatcatcctggagtggagacctctattctggttccaggaagctgttatttggttaaggtgggagttttgtgaaacctttgttgctttaaaacctgatctgaagtgtcaatagccaaaggaaaactagatttttctgagctttgattactaaacaagtttgtttctgaaatttcattcctatgatcagtctttattcttccttcaaaaatcttggtattcagaactaggatgatagtttccagattcgctattaactcccactactgggtcctttttggcatgtgcatttgtcttcctgtctatgcagaaacatttgcagctggtgtataaatacattgtttctgttgttgtaccatttttttaacgtcgcaggagagctgcgagtcatttcattaaggagagaagaaacaagagtacgacgcaactggaaaaatagcgtcgagtacaaggcggttaggaactaacatgccacagccacacacatgaccacatcacttgtacacgaccacagccacccgaaacaaactttgagcagccctcgagttttatgatgctttgatcggttcggctgagcaaagagacttcactctggattttctttccttaggtgtgcagcagcatgacctgtctgagcttgaggtgccatttactgaggaagaggtctgggctactatcagagagattccgttggacaaagctcccttatcaggacgttgttagtgtttgttagatcttgatagaggttgttaagatgtgttaggcagccttggctatataatgccagggaaacaaggaataaaacaagcaattagcaaccaaccttgttgctagctcccccccccccccccccccccagggagttggtactctcacctgtgcctcctgtttcctccctcagcctgtgatcacggtgcccaagcgccagccacagcctgctagcaactgcctgccagcccttgattcgtatttcctgcgccagtatcaccattgctcctgcttaatctttctgaaaattgagcaactcatggtacctgggtggtttttttattaggtcaggtgtagaaattgaattggaccattcaatttgatactttgtttggcactttggcatttttcaaattccatgagatcagatgttggtaacttgtcaaggttttgttggtcatcacattggttatataattccatgagatcaagcgccttttggaaataactttgtccttccatttttgttcccctgtttgcaggataacattcctcgtcgcagaagcttgtctcatag

SEQ ID NO: 1067 - DNA, 9094 bp, Zea mays
  Intron number 1 from transcript GRMZM2G583661_T01 (locus G RMZM2G583661) derived from phytozome v7.0 (chr-ID 5; pos 7 9820195 to 79829288)
gcaaccggttcagggaaactgaaagtcgcctagaggggggtgaatagggcgaatctgaaatttacaaactttaagcacaactataagccggggttagtgttataaatataaacgagtccgaaagagagggcaaaaacaaatcacatgcaaataaggtggatgccacggtgatttgttttaccgaggttcggttcttgcaaacctactccccgttgaggcggtcacaaagaccgggtctctttcaaccttttccctctctcaaacggtcacttagaccgagtgagcttctcttctcaatcaaacgggacactaagtccccacaaggaccaccacacaattggtgtctcttgtcttggttacaattgagttggaatcaagaatgaagaagaaaagcaatccaagtgaaagagctcaaatgaacacaagtgtctctctttctagtcactaatttggttagagtgatttcggacttgggagaggatttgatctctttgttgtgtcttgtattgaatgttatagctcttgtataaggtgtgaaggctgaaaacttggacgcaatgaatggtgggtggttgggggtatttatagccccaaccaccaaatgagtcgttggtggaggctgctgtcgcatggcgcaccggacagtccggtgcaccagccacgtcacccggacgttaggttctgacagttggagcttctgacatctgggccaccggacagtccggtggtgcaccgaacagtcactgttcactgtctggtgtgccttctggctctgctctgacttctgcgcgcaccatagcgcattaactgctctctgcagacgaccgttggcgcgaagtagtcgatgctccgctggcacaccggacagtccggtgctacaccggacagtccggtgaattatagcggagcggctcccagaattcccgaaggtgagcagttcgaagtcgggttccctggtgcaccgaacactgtccggtggtgcaccgaacactgtccggtgcgccagaccagggcacacttcggttgtcttttgctctctttatttgaaccctttcttggtctttttattggtttattgtgaacctttggcacctgtaaaacttataatctagagcaaactagttagcccaattgtttgtgttgggcaattcaaccaccaaaatcaattaggaaaaggtgtaagcctatttccctttcaatctccccctttttggtgattgatgccaacacaaaccaaagcaaatataaaagtgaagaattgaactagtttgcattatgtaagtgcaaaggttgcttggaatgaaaccaataattatttctactagatatgcatggatggctttcttctaattttaaaattttggaccacgcttgcaccacatgttttgtttttgcaaactcttttggaaattcttttcaaagtccttttgcaaatagtcaaaggtaagtgaataagtttttgagaagcaattacaagatttgaaattttctccccctgtttcaaatgcttttcctttgactaaacaaaactcccccttaatgaaatcctcctattagtgttcaagagggttttagatgttattttttaagagggtatactaatttgaaattatatcaaaaataagataccaattgaaaaatcaccatttgaaaaatcttttcttaacacaaatttgaaagactacattttttgaaattggtggtggtgcggtccttttgctttgggctaatattttctccccctttggcatgaatcgccaaaaacggatacttgggtgaaatataagcccttattaactactttctccccttatggtaaataacatatgagtgaagattataccaaattggagagcggtgtggagcgacggcgagggatgaataattcgatggagtggagtggaagcctttgtcttcgccgaagactccaattccctttcaatctatgacttagcatgtaatgcacttgaaagcacattagtcatagctcatgaaagggataatcaaaggtatatatatgagctatgtgtgcaatatatcaatcaaaattcctagaatcaagaatatttagctcatgcctaagtttggtaaatgtttgctcatctaatggcttggtaaagatatcggctaattgttctttggtgttaacatatgcaatctcgatatcccccttttgttggtgatccctcaaaaagtgataccgaatggctatgtgtttagtgcggctatgctcaacgagattatccgccatgcggattgcactctcattatcacatagaagaggaactttggttaatttgtaaccatagtccctaaagggtttgcctcatccaaagcaattgcgcgcaacaatggcctgtggcaatatactcggcttcggcggtagaaagagcgacagaattttgcttctttgaagcccaagacaccagagatcttcctaagaactggcaagtccctgatgtgctctttctattaattttacaccctgcccaatcagcattggaataaccaatcaaatcaaatgtggatcccctggggtaccaaaggccaaacttaggagtataaactaaatatctcaagattcgttttacggccctaaggtgaacttccttaggatcggcttggaatcttgcacacatgcatacggaaagcataatgtccggtcatgaagcacataaatagagtaaagatcctatcatcggccggtataccttttgatctacggatttacctcccatgtcgaggtcgagatgcccattggttctcatgggtgtcttgatgggcttggcatccttcatcccaaacttggcaagaatgtcttgaatgtacttcgtttggctaatgaaggtgccctctaggagttgcttcacttgaaatcctaagtaatacttcaactctcccatcatagacatctcgaacttttgagtcatgatcctactaaactcttcacatgtagattcgttagtagacccaaatataatatcatcaacataaatttggcatacaaacaaatcatatgcaagtgttttagtaaaaagagtaggatcggcatttccgactttgaagccattagcgataagaaaatctcttaggcattcataccatgctcttggggcttgcttgagcccataaagcgccttagagagtttatagacatggttagggtacttactatcttcaaagctgggaggttgctcaacatagacctcctcctttattggtccattgagaaaggcacttttcacgtccatttgataaagcttaaagccatgataagtagcataggcaagtaatgtgcgaattgactcaagcctagctacgggtgcataggtttcaccgaaatccaaaccttcgacttgtgaataacccttggccacaagtcaggctttgttccttgtcaccacaccatgctcatcttgtttgttgcggaagacccatttggttcctacaacattttggttatgacatggaactaaatgccatacctcattcctcgtgaagttgttgagctcctcttgcattgctaacacccaatccgaatcttgaagtgcttcctctaccttgtgtggctcaatagaggaaacaaaagagtaatgttcacaaaaatgagcaacacgagatcgagtggttacccccttatgtatatcgccgaggatggtgttcacggggtgatctcgttggattgcttggtggactcttgggtgtggcggtctcggaccctcatcatcttccttgtctttattagcatctctcccttgattattgtcctcctcttgaggtggctcctcttgatcttcatcttcatcatcttagcttgatcctcaccttgagttggtggagatgcttgcatggagaaagatggttgatcttgtgcttgtggaggctcttcggattccttaggacacacgtccccaatggacatgttccttagcgcgacacacggagcctcttcatcatctagctcatcaagatcaacttgctctacttgagagccattagtctcatcaaacacaatgtcacaagagacttcaactagtccagcggacttgttaaagactctatatgcccttgtgtttgaatcatatcctagtaaaaacccttctacagctttaggagcaaatttagaatttctacctcttttaacaagaataaaacatttgctaccaaagactctaaaatatgaaacattgggctttttaccggtgaggagttcatatgatgtcttcttgaggattcggtgaagatataaccggttgatggcgtagcaagcggtgttgaccgcctcggcacaaaaccgatccgaagtcttgtactcatcaagcatggtccttgccatgtccaatagagttctattctttctctccactacaccattttgttgtggtgtgtagggagaggagaactcatgcttgatgccctcctcctcaagaaagccttctatttgtgagttcttgaactctgtcccgttgtcgcttctaatcttcttgatcctcaagccgaactcattttgagcccgtctcaagaatcctttcaaggtctcttgggtttgtgatttttcctgtaaaaagaacacccaagtgaagcgagaataatcatccacaattacaagacaatacttactcccgccgatgcttatgtaagcgatcgggccgaatagatccatgtggagtaactcaagcggcctgtcggtcgtcatgatgttcttgtgtggatgatgggctccaatttgcttccctgcttgacatgcgctacaaaccctgtctttctcaaaatgaacattggttagtcccaaaatgtgctctccctttagaagcttatgaagattcttcatcccaacatgggctagtcggcggtgccagagccaacccatgttagtcttagcaattaggcaagtgtcgagttcagctctatcaaaatctaccaagtatagctgaccctctaacactcccttaaatgctactgaatccgtaaaaagacagttgtagcccattttacataattgagaaacagaaagcaaattgtaatctaaagaatctacaagaaaaacatttgaaatagaatggtcaggagatatagcaattttacccaattctttgaccaaaccttgatttccatccccgaatgtgatggctcgttgaggatcttggtttttctcataggaggagaacattcttttctcccctgtcatgtggtttgtgcacccactatcaatgatccaacttgagccctcggatgcataaacctacaaaacaaatttaggccttgttcttaggtacccaaatggtcttgggtcctttggcattagaaacaagcaccttgggtacccaaacacaagtctttgaccccttatgtttgcccccaacatatttggcaactactttgcctgatttgttagttaaaacatatgatgcatcaaaagtcttaaatgaaatgttaggctcatttgatgcaataggagttttcttcttaggcaatttagcacgggttgattgcctagaactagatgcctcactcttatacataaaagcatgattagagccagagtgagacttccctagaatgaattctcctaattttgtgctcgggataactggcagggtacaaaatgtaaccctcgttatcctgaggcatgggagcattgcccttaacaaagttagataatcttttaggagggacattaagtttgacattgcctccctgttggaagctaatgtcatccttaatgccagggcgtctcccactataaagcatgctatgagcaaatttaaattttttattttctaattcatgctcagcaattgtagcatctaattttgctatatgatcattttttttaattatagtcatgtgatcatgaatagcatcaatgttaacatctctacatctagtgcaaatagtaacatgctcaacggtagatgtagagggtttgcaaaaatttagttcaacaatcttagcatgtaaaatgtcattctcatctctaagattggaaatagaaatattgcaaacatctaattccttagccttagcaattaattttttattctcatttctaaggctagcaagagaggcattcaatttttcaatcttagcaattgaactagtattatcatttctaagattgtcaattgaatcatcacaaacatttgatttctcaaccttagtaattaatttggcattttcatttctaaggttggaaataatatcatggcaagtgcttagctcactagataaattttcacattttctacctctagagcataagtatttttaactttaacatgctttttgttttctttaattaggaagtcctcttggctatccaagagttcatccttttcatgaatagcactaatcaattcatttaatttttccttttgttgcatgtttaagttggcaaaaagggtgagcaagttgtcctcatcatcactagaattatcctcatcactagaagttgcatacttagtggaggattttgattttaccttcttccttttgccgtcctttgccatgaggcacttgtggccgacgttggggaagagaagccctttggtggcggcgatgtttgcggcatcctcgtcggagtaggagtcggtggagctcttgtcggagtcccactcctggcaaacatgggcatcgccgcccttcttctgtagttcctcttcttttctcttctctttcccttcttgtcgtcgcccctgtcactatcacttgataatggaacattttgcataaaatgacgggcttaccacacttgtagcaaacttcttggagcggggctggtagtccttccccctcctttgcctgaggatttggcggaagctcttgatgatgagcgccatcacctcattgtcgagcttggaggcgtcgatggggaccctactcagtgtagagtcttctttcttctcctccgttgccttaaatgccacgggttgcacatcgggtgtggaggaggcgccttgctcgatgattttcttggagcctttgatcatcaattcaaagctcacaaattttcctatcacttcctcgggagacattagcttgtatctaggatcaccatgaattaattgaacttgagtgggattaagaaatacaagtgatcttagaataaccttgaccatctcatggtcatcccatttggtgctcccgaggttgcgcacttggttcaccaaggtcttgagccggttgtacatcacttgtggctcctccccttggtgaagcatgaaccgaccgagctccccctcgatcgtctccctcttggtgatcttggtcacctcgtctccttcgtgcgcggtcttgagcacgtcctaaatctcctttgcgctcttcaacccttgcaccttattatactcctctcgacttagagaggcgaggagtatagtagtggcttgggagttgaagtgttggatttgttcgacctcctccgaatcataatccttgtcccttcctttggtcctgcgctccatactcaacaatatcccatatacttttgtggagtgaggttatgtgatgcctcattttatcactccacatagaataatcttcaccatcaaacataggtggtttgcctaatgggacggaaagtaatggagtgcgttttgaaatgcgaggatagcgaagggacatcttactatacttcttgcgctcatggcgcttagaagtggcggatgccgattccgagccggaggtggagggtgaccaagagtcggtctcgtagtagatcaccttcttcatctttttcttcttgtcacccttccgttgggacttgatggaggaagaggattcctccttgtgcttgtgggcggactcccttgagtgcgttctcaccgagcttgcagacttgtcgccggtcccgatctcctttttggcggatgctcccgacatcattcgagcggttaggctctaatgaagcatcgggctctgataccaattgaaagtcgcctagaggggggtgaatagggcgaatctgaaatttacaaactttaagcacaactataagacggggttagcgttataaatataaatgagtctgaaagagagagcgaaaacaaatcacaggcaaataaggcggatgacacggtgatttgttttaccgaggttcggttcttgcaaacctactccccgttgaggtggtcacaaagaccgggtctctttcaaccctttccctctctcaaacggtcacttagaccgagtgagcttctcttctcaatcaaacgggacactaagtcccccacaaggaccaccacacaattgatgtctcttgtcttggttacaattgagttggaatcaataatgaagaagaaaagcaatccaagcgcaagagctcaaatgaacacaagtgtctctctttctagtaactaatttggttggagtgatttcagacttgggagaggatttgatctctttgttgtgtcttgtattgaatgctatagctcttgtataaggtgtgaaggctgaaaacttggatggaatgaatgatgggtggttgggggtatttatagccccaaccaccaaatgagccgttggtggaggctgctgtcgcatggcgcaccggacactatccggtgcgccagccacgtcacacggtcgttaggttctgaccgttggagcttctgacatctaggccaccgaacagtccggtggtgcaccggacagtcactgttcactgtccggtgcgccttctggctctgctctgacttctgcgcgcactgtagcgcattaattgctctctgcagacgaccgttgacgcgaagtagtcgttgctccgctggcacaccggacagtccggtgaattatagcggagcggctcccagaattcccgaaggtgagcagttcggagtcgggttccctggtgcaccggacactgtccggtggtgcaccagacagtccggtgcgccagaccagggcacacttcggttgtcttttgctctctttatttgaaccctttcttggtctttttattggtttgttgtgaacctttggcacatataaaacttataatctagagcaaactagttagtccaattatttatgttgggcaattcaaccaccaaaatcaattaggaaaaggtgtaagcatatttccctttcagaaact

SEQ ID NO: 1068 - DNA, 6230 bp, Zea mays
  Intron number 1 from transcript GRMZM2G101545_T01 (locus G RMZM2G101545) derived from phytozome v7.0 (chr-ID 7; pos 2 568060 to 2574289)
gaaataacaggaatatttgttggtaatttctttcttcccctctctaactcccgttcacagtatttattacatgacggctgactcagcgcgtccagcaagacgatggatatcttgtattgggcttgcgaacacgacggcccagtctgataattccagcttcgacatcgtcttggcccatttccgcagcctttacatcttccatcagaactccatccggctgctgcacctcgtcaacatgtctgctcacatgttgtctgctgacattccccctgtcttgaaaggacgcttgcccccaagcgaccgcacatggaaagcgacgacggacatcacattcatcttcccaagaatccatagcagcatcacaccccgaccacctgatcaaaacctgatcgatagaagcacctccgcgggaaaccactcgacgctgcagcacttggacaggaacacgaagagcgtcaggcactgagggaagagatgcactcaccaacacatgttgtttgacagaaggtttcaactgggacacatggaacaccggatgcacatgagaagaatccggtagcttcagtttataagcaacagcgcccacacgttgcagcacttcataaggtccaaaatatttgtatgaaagcttatgatttgcccgaacagccactgaagattgaatatacggctgcaacttcaaatataccatatcaccaatttggaactccctctcagacctggatttatccgcctgattcttcatacgctgttgagcccggagcagattgtgctgaaccacacgcatcataagctcacgttgcgacaaccaagcactcaaatccgaatgagagactgaatcatcaatagtcaaaccgaaatggcgaggctgccttccatacaatacctcaaaaggagatttacccaatgaagaatggaaacaacaattataccaatattcagcaactgacaaccatgaattccacttagaagggcaagcctgaacaaagctgcgcaaatacgtctcaagacattgattgacgcgctctgtctgtccgtccgtctgagggtggtacgtcgaactcatctgcaactgggtgcctgataggtgaaataattctttccataagttgctagtgaaaattctgtcgcgatccgacacaatcgattctggcataccatgaagtcgatacacagctgccatgaatacctgggcgacctttagtgcagtaaacggatgacgcaacggcacaaaatgagcatacttggtcaagcgatcaacgaccaccaaaatagtattgtaagatccagactgtggcagcccctcaataaaatccagcaaaattgcttgccatgcttgggtaggaaccggcaatggctgaagtaatccaggatatcgagacctgtcaggtttagcctgatgacacacttgacaagctgcgacaaattcgcgcacagaagtcttcatgcgtggccaataaaagagttgcttcactcgagcataagtaacaggaaatcctgagtgaccaccaatagcactgctatgtaatgcactgatcacagtagtctggaggttagtattctgtcctaaccaaactctgtttttgtaccgaataacaccatcctggagagtataaggaggttgagctgacattgctaaaacagtgaggagctttaaggcctcaggatcttgttggtaacctgcaatcacctcctgtaaccatgtcggagtggacacagaaatagcaacacattcgccatcctcatgtggccggcgagacaacgcatcagcagctgaattatctaccccttttttataaacaatccgataatgaagacccaacaacttggtgaatactttttgttgccattgagtatggagtctctgctcgttgagatgagacaaactgcgatgatcagtgtaaataacaaattcagcatgctgtaaatatgaacgccactggtcgactgccaacagaattgccaaatattccttctcataggcagataatcccatatttgtcattcccagggccttgctcacaaatgccaatggatgaccctcctgctgcagaacagcccccactccagtaccagaggcatcagtttctatggcaaatggtttatgaaaatcaggcaacgctaatacaggagctgaagataacgcttgcttaagagactgaaaggctgattcctgaacatcagtccacacaaagacagcatgcttcttaagcaatgaagttaatggtttggcaataattccaaaattctttacaaacttcctgtagtagcctgctaggcccaaaaatcctcttaattccttgcaagtcacaggtactggccacgacacaacagtagacaccttggacggattagtagataccccagcttggctgataacatgtcccaaataagcaatttcctgtcgaccaaaggtgcatttggacaacttgacctgccaagaatccttgagcaacaactgtaacacctgctcaatatgttggagatgaacctcccacgtagggctataaaccaaaatatcatcaaaaaataccaaggcacatttgcgaagcaaaggctgcaaggtcttattcatggccccttgaaacgtcgcaggggcccccgtaagcccaaacgacattactcgaaactcataatgtccatgatgagtttggaaggctgtcttatgctggtcttgaggagccattcgaatttggtgaaacccagctcgtaaatccagagttgaaaaccaagcagccccatgcaactcatcaaggaactcatcaatgactggaacaggaaatctggttttgactgtgagggcattaaggtgacgataatccacacaaaacctgtaagtgttgtccttcttcttgactagaatcactgaagaagagaactcactttggcttggctgaataattccagcatccaacatctctgtcacttgcttttcgatctcagacttcaatgcaggagcatacctataaggtcgcatatgaaaaggttgtgcacctggcaacaatgcaatatggtgatcacaatccctggtgggcggcaaaccagttggcactgcaaatacagactggtagcgcagaagcagtgactgtagatcaccagacaactcagaaatgatagtctggtccttctcatttaactcagtcaaatggcacacctcaatcagagaacaatgtcctttagaagattgcaacccaaacaatttaacttgagtacccctgtaagggatgaccacccacttctcagtccaatgcacctccataggactaaactgctccagccaatccataccaacaataagatcataagtcacgagtggtaacacacgtaaagtggactggaactcgcactgccccaacgaccaaacagcccctaccaactgttgagtacactgcatttgacacccattggccacctgaacagacaattccttggtcataggggttaatcctgtaaggtgctgggccacccgggaactaagaaatgaatgagaactacccgaatccaataataccagcagatcaattccttgaataccacccacaaactttactgttttaggtgctgaaatatcagtcacagcagcttgagacagacacaactgaagttctgcggatgcttcagatatatcatcttcctgttggtcagacagatccagtaacttccatagttcatccaccacatgtaactggactgtatcagcacaacgatgtcccttggcatattgcaagccgcatttataacaaaggcctttagctttccgatatgcaaacaacgaagccagcttatcttgagtggtcttttcagtagtagcaggagagtcagcaaccttggcattcggcaactgacgagaaggcaaaggacctttggagaaggactgagaataagatgacatctccatcctgcgaccgtctttcttcttgtcactgacttcctcctgcaattgcgccaaaacgacagcagtatccaaatctttaggtcgttgcacaattactactgatttaatatcatcacgaagaccatcaatgaagcgagtagtataataaagaggatcatcatgaggattatatgcatgcaattgatctatcagctgaaaaaatctctcaacatactcagtgacagtagaattttgtctaatgtgaaatagctgcctaataagaagttcgtgctgatttttgccaaaacggtccccaatcatgtgacagaaatcaggccatgtgagatatggcaactgatgctcaatggattgaagccatcgtgatgctggcccagtaaaattcatcttagacactttgatccacacactagggtgtactgaatacatagcaaagtaatcctcgcaacgcgactgccacaacttaggactgtcgccatcaaacccaggaaatggcatcttaggcagattaccaagagatcccgagtacgtatccaaagcagttcccccaaaaacatcatgcgtactggactggaaattctgagggaaaaaactagggccagcattcataccattgtgcgggagtaagccgtgagtatagggatacccagggccttcctcccggtggtggtaagcatcatgatgtccgcgtggtgcgtcgacgttcatccgaggagcagacggacgcgccaccggcggtatgtatggcatcgacgcatccggccgacgtggaggagatgcgtggtgcggccgcccccagggttcggacatacgcgcgacctccgcacgaagagactccacgctggcttgggcgacgcccacagagcgctcgacgtatggcctccaagactccagaaccgccgtagccgattcaaggttggccacacgcccagataaggcctcgtcgacggcatcaatgcgctcccatgtcagagattggaattcccccacctgagtctccacctgatgcgacaacgaccgagccatgtccgctcgaacagcagcaggaacctccacctcttgcagcttggtcgccaaggtgccgatagaagcgatgttacccgccactgtcttctcaagcgtctcccaatggcggtcttgcgcgtcgaggcggtcacagatctgcttcagcagccgagcttgggcggccatggtctgcgcctgcgcctcaagcgccacagcgatgctcgaatcccctgaactcgccatcggtgagggacgggaacagctgtgcccaggatgaacaaagccgataccacttgtaactatctactggctaactacaaaggaaacgaatggaaataacaagaatatttgttggtaatttctttcttcccctctctaactctcgttcacagtatttattacatgacggctgactcagcgcgtccagcaagacgatggatatcttgtattgggcttgcgaacacgacggcccagtctgataattccagcttcgacatcgtcttggcccatttccgcagcctttacatcttccatcagaactccatccggctgctgcacctcgtcaacatgtctgctcacatgttgtctgctgacacagaccagagccatcgagcttgacacgctgctccctgtcggtgccctctcggcctttgttgatgtggttagctttgtggatggcgtcggtgtcgtgtttgtgcggacgggcgatgggctattcaccattgatctgatgtctcgccgggtcacaaaggtattcaaggacactttcttctccggcattttcccctacatgagcttccacactccaggtaattgcctcttttgggttcaccctgtatgtctttatcccagtcccagtagctttgcttgtatgtgatgaacgatgaattagtaaagtggaatatcacgatccaataaagaaaatgcattcctcttatataggtatgctaccatacttcaaatcagaggatatgccgagaattgttttgccatttgttatacctgtaatgagcagaatgtggggtcttgaaagttgaaacttatctggtatctcaatataggctggcccagtaaactacccagcaggtgaatggatacactttaaatttcttggatactatctttcaatgtcgcctgataacatagatgatatcaatgccacacaaaggatagctgctcctggtagcctgtttaattacccagcaacatgtttttcgtgtactgtcagaaaccattttctagtaagagctaataggttttcaaccagctgatgtaatttcctaaatttctgtatgtagcactggaagttgcctcaactggtgaggggccaagt

SEQ ID NO: 1069 - DNA, 31881 bp, Zea mays
  Intron number 1 from transcript GRMZM2G074124_T05 (locus G RMZM2G074124) derived from phytozome v7.0 (chr-ID 5; pos 1 6132526 to 16164406 reverse strand)
acgtgcactgcaacttctgcaacacaattctcgcggtaaacaaccccatctgatctcatctctctgtttgttcccctccctcctttgaattcccagttctcgatcggcatgcatgcctctgaagtgcagatctacaaaagggagatgcacatgaaatgattggctgcgcgcgcgcatgcatcatacagtttattttgtaggatttggctgtccctcttgctggatttcatcttcttcttctttactttttttgctctaaattgttttgtaaaggttgaatgaaatttctgaatcactcccgtcccttgtcgtcctagcttcaataatcgttattttcggccggccggagtgcgttattgaattcttacttttcttttcaacttgatctgaagctcgatctcttctcttgtacctttccaatttgactgctatactctttcaccatggatatgcatgggaggagaagtggtaaaggtcagcagacatattgaaatttggggtgcttctcgcgccttttcctctgatcaaatcttgggaacaacgtgattaatagctgtctagcttagaggaaactactagctagtgagcaacaggcgcaggtgcttactccactacatatacatgcacacatgcgcatacttccttttgaatatggttttttgataattccatatatactcgcaaaattttcaagcattctcgccttctgtaggaaattatcatcattgttgagagtgagaggtggtctattagatctcaagtatagcaaatttagattattcgtttgcctggtgtgtatgcatcatgcatgatgtatagcttcgtgcataaccagtcccgtgctttagtttcaggtactacttaaaacacaatatatcgggcgttagatctacgcattaatttcctacctgaactgcaacaaagggcgcatgcaataataactgttaagtcgataaaaaatttagtatgtgtaacctgttattacgtggatatgtaatttttatgttctataataattaataaaccatgtgttattaccctcctcgtcctcctcacataaagctaagccgtgatatactagtaatatatatgggccaattatatctgctgtaaaacgttgctactttttattcatggaacaaaaaaaaaatccattatggagaagtttaaggagtgctctaaattaagatcaaaaccatttactggaataatagaggaagaacgtaacaatgtactgaagcagtatacatgtataatgtgtttggtttaaggaataaagtaatctatcttcttctcactcctcacttttttatttggtttgtggaatagaatgggttgatccatcaccacctcattccttataagctaataattagtatatacatgaggagtgagttgattccaccaaaattgatggaataaacttatgatgcatcatctcatgaagcatagagtgactccacaaaccaaacacacccgtatatagtgtactgcaggcctgcagggtgacttcatcccgatacaaaattcaaataattccctattttttccgataaaggaagcatttatttaaacaccaagtacgatacatgcatcaaattgcattgtatagaatttatgcttagaatttatccatacatcgacgagtacagatttcttcttgtattgtacagcatatagtcaagtacaggatctaattcggcatgcatgctgagctcttgcatgaaatggcctattctatcattcacacgttatgttccgttctctctacgcttgaacgtaatacccaatgtcttttagtaatggtagggatcctacactgaatactcaatcaaacacaaatgtgtaatgctaatagtgtgtgtcatatatactatgggtcttgcattagcctcagcctagctacattagagtgttgatgcagcataacccggccaagctagtactgtaacgtatgcaatgtccctgatatcagttttcttaatttctgcataggcaataagccgcttttagtgacactttgtttggctgtttacattttgttgcatgtatgcaatgcacaagtttagatacatgcctgctaaattaatacatgcaaccagtgcagtgagacactatagtagctaagagcaagatcatatctttcgcaagagatcttgccttggctgaagtatgaagaagtggcagtactttttttgcaactccaatgccatctctctctctctctctccccttagccaatgcaaagataaaaaggaagtcgatcgatctttgttgaatcccctgcatgaccccactaatatatgcaaaacatattgcacatgcccgtgtgccaaagtggctcctgcatgaattgtcactgtctcctgcgtctttctgatccctctaaactctgcccaaatatattctttcggtgccgtttttgtgtgcacagcatgtgtcagagacggcggtcgatatgagcaaatgcatatatgcatggattattatgagtacgtacgttctctataaaatcagatcacacatcgcatcacatgcacgcattgtatagctagctagagcagctaggcgtcacaacagctcccatcatgtgacagatttcacctcgtccgctcatgcatggagcacgtacgcacaatcatttgtagtagggcacttgttcaatcctagcttaagatcgtctcatgggacgacggagtttgtgcgcacaaaaaaaaaaaaaaggccagcgcgcgtgagtgaggacgaatcaaacaaagtatggctggcacagagtactgatgtgcactgcaccaacagttttggtgcaaatgaaaatactgttaatagatggaaagagaaagggaatgaaccagtacgtgtttgtttactactgggaaaataaataaaattaaaagagtggcccacttgtagtagtggtctctgctcaggctcagcagcagcagagcgctgataaaagtcatggagcaacagtttcgcaggcagccatgggtaacaggaaaagggaaagagagagaaggcggttctccaccatgctttgtgctgtgcaaaaaggaaaagccacagttacatatagctttgtttggtgcgttattatatttgtatattcatgcatgcatctgcagaagtcgatcgacgctcgatccttgttcagaaagtatatatatatatatatatatatatatatatatatatatatatatgtgtgtgtgtgtgtgtgtgtgtgtgtgtgtgtgtgtgtgtgtggggcattctttttagtttagttttgtacatgtgtgtttgttcttcgaaagcatgcttcattctccttcgtcaaatctgcaggtcagtgtcccgagtcacagcatgctgaacatcgtcacagtccgttgtgggcactgcactagcctgctgtcggtgaacttgagaggactcatccaatcacttcctgtccagaaccaccactactcccagcagcaggttggaattagtgtgaaataatatatagaaacacactatatatactaattagtagtcgtcgtccgtgcaatgcatgatctgtgtgtgcatgaaatatatgaagagacacagtcctgctagttctaaactccttctaagctagaagagctaatacatacaaacccttttaattgccgttgatttgcttcaaaattaattgtaacaataattcatgtctgcaaagttcagagaaacgtatagctagctggtagtatatagcagataaaagccacactatatgtcaatgtgcatgcatgcatgggtcatgtcacgttcatccaatgcctttctacagtagagacaaaccaaaggatctgaccagcactgctgctttctcacatgaaagagctttaatttagagcttgcacatgcttctgaaccagatgcatatatcatcagccctcgccatgcatgacatgaacctagctgcagggacggttatctgtagcacactctctgtccgactgtatctaaggccctgtttcaatctcacgggataaactttagcttcctgctaaactttagttatatgaattgaagtgctaaagtttagtttcaattaccaccattagctttcctgtttagattacaaatggctaaaagtagctaaaaaaagctgctaaagtttatctcgagagattggaacagggcctaactttaaacctttctgatgatacatactacatgctggaaaaacactatatatatgcacagtctcaattattcgcttgaaaaaaggagcttcacattgataacatgatcattaattgtttcgattggcggcaggagaatttcaccgtccaaaatatgggttttactgaaaattaccctgagtacgcaccttcgtaccgcatgccaacgacgctgtcagcgaaaggtgatctggatcatatgctgcacgtgcgcggtaagcttattgattcatacatgcatgtgtatgctactgctctatatattcttctatgttagaaccggccggttgtattcactacagataaaggtgatctgacctattatttgatatctgaagtgctgcccttccttattcaataatgtgtttccttgattccttaacaatttcccggttgatgtcatattagtgttgcaatgggtttacagtagttcaccttagcctttttagtagatcaagagcatatcaccttttgagacagtaagacgccttttcactttttacctattttacaagaaagtaggtcagaggacccaagtcttttgctgtaaaattatactttgactccttgctcagtttgtttgtggttgagttagtagatgagctaacaataattatttcatctacataaattagcatgcagactaatatcccagcttgtttgaaccaaatagtgaggcatctgcaactaaaagattgaagccaagttcatgtagttttcttatcattcttgagtgctagtcccttggtgcttgttttagcccatagagtgacttctcgagcctacaaatatatttcaaaggtcttgttggatcattgcgactaggaggttgtctcatatacacctcttcttcaagcacccaatgcaaagaatgcattctgaatgcctatttgtttcatgctccatatttgagagattacaagtgataggatgactctgattgttgttggtttgataactggacaaaatgtatcaagataatcaatagcatacttttgctttgtgacaagtctagctttaagtctatgcactaaattaaaccatcaacctttctcttcactttgaaaaccatctactatcaatgagatctattcctttccattatgcttggtaattttccattggatatgccatctaactgcccaacaatgaggacagggtcaaatgactgtggattttttgtgatgagttacatgaagtcttatgatcacaatgcaggtgtcatatcttctttcaatcaactagtaagtgactgtgctaactgtttctataatccggttgccatcagttgtacatgttagctatagacgtgtctaatgcacgctatgcttttattgcaggacaattcccgagacctacgtgctcatgcccttcatcaactcacattcaatcgcatcaacaaggtgttgccacttccattagatatccagagatttatgtttgcgcgcaattagtgaaatatgtcagaactaagcaatggtgtgggcaatgtaccgtactgtggtattttggccattattgtcagttaacaattgtaggaagcttccttatatgtgctgtttcagaacaattgtcatgctactttgtcttaggggtgttacccaggttctttctgtgaactttagttggctggatacttatggttatgttgcgaatatgtgaacatcatatgttttcacttctgtgtgctttaaatatgatctgtttttatgttctgaagatgttatatgtatacctcattccttaatattaccatctgtttatatgcgagtatcatccaggctatatacgatgtttcctacttcaaattatgcaacattagtaagcaatatacgctctatttatcagatttcaacaactttatatcttagattattcgtatcagatacaatagactactcgcgcgcctgactcactgctgtcgttatcaacagtactggtatatagtttacaaattatacgatcatcccacaagttatctacgatgttttgtagttccagttacgcaacattattaagcaatatatgcaccatttattagatttcaatatccacctctatataaatcagttgccaaacaagcaaggtttattgtaaaaaacaaattaatcgtatctcatacaacagtctaatcactgtctgactcactactatcgaaatcatttgcgtgtttttttgatgttgttgtctcattccaatcaggagctttactgccacccttgttcctagatcctggaggtcgtcctctcttacgtccagcaaggcttgccaacctttgtctattttcctccattgacaaacatgtcctactgttgtgaccatcagcaattccacacttctgacatttcctggtcattttctttgtaccttttgctcccaatttaataaccctttcttcactcccctttattgttcttcctttgggttttgagttacttggtcttgccaagcttatcccatcgactgcaaattccagtttctgcaattcaaaagtaaatacttctcagcatataatattatgtagtccaacatacagtatttataccattattacctttctggcattatcattttgttcactgacaccactaacattcattattgcgtgatcatgcaaattaacctgtaattgacaacacattttgttaagctcaatcataacccaataactcaaacgtataaatcatgtatatgtataactgcaaatcagtaaagttgttaaagatattacctcttctaatggacgtattggtatatgtatttgatcattggccacaccttgttcaagtatattagatacgtcttgaatttcctgaaaatttggatgaaagatcattatacatcatttacaaataaacattcacaacagtacgatccaaaccttgttatttctttcgtcaaattcatcatctttttcgttgtctctattggcttcatcatcgtcctgagattttattgtttcacacctcatcaatataatatgattaataatatgttacaacatacatattaaaacaatacatacctgtataccatctcctccactagttccacaagtttcctcaatgtctatatctgtttccaaacgcgaaagtacttcgagaagctcatccattactgttagggctctatcattttcctgctttggataaactagcatgatgcactactttcattgcctttttaagcaacatcttctgtctatatgacttagtttctccatccttccccttcaaattcctatcatctcttgaaaacggaacatcttgccttgcagaggtggtgtatctttgtaaaatatattctttcggtatccggtcaatctgaagatgcataaacgcgcgtagtacatgtacacagaatagccctataaaacaataacgatcttaagattttgtttatatgttttcaatgtatatatttactatttagtactccatacctgtatgttcccaatgtttgcattcacaagtatactttcctgcatcttcatcagctgtgactttgaattggtgctgtccccaaacaattttattcgatctagttgtatgttgcactacccaatcatttgcaccccctccttcgtcgtgcattatcttgaatgcggttgcatatttcaaagattcctggaatctacacatcacagcccttgtgtatgctcttgcaacccttatctcaaacatgtatagcgtgttcgtttccttttgaccctgtggcatatataatgcaaattagtttacacttatattaaagtatcaatatacgacataacaattttatcctcaccatgcttcccactgcttcttttgactctttcatctttctactgtgtagaagtttcatcatttgcttggcgaattgatgaagcgcagtatttgcatcgacatgtgcgcttttgacaagcctgttcatgctttcgctacgctgtgtagacaacattcgaccacaataatgatttttaaaaaaagcaggcacccaatccttacgtattccatacagcttatccagagtactgttatcgtgcagatcaaaatcttcaagtagcattgaccatgcagtctcaaactccaactcagtcaaaggatgatgtattatagattgaaaccgtgtcttaaagtccatttcctcaaatcttgcatacaactcgtttagaaaaggcatatacctattttgcacatgccatagacataaacgatgtattgtgtgtgggaaaaccctctcgagggctactggcattgcaggatcttgatctgcaaacatatatgacaaaattgtacgaatcttattccatgttatataaagaaaataatatctaatttaagccatatttgatgtatatacatttaattcattattatcagtcgtacctgtcagcatcactcgtggcccttcggttcccatgcatgttttgaaggcgttgaatacacattcaaatgtatcaacagtttcatcccccaacaatgcgaaagcaaatatagtgcaatgtaggtggtgatttgaaccaacaaacatacctagtggtttttcatacagattagtcttatgtgttgtgtcaaatgtaaccgcatcaccaaaatcaatgtaatccccttgctggcttgcatgtgaccaaaatatgcttaaaatcttgccttctttatccaattggaagtcagagaaaaattgtggattatcctttttgcaggatgcaaaaaaggatagtagctttgccacatcatttgcatttctttctcgttgctttgcctttttcctgaaattattgtgaaaatttagcattaggcggaaacaacaatcagcaaatatcaattatgtatatcaatcggaacatatcataaacttacaggttatacatgtcctgtgctgttacaggcacactctcaggaccaccgtgcatttctgatacataatccataatacaatgttgcgggattcgactctcttgcattgaacttatgaactccatgtattcaggatcatgcgtcttgttgcattgtaattgattcttttcggtatcctttttaaaaaattcatgattatgatccaagtgcaacagatcaatacgcactgatataactgtctcttttgcatcatcataaatttttttaagtttcataccggccttgcattgtgtccgtttcgaactggtactacgtacctttgggtttgatattccccttactgatcttttgccttccatcgagcaattcaaccacttacaatttttccgttccctatactttttcaatggaaatccaacttcatatgcatacctactataaaatttatatgcttcatccaccccactgaatgtcataccaactttaggtactaatctcggatcaattgtaacttcctgtgcaaaaaatataaattgtatcatctatggtaccctacatatttttatgttgtatgtagatcataacaattttcaggcaaaagtttcacagtgtatgcacaatataaatactgaatgtcacaccatctctagctgccttatactgtatacaattcaacgtacaatactgaaaattcaaatcagttcaatattacttacatgtctctgcagaatcactggtgtgtcctgttcatgatcaccaatagtacgcatagtattaaggtgctgtcctccttgatttactgtcatccttgatgcctcaaatatggtctgttcatcaacccctggggccctcaaagctgctggtggagtaattgcgtctacagcagtagctgattctgtatgcgtaattccatctgacgctaactggtaccctccttgttcttcttcctgcaccattgttacgatatccaagcattgattttgtcgatgaacagacgtcggcgtcgcatactcacttatggtcttgtttccccatggcgccgccatcttccagagcaaatacgcccttcacccagcagcggactatcaaatgatgcgtactctccacttttctggaagattatgatttttttccctgtaccaagcgtatatccaatatcgtggatgcatatttcacggcgcatatccattacccgctgaattttaggatcgtggccgcgctgatcgtgggcgctctgatcgggggagtaacagtcatctatgcaattttatacatacatttacggtgtcgtaactgtctgtttaaatgcgcttcccccttttacgagttacacgtcaccgatccacgtacgaacacgtggcccacgttggtttacgcatatttgtacaagctattatacttgcataactgtagtgcattaaaacgggccgcctggatcgatccattcggttcgaccacgttcggctcgtctggctggggctccgcacacctatatgaagcccagggcttccattaccatcgccctatatatatatatagtatttagagccctgggctctttttaactacaggaagccccaaccacccgctcggttgaccaggcgaccatccggtccacccactataatgtttacgcttagttatacacaagtttacgctcatgtaccattgtataaaaccaaccgctctacctggccttccgcgcgatggctgagactagggtttcagtggcggctgttgtgcgacacgagcgagcacggcggacaagcatcccatagacgagatccatggcgatcgcctccctgtcatcgttccagaggtgcctcctagctcagatctgttcgcccctcgccctttccagactcggtgattcgcagactcggccagctgcctaggcaccggccaccggcgtccggatctcctgctctgctgctcgccaccacgggggctctccggcgttggctcgacgcggcagtgccccccggttactctgcctcctcgtccgaccccagcgccagccccaatatctcctccacgatgccatctccgacaccctctcctgctcccgcgccatcaccgaccaagaatccagctccgggcatctctgcgtcaccgcctgcaccgagctccattggccagatgccgaccgccgcctgcaccgaggtccattggcaattctctgtgattcctctttcttgtctctctagtgacgggtgtggattttgtggaatctacgattgatggggttacgatttgggggttttctgcgcttaaggcagctggcggggttcgggagcttcggatctggtttgtggatttccatccgcaagggctgtttggggttccgaggttgtgggtttctgctggaatatattttctaaccatagaatttgtttagaggagttcagatccattcgtatttgagtctggatgtttaacatccgataccgcatccatatcagaacaaataaatctgtttatgatgtcgatatccatttgtatcctatccgacatagctagttgatattatccatattcaaatccgaatagaaatctggaaacaaatgtaatattagtgatatacgattgtgtccgatccatgtgcacccttagctttatgatttcactgggttatttgtgggtatagtttcacttatttttttgtctggctccagttttcttcatttaagagcagtgcacgtattcagaagctgactatgtaatttcttatatgttgctttgaggcaaattgaacagggatttgttttggcttccaaatggtttgttggtcctaaaatagtcagaataacatgacatttgtgctataggtaatatgatcttctaactcaagtttgcattcagtttagactttaggttatgttagtcataacaagcttgaaaagacatattaacaaggaaagatcatattaacagttcatgttacgtttgcagatatggacctcagtggttttctccacattaggaaagctggaagagccttttgaactcagttttttgctaacagtggtgttatggtgaaaccgagttttgtgtgtatataccaacagctaaaatgtaaacacgacattatcatagctgagtacaggaataattatcttttatatcttattgtaaaatctgaaacagttctcctgtagatggttagcttgcattttacgctacaattacctcagatcacttcttgttgtatcttacaccaatttacgaaatttcttgatgcattttatgacaatctcatgcgctgagagatacattcgatctacattcgttattatgaaacagatggacgatttacgctaaaattcatactcatttacgttgttttggttcacgatttacgcttaaatccgtccgagccagaacccgcacacgaccggtggcgcacgattttggagccgtaaatttgggctccattcgccatttcgaaacagatatacgatttatggtaaaatttgtgctaatttacaatgttttggttcacgttttacgctgaaatccattggagccagaacccgcgctcaatcggccgcacgcgattttcacgccgtaattcaggcctcatttgctgttacgaaacatgtatacgatttacgctaaattgtgtactcatttacactgttttagctcacgttttacgctaaaatctatttgagccaaaacccacgcacgatcggacgcacgcgattattacgccgtaattttcgggacccatttatggtttcgaatcagatatatgatttacgctaaatttcgtactcgtttacgctgttttggttcatgttttacactaaaatctttctgagtcagaacccgatcacgatgggacgcgcgagatttttacgccgtaattttcgggccgcattcgcagtttcaaaacagatctatgatttacgctaaaattcgtaatcatttacgctgtttttgtttacgttttacgctaaaatctgttcgagtcagaactcgatatatatatatatatatatatacatcaaagcacacactcgttatatccacaagtatgagggacattcaattcagatcaagctataggtaggcattaagtgtctaggcaaagcatgcatgcgtgtagcatcttgtagaacaccaaattttggagaggatacatgaagtagtagccgaccaatcatcaaatctttgagccatatgctgatcaattgcctaacaacacacactgcttttgcagacgatcaatcatatggatcatgcatggaggcacagttcaagtgacaagattacctcaccaatcatcaatcacattgtcgtatccataacattgtaggttgcttcttccaccattcccacacagagaaagcatcattgcacacaccatttttcctccttacatgtcataattttgccatggatccctcttctttatgaagaagtcaaaaccactcctatagggttataatttgggttgacataagattgattagaaaatgagctatgtggaatagctcaatgatgttggggctatgttcttatggttgacaatgaggtttgtcctcctctctctatcccatgaacagggagtgacaatgaggtttctcccatcctggattttttgtgccatttagagaggtcaatcaatctactcatcggagtgttttagtcgtataccacattagcagaaggtaataaattgcagcattgtggtcggtgccgttcaatcaaacgtgaaatgatgagatatagtctcgtatacgcttgccacatctcgagagaattgattttcttcatcccatatttcctttatgtcactcaaagaccatttagtccttcgtccacctatattagtgtcttagtcatatacacccttactacaattaattacgagaaagaaaaatcttgtagctaatacagttcgatcaaacgaaacgaggacaagtagccatgtatgtacaaacttacacatctcgaaataaggaattttcttcctacaaattttcttctaccattcataggatcttagtcagccgctcttaacaaaatagcaagtaaatcttgtgatcgatacaattcaaccaaaaggaacgataggattgcctcgcgcacaattgccacgtctcaattgatggcattttctccctcctggattttcttgtgccaatttagaggtcaatcaatctactcatctgtgtgttttaatcgtatacgacattaacagaaggtaaaaaattgcggcattgcggtcagtgccgttcaatcaaacatgaaatgatgggatatagcctcgtgcacgcttgccacatctcaagagaattgattttcttcatcccatacttcctttatgtcactcaaaggccatttagtccttcgtccacctatattaatgtcttagtcatatacacccttactataattacgagaaagaaaaatcttgtagctaatacagtcgatcaaacgaaacgaggacaagtagccatgtatgtactaacctacacatctcgaaataaggaattttcttcctacatattttcttctaccattcagaggatcttagtcattccgtatcatattagtggtttggtcgtatacgctattaacagaatggaaagtaaatcttgtgaccgatacaattcaaccaaaaagaacgataggtttgcctcgtgcacaattgccacatctcaattgacgacattttctccctcctggattttcttgtgccatttagaggtcaataaatctactcatctgtgtgttttagttgtatacgacattaacagaaggtaagaaattatggcattgcggccggtgtcgttcaatcaaacatgaaatgatgggatatagtctcgtgcacgcttaccacatctcgagagaattgattttcttcattccatacttcctttatgtcactcaaagaccatttagtccttcgtccacctatattagtgtcttagtcatatacacccttactaaaattatgagaaagaaaatcttgtagctaatacagttcgatcaaacgaaacgaggacaagtagcaatgtatgtacaaacctacacatctcaaaataaggaattttcttcctacatgttttcttttaccattcagaggatcttacttagttcgtatatcatattagcgcttttggtcgtatacgctcttaacagaatggcaagtaaatcttgtgaccgatacaattcaaccaaaaggaatgataggattgcctcgtgcacaatcaccacatgtcaattgacggcattttcccccttcattgattttcttatgccatttagaggtcaatcaatcgactcatcgaagtgttttagttgtatacgacattaactgaaggtaagaaattgcggcagtgcggtcggtgccgttcaatcaaacatgaaatgatgggatatagtctcttgcacgcttgccacatctcgagagaattgattttctttatcccatacttcctttatgtcactcaaagaccatttagtatttcatacacctatattagtgtcttagtcatatatacccttactacaattacaagaaagaaaaatcttgtagctaatacagtccgatcaaaccaatcgaggacaagtagccatgcatgtacaaaattacacatctcaaaataaggatttttttctcccagattttatactaccatttagaggatcatatttagtctgtctaccatgtgagggctttagtcatatacgctctgaatagaatggcaaaaaaaatcttttgaccgatataattcaaccaaaaggaacgataggattgcctcgtgcacaatcaccacatctcaattgacaacatttccccttcattgattttcttgtgccatttagaggtcaatcaatctactcatcggagtgttttagtcgtatatatacgacattaacagaaggtaagaaattgcggcagtgcggttggtgccgttcaatcaaacatgaaatgacgggatatagtctcgtgcacgcttgccacatctcgagagaattgatttctttatcccatacttcctttatgtcaatcaaagaccattctagtccttcgtacacctatattagtgtcttagtcatatacaccctactacaattacaagaaaaaaatcttgtagctaatacagtctgatcgaaccaatcgaggacaagtagccatgcatgtacaaacttacacatctcaaaataaggaattttctttctcccagattttatactaccatttagaggatcatatttagtctgtctatcttgtgagcgctttagtcatatacgctctgaatagaatggcaaaaaatcttttgaccgatacaattcaaccaaaaggaacaataggattgcctcgtgcacaatcaccacatctcaattgacggcattttccccttcattgattttcttgtgccatttagaggtcaatcaatctactcatcagagtgttttagtcgtatatatacgacattaacagaaggcaagaaattgtggcagtgcggttggtgccgttcaatgaaacatgaaatgacgggatatagtctcgtgcacgcttgccacatctcgagagaattgatttctttatcccatacttcctttatgtcactcaaagaccattctagtccttcgtacacctatattagtgtcttagtcatatacacccttactacaattacaagaaagaaaaatcttgtagctaatacagtccgatcaaacgaatcgaggacaagtagccatgcatgtacaaacttacacatctcaaaataaggaattttctttctcccagattttatactaccatttagaggatcatagttagtctgtatatcatgtgagcgctttagtcgtatacgctttgaatggaatggcaagaaaatcttttgaccgatacaattcaaccaaaaggaacggtaggattgccttgtgcacaatcaccacatctcaattgacgacgttttcccccttcattgattttcttgtgccatttagaggtcaatcaatctactcatcggagtgttttagtcgtatatatacaacattaacagaaggtaagaaattgcggcagtgcagttggtgccgttcaatcaaacatgaaatggcgggatatagtctcgtgcgtgcacgctcgccacatctcgagagaattggttttcttcctcccatactttctttctgtcactcaaagccaccttcagtattctggtcctatatacacccttaataatagaaataataaaggaaaaatattgaaaacagtactgttcaatcaaacgaagcgatagaggtaatgaccctgtgcacgctgaggactctatctgtaaaggcccccctcacctgtcaatgatccatcatcttgcatggcggacgtgacacaagctaggtagagacgcgctccgccgtccttgccatgcatcttgggatcagaagagtttcatctcctctaaaaaccacagaatcgttcatcgatcatcaattaagaattaacaaccatctatcacctctaattaacaagtgtaaataataagtacgagaataaacgaaacagaatcctgacgatgatagctgagcgcgcatgcattacctaggtttattcgtgtgtagctgttgggatttcttctcaaagcaacacatatgcataagtaatttttactggtcttttatgtgtatgcagtgtgaacatcgtgcgtggacggagacaacacatgcataagtatgttagaacatgtctaagactttatatatatatataaaatagacctctaaattctaatttggagagtgatttgaataaaaaccgttctctatatatatagaaggaaataaagaggctacgcactcaaaatgcaaaaaacctaatagtttaaaattaaggtagcaatgtattttgaataaaatttgctagctcaatcctaaaaagtgccctaattaagagaggaaatgaggaatggcgagtggtgaccactgacgattggccacgtgtcaggcagggagtgagcttatgataaagagagaaaggctaataattgacaagacgagcgcgtactatgctatgctacaactagtatatagctagcccggccagccgctgtggagaatataatatcgaaagaagaaagaatcgctgggctaataatatattagctgctgtctccatcttcttcaccgtcgcgtcaaagtcttcgtcggttcgtcattgtcgccaccgcttcctccagcgacagccggtactctccgaataattgcgaagctgcgtccagtccactcgtggccgatagccggtagccacagtcgtcgatagatagctagctagctgcacaacttaacggaccactaacgaattattggtagatacatctatactacattctaggcttttgtcggtagggtagctggcacatgcatgcggtgaaaagggccaacaccgcgaaccgattcctcaaaaaaaaaaaaaaatctctacagtaaaaccatatataaacctatgtgtatatgtttaaacaatttatagtaaaaaatataaaattattgtgcttataggataagcctaatataccgcatataaaataaaaacggaggcactgaaatcgtcgcctttcagggttgatttggtgaccagggatcacaggaggattgaagggaattgacgaggaaattagtttatttctccctcaacccactccaatcctcccgtgatccccttgtcaccaaatcaacgcttagagtttcagtcatacaagtcttttttattaacatttacggttaataagtacggtacggtgatggacactgataaagtcacaagaagtgtgcagaaatattaattgctactagtagacccgaaagaacattattattgcgtggctttaacattcatatacaactatatcattattgcaaatatatacctgtgtctagcttccaacaatgtgacaaacaatacatcatttggactttatttggagccatgagttatatatatatatatatatatatatatatatatggccatttttagagcaaccacgacgtttagctttgttgtgctgtgctaagatagatgagacccacgtgaggagtacgtaggttagcaaaatttgctccaccgtagggcactcacgtggaactcagcacactaaataaaaaaagggaaaatgtttttaaatttgtatgcaccgtgtgctcaacttgaggctagttctaggtctgtacccataaaacactgttccagcgtgccgcatatgtctgttggtttccgcgctcttcttggcaacacccaaaaactaacgctgcaaacgtttggctttgtgtgtgtgctaattaagatgagacctacttgaggactaggttagcagaatttgctccgacccactgtagagcactcccgtggaactcagcacacagaatttaaaaaaaaagataaaaaaagaaaataatgtttgtactacgagagcccaatcttatcgaaagttatatatatatatatattaaaaaagctaatgtcgcatagtataaataaagagagagacaaaaaagaagaagatgaaatgaattttataggaattaatgaaaaaaacttgtttgtattttatcttggaaacaggcagggatggacccacatgggattcaggtgaaccatgacacaccctaagctagctaggcccaccaagaccccccgtctaggaccgttctgttgaagtatactcagtggtaatgagattgagagagacaaatgacagaactgttgttcctttattgcagaggagcagtttatatacaagtgtatacatggttccccaaggggtgtgacccttgggtagtaactgctaatggatgggcttgatcacatgtgcataatgtttttgtaacactcccccttgatcaatccaagtccatttgatcatctgcaaatttgtcctccaaaatattatctccttaaaaaccctgtgggaaaaataaggagtacaaaatgctttttggatcgtgagagaatctcacttgaactccaaaaggcaaatatgcttgtaatcatcatgcataaaaaccccgtggggaaaaatcaatgatgaagcatacatcttagttgatattacctcgttaaaaactttggatgagaaaaccttaataaggcaaaactcatacaaagaaaagagtgtaatatgatggacaaaacagatcaaatatcacggagaattactccccctgatcttgcaagcacttaagtcttctcataccaatctactgaacacatttatcaaacgtggagtatggtagagattttgtgaataaatcagtaagattatcacaagattttgtttgcaagatgtttatattttcatttgtctgtttctatctgaacaacacaagctcaattatccttatagataattgtcgatggtttatttgaaccatggtatgccattgttctcccatggacttctagcccaaagaacaataatatgtctatagtcatcatttcaaaaatcccagtggggaaaataaatgatgagacatataactcaggctaatatttctccaagacaatcttgtcagaaaatctgagaaatcaacatatcagccgagtctccttaaaaaccaaacaggaaaaataaggagagtagtcatactctattgttgatccatttgaactctagggagataaactcgtatcctagttcaaatacaacaataactatgccataatgtatcatcctttaaaaacctctatgggaaaaatagatgatacgacataggccttgtgttgatgttgcctcgttaaaaactttgaatgagaaacccaatcagggaaaaactcatgcgaagaaaagagtacaacatgatgtgtaaacaagttcttctgatcaaaaggaaactccccctgatctttacgaatcactaagtcatctcatacctgctctcaaacatattaaaaatgtggagtaaggtagagacttagttcttaacttgtttttcatctaaacaacacaaagtaatattatctccatagataataaggtcaatgatataaaatcatgaccaccacataccctcagtatgtagtatatcattctgtacaatcccacaaagtgtgttacagaatgattagtgtaagtgaccattaatctctgttgattgacatttatcaaacagtaggtccaacttaccagaagtatgtcattgatcttgtacctggggatcttctataaatatccaagatcagtatatccaaacataaggagagcatgagtacacctggagatcataactcgatctcatgtgctgttagctagcaaatctttgtagagcaatatccggccggatgctcttgcaagatacaatagcacatctcatgatctgaaagaatcaaataacaatgattctctcatattgaatttcttcaatatatgttggatatagacagttttgtatccaagatactcaagatagtttactttgaattgaaaatctctttcaattcatatcctctatctcgaactccgtcgataaggaatgtatgtttataaatatgctgcacatatttgcactaaacataccattctttgtgtatcccttcggaacgaaggattcactaggtcgaatgtaccatatttgacctgaatgctctaagtcacaaagactttccaagcattacaaatttgtgattagtgattatgtattttgaatccttcaagactccataaataccataatccagtgaccacatatgcacatgttgtcactacatctatcaactgcaaagatagatgatttactgcccataatattgtatcggaattttactactcacagtagaggagaatttatagcattaaaataatgcttgggtttgcgtataaacccagttgctactagccatgctttctcaccacctcattgtttccaagtccatgaaaacaaacttgtatccacagtaagataccttgaagtgaaaataagttaacacttctttccggtgaacaaggctatctctgcaacattgtatcactcaacaagatccagtttgagcatgctcgtgctctgctatggccatagtcttttggatcacttggagtgcatatacaattgctgagatgtatgtgtcgacacttgtagcttttaaataacacaattctccaggtgacataaagtcatttttatgtacccttatgattcctcgtgaaatcccaaaacgagaatcaagggcttccgataacctagcctcatcagtgcgcactgagctaggttgtgaatgtcctccattcacaggataatcaatatcctttaggtgtccaccaacactaggttggttaccaacgaatagatggtctgcatttactatctcagaaggtctagccttcagctgcttgcaagcatcttaatcccaatttgtgaccatacttctccccctcttatttacaacaacgttgcaatagggagttaagtggttttccatgtaaccactctttctggcacttccttataggattaatttgagtgacacctaatagtaaatgcacatggcagtcaatttgcaacttcttgcaaatcattcgaacccaaaggttcagttttagtacgtgatcctgagcctgaatgcttactgcattcattataatttcctggcattctttttggtacttgaaatctccccctaatgcctggaaaagctcatgattcaagaaagcgtacgggccgtaaatagattctcgtgaagagattctaaaacttaatggtcgacggagaaggaactctcacatagatccccagctttctgtgtgcccatacatgtacgctgcggtggtgagattgggaacatacccaatgtacgcatgggaaatctttcatggatttccacgtactaaaaaccgtaggggaacttgtacatgcagtacatgcagttaatcacaagtcaggagcgtgcaaaacttcctgaatccaaccataaccagttgaaaatgacaattcattactgatggtcattaatgatctgaaatttttgaatctatcacagattcatcatatcctttatggatatcataatgaataccaagacaaacaatcatcattgtaagcatatttggtaaattcagtagtgtggaggctaatgtgctcaagcttgagacattattgcttaggtcatcatatagatgcaccaaataaccacataaagccttcaatgtccataccatctatgtaatggaccacactcgttcctttgaaacaatacaaagaacttaaccaattcagatcagattttaagataagagggacttaaaatctcatttccaatgatactcatcaagtatccttcttatgggaaaaacatgaccaatagaattgttcataacttttcatttcatcccaacaatgggatgaccaattcagtcttacccagcatggtaagtatcatcacatgaaaagttataacatatgcaacactttgtatgggaggatgtatgtataatacagtccataagaaatgtttctgagaaacatatgcaatatccatcactatcaccttgtgtttccacatgatagtcattttatggatatctctataatttggtaagataaattaggatatatcaacacatccttgatacttccattaccaaaaggggactagatattaacgtatcatgatatcacgcgaagcgattgtcaaaatattctttcctctttccaaaagaatatgagaatattttgtttccccacttatagagtttgtggctcaattctccacattgcatgtttcttcctcaattggaagaatccctgtacaagtttgcacaactcaaatcaatgagtcttcaactcccttaatgagttggttcaactctaattgatgagtttgttcaactcaaatcacatgagtgatcaactccaatcgacgagttagtttaactcaaattcatatgagtttttacactcaaatcacatgagtgtgttcaactcacatcacatgagttgaacctatcacaacatcaattatgaggattataccaaatctcatgcatcatttaaatagcactcaaaagcaaatcatctaacaaagtggtcttctcttaggaagagaagtgttgttacatgattattccaaatcatgatttacacaactaaccactgttatcatgtcagatggaagattgaagtacacttcatatcttagctttcatgaatagtatgcatctattgagatttcatatacaagattagatgtctgggcatacaacactatatcacatatagtgtaatgacaaaagagattgtcatactcattgcccttccatttttaatgtgcctatatatttgctttcaagcaaaatatatgaatacaaagtgttagtctacaacataatgtagacacatactcataagtccacaagtcttatgattttctttgctattcattttgcgcttgcatatcaagccgcaaaagcacataagttcttttcataagaaccgtaagagaaagagagcatcttatttcctccaaaatgaagagatgaattcccatatcatgcaaaaatgaaatgaacatatgcaatgaacattaaggataattaagcccattaggcgagttcatcaaactctattaaataattatcctccaaatggcttaaccattttcgtttgctgttgcaactttgccacaaaatatatcatatctttatatgttggagaattccaggtatcacataaagtgtaccaaagatttttgaaaattggtgtacacaacgtagataatctccatgtaatgaaacaatggagtagatctcccagtagtgggcaaaacttttgctgcctgaaagcatggtctctgggctgatatattcaaggaacataccgcaaccaatgcttaggactccactaccctgtgcttgaccaaaatttcaaaaataaaatggaaatcaccataaaggtgaatgaccaacatcacatctccaacatatctacttggaagaacacataggtaatcatcataaccatatgatgtagacctcttactgatgggcaaataaccttttgctgtctaaaagcttggtctcagggcaaataaattccaagaacttattgcagccaaagcctagatctccatcatgtgttgaataatcccaagttcaagatatgtgtcatattttacaagaattcatcgtttaattaagtagaacttaattaaaagaattcttttagcagtcaccatgactgcagcgtccagcctagctccatagcccgcaacgcctgcttggtccgtgatctttttgggatagcacgtataggtaatcatctcgaaagatgtagacctcatagtgataggcatttcaaatgcggcctaaagcacggtctctgggctactaaattctataaagaatttagcgcagccagtgcttaggactccatcaccctatgcttcacccaaaaaatgcaacctcatgttgcatgtagaccattcagtttcgacttattatatgtgctatgttttccatgcaatcataaagaatgcaaaaacaaagcaagtcgaaaatatgtgaattataaatgtaaaaacaaagataattcactaacaagtctgtaatttccataataaaatggacaaatatgtacagttacatatatctttagcaatctaaataacgaatctagatgcctaagataattttgaactgaaattacatataaaacagagacttatacttaaatttagaatttaaaaatggtaaaataggccattttagatcctcagaaacagcccaggcggcctgccaggcgggccaggcagcggcctggtggccagcacgccggcccagcctggctggccggcctaagcggcccaactgaggccacgaggcccattagaaataggggcggttaggttttccaaaccctaaccgccccagccgtcgtcttccagggagcgccccagccgccgccggacctgcgccttcaccgcgccaccgccgagggtgctcgcgccgaggagcgctcgcaccctatccacgccggctgggccgtggccgagccgccagaagcgctccagccgaggagccgcgcccgaggaggaccgctgtggtccgccgaggccggcggccggcaggccatccgcgcaaggccgcggggcagtccgcgcaggggcactcaccctggcctgcaccgggaatggcccgcccgcccgcatggctgtggcgtgctcgcgcgcccgcgtggccaggctggccggagccgcccgtggtgtggctggccgggccgctcacgcgtggccgggctcgcctgctagccacgcgccaccgcaccgtcggggctgtgcccgcgcacgccctgccggatccgcgtcggcggccagcgtggctgggtcgcgcccactcgcgccgagggtggccggccgcccctgccggagcgagccaaggccgtcgcgcacagtcgtgcgcctcgatgggtgcctggccacccttgccgaagccgaggtcgacagtgctcgccgccggggctgctcgccgccggggctgctcgccgccggggccgagcgtcagtgcccgcgccggtaactggccgcgtccgagcacacccgcaccggggcgctcggctgccgggggcatgcccacccgtgtggtggctaccccgcactggatctgcgcgtgagtgcacggattggagggcctgcccagccaccgttcgtgctagaacagacggcgagggaacattaatgtcgattttgcttctaattgacaattgattgctcaccgcctttcgcggatggaggtcgtcctctttgcgtccgatgttcctcctgtctgcttttgccttgaccgatcatcagttccattgtatagcgagcgatctcctctgtctgtttccaacagaaatttctctcggttctctcgcgggtcgtgctgataacgtgttgaagtatactcagtggtaatgagattgagagagacaaatgacagaactgttgtttctttattgcagaggagcagtttatatacaagtgtatacatggttccccaaggggtgtgacccttgggtagtaactgctaatggatgggcttgatcacatgtgcataatgttttgtaacacgttcgacgatttcctccgaggcttcggccgcgcgctcgcgaggcacgagacacgagtccaccatccgtggctgtggcgccacacaaaccactgtgaaggagttccccgcgcatggagtgcagcgtgttggatcttccaatcgtcgtcgtcggtgctcccgatgataccacatgttcgagagtgttctgtcagatgctgccttcctcaaggcatgcatggggaaaaaaaccaataacaacaatagtgacatggcaataatagtgacacataattactttgggtagtatatactactacctcatcataaaatagtattcgttttagttcttagtttttatgttgatattcaaatggataataatgaatctagagttctagacatatatataaaacatatatatcaaatagtatttattttagctcttagtttttatatcaaattttttatactaagtgacgagaccagaattcgaatcctctagctaaacaaaaatatatataggaaccaatcaggagatgaatcacaaattggaatgaatacgatgcatgcaaggcgtaccccgtacgtagtagctagccctgtggctctgtgcatccatgcatctggaaactggaccgcgcgcatataagccgcatagggtggacgcgatgacacagcacatggggcgcgccttctcgtggtcagtggtcactaccgatcgagcgatgggccggggccgggcccccggcatgcatccataaaatttggcgagcgatgggccggggccggaatgttattttatccatggatttcgttctaacacttgtctgttttacttaaaaacactcgtgtatgcggaagagtgctgtttaatataatggactagtaggacaaaataatacagaaattatttggaccagcgccgaggaagacaattcgttttgaatgaatctgctgctggctgctgagtagtcggacatagagaatccttctagacacagcgacgtgccggtgccccagcaattcattgtggcatttcgcagcccacatcaaccccttcacacgaaccagatcagaaaagccactactgctttctctctctctctctcacacacacacacagacacaaataaaaagaaatcagtagttcgatttctcctctcacctttacacatatctccgtatttacaaattaggttgttgatgtaggctgtacgcacctgctggtttgctactcgatcctatatatcgtccaatcctatctgacctctcgacatctggtccttgattactcgtcctttttgcttggtgcctgtgtatatcgtcgccccggccgcttgagctagcttcctctagtgctcgctctcgtcgtcgatcggttgtttgcatagcccacggcgagccgaagcaatgtcgtcggcgcccctgcagatcgcgccggtgccggagcatgtgtgctacgtgcactgcaacttctgcaacacaattctcgcggtaaacaaccccatctgatctcatctctctgtttgttcccctccctcctttgaattcccagttctcgatcggcatgcatgcctctgaagtgcagatctacaaaagggagatgcacatgaaatgattggctgcgcgcgcgcatgcatcatacagtttattttgtaggatttggctgtccctcttgctggatttcatcttcttcttctttactttttttgctctaaattgttttgtaaaggttgaatgaaatttctgaatcactcccgtcccttgtcgtcctagcttcaataatcgttattttcggccggccggagtgcgttattgaattcttacttttcttttcaacttgatctgaagctcgatctcttctcttgtacctttccaatttgactgctatactctttcaccatggatatgcatgggaggagaagtggtaaaggtcagcagacatattgaaatttggggtgcttctcgcgccttttcctctgatcaaatcttgggaacaacgtgattaatagctgtctagcttagaggaaactactagctagtgagcaacaggcgcaggtgcttactccactacatatacatgcacacatgcgcatacttccttttgaatatggttttttgataattccatatatactcgcaaaattttcaagcattctcgccttctgtaggaaattatcatcattgttgagagtgagaggtggtctattagatctcaagtatagcaaatttagattattcgtttgcctggtgtgtatgcatcatgcatgatgtatagcttcgtgcataaccagtcccgtgctttagtttcaggtactacttaaaacacaatatatcgggcgttagatctacgcattaatttcctacctgaactgcaacaaagggcgcatgcaataataactgttaagtcgataaaaaatttagtatgtgtaacctgttattacgtggatatgtaatttttatgttctataataattaataaaccatgtgttattaccctcctcgtcctcctcacataaagctaagccgtgatatactagtaatatatatgggccaattatatctgctgtaaaacgttgctactttttattcatggaacaaaaaaaaaatccattatggagaagtttaaggagtgctctaaattaagatcaaaaccatttactggaataatagaggaagaacgtaacaatgtactgaagcagtatacatgtataatgtgtttggtttaaggaataaagtaatctatcttcttctcactcctcacttttttatttggtttgtggaatagaatgggttgatccatcaccacctcattccttataagctaataattagtatatacatgaggagtgagttgattccaccaaaattgatggaataaacttatgatgcatcatctcatgaagcatagagtgactccacaaaccaaacacacccgtatatagtgtactgcaggcctgcagggtgacttcatcccgatacaaaattcaaataattccctattttttccgataaaggaagcatttatttaaacaccaagtacgatacatgcatcaaattgcattgtatagaatttatgcttagaatttatccatacatcgacgagtacagatttcttcttgtattgtacagcatatagtcaagtacaggatctaattcggcatgcatgctgagctcttgcatgaaatggcctattctatcattcacacgttatgttccgttctctctacgcttgaacgtaatacccaatgtcttttagtaatggtagggatcctacactgaatactcaatcaaacacaaatgtgtaatgctaatagtgtgtgtcatatatactatgggtcttgcattagcctcagcctagctacattagagtgttgatgcagcataacccggccaagctagtactgtaacgtatgcaatgtccctgatatcagttttcttaatttctgcataggcaataagccgcttttagtgacactttgtttggctgtttacattttgttgcatgtatgcaatgcacaagtttagatacatgcctgctaaattaatacatgcaaccagtgcagtgagacactatagtagctaagagcaagatcatatctttcgcaagagatcttgccttggctgaagtatgaagaagtggcagtactttttttgcaactccaatgccatctctctctctctctctccccttagccaatgcaaagataaaaaggaagtcgatcgatctttgttgaatcccctgcatgaccccactaatatatgcaaaacatattgcacatgcccgtgtgccaaagtggctcctgcatgaattgtcactgtctcctgcgtctttctgatccctctaaactctgcccaaatatattctttcggtgccgtttttgtgtgcacagcatgtgtcagagacggcggtcgatatgagcaaatgcatatatgcatggattattatgagtacgtacgttctctataaaatcagatcacacatcgcatcacatgcacgcattgtatagctagctagagcagctaggcgtcacaacagctcccatcatgtgacagatttcacctcgtccgctcatgcatggagcacgtacgcacaatcatttgtagtagggcacttgttcaatcctagcttaagatcgtctcatgggacgacggagtttgtgcgcacaaaaaaaaaaaaaaggccagcgcgcgtgagtgaggacgaatcaaacaaagtatggctggcacagagtactgatgtgcactgcaccaacagttttggtgcaaatgaaaatactgttaatagatggaaagagaaagggaatgaaccagtacgtgtttgtttactactgggaaaataaataaaattaaaagagtggcccacttgtagtagtggtctctgctcaggctcagcagcagcagagcgctgataaaagtcatggagcaacagtttcgcaggcagccatgggtaacaggaaaagggaaagagagagaaggcggttctccaccatgctttgtgctgtgcaaaaaggaaaagccacagttacatatagctttgtttggtgcgttattatatttgtatattcatgcatgcatctgcagaagtcgatcgacgctcgatccttgttcagaaagtatatatatatatatatatatatatatatatatatatatatatatatatatatatatgtgtgtgtgtgtgtgtgtgtgtgtgtgtgtgtgtgtgtggggcattctttttagtttagttttgtacatgtgtgtttgttcttcgaaagcatgcttcattctccttcgtcaaatctgcaggtcagtgtcccgagtcacagc

SEQ ID NO: 1070 - DNA, 9401 bp, Zea mays
  Intron number 1 from transcript GRMZM2G146862_T01 (locus G RMZM2G146862) derived from phytozome v7.0 (chr-ID 4; pos 2 6821222 to 26830622)
ctgccaatagtgctgttcgtaaagtagcagcccaggtatgtcacatatgccagtttgttctgactatcacttgaaactaactgtaacattagtgattagtgtagtacacattggtaagtgacaccttgtaacaatcttagacatatgctgcaaggcatggctatcagttatcacggctctccagtgaggcgagttgtctccgggacgcctggacgcctaggcgatagttaggtgaccaagcaatagtcaataactcaatgctcaaaactcaaatgcagagcatctaacattctcaaaacagggcacttgttgctctgtttgactcaatactcaaaacactcattctcaggggcgttcagcagcggtgcgcagcacgacagagcgtagttgcccaggcgcagtgcggagcacgtgggcagagcgcagcacacgggaaggggaggaggagggggagggaggattactagtgtccttggagtgagcaatgagtcgggtgcggcacgacacaatggcggcgcgcagcgtgggaaggggaggaggaagaagggtggggggatggggaagggattaccggcatttgggcgtgggcacgtggagtcctgcattcgacgagcaagctaagtcgagcgagtgaggtttagtggctagatggggagctggatttagcggctggaatatataccagcgcgagactaaccctgggcgctcgcctgggccagggccacgcctaggcgtccatgcctagacacctagtgtggcaggcagccacctagcttcaattaggcgaggcgaaggcccacgatgagccaggccgagcgactcgacggctaggcgacgacttgataacaatgctgtaagggaacatgttaaaagaattactagcttagggcctgtttggcaacataatatttatctagccccaagacaatactgtggtatttgagcataccatggtattttagcccaaaaggtgtttgagagcacatctaaaaactttgtactttaaaccacggtttcactaataccttagtatttttggggtcttaaaaactttggtttagaccaaagttttttgttggcgtacagctgcagtctttcccttctctcctcccgcgttgcaaccaaaataccgtgtctccaaacaggtattggattgactttttttttctcgaacgcgcaggagaactgcacatcattatattgaaagagagaaaggtccgaagtggaccacagtacagaacaaggcaaaaaaaaacatagggaacgaacagaaaaaaaacctatccttatctccaactgtcacaacattaagcgctagaaatagccctgaccctagcaaaggcagctgggaggccaaggctctcaagatgcttcgcaccagccctacaccaacactccacctcatccataagaagtctttgaatggtacgcaaggaagggcttgcaccatcaaatacaaccctgttgcgatgtagctataaacactaggctcccaggataatggttatacgggaagattttataaaacttgttggcacataattaaggctgatctgatggcggcagttatcaccctgcaccaaggtaacacacgcaaattgtggatgatgaattctgcgtacctaacacttatccctaagaaagttgatgccaagacagccggagactacaggccaattagccttattcacagcttcgccaagttggtatccaaagtcttggctaatcgcttagcaccgcaccttcaaaatctggtggctacaaatcaaagtgcctttgtcaagggtcgttccattcatgataactacatgttggttcaacattctatcaaggcctttcacaggaagaagattgttggtctgtttctaaagctagatattacaaaagctttcgactcagtgtcctgggcctttctcctagaagtgttatcccatcttggcttcgggcccaggtggtgcggtctcgtgttcaatttgttatccacttcttccacacaagtgctattgaacggaactccgggggattatattcgtcatcggagggggttgcgccaaggcgaccccttatctcctatgcttttcataatcgtgatggatgtgcttagtagcttattcaagcatgctaaggaaagaggattgctgcatgacctggccatcagaaatgtgaaatctaggctctcgatttacgcagatgatgtggttctttttgtcaagactgcagttgacgatcttatttgtgtcaaaatgatcctggattgctttggagaggcctcgggcttagttgtgaatttgcgaaaaagttgtgctatccctcagttgtgatgatcagactgttcaggacagttgtaacattttgcagtgcaacccggcttcttttccatgcaactatttggggctgcctgtttctgataagaagttggggaggagggaccttttgcagtgggttgacaagatagctaaccggctgcccggttggaaggctccactactaaaccttgttggcagggcagccttggtccggttcgtgctctctgcaatccccgtatatcttttcatcgccatgaatgttcccaagtgggttatcagtgcgattgacaaaattcggcgaggtttcttgtggaagggtagagaagatgtgaaaggtgggcattgccttgtggcgtgggataaagtcaccagaccgctggaccttggtggacttggtatcccaaatctgatatataagagttgggcgctgcaagctaaatggctttggctcatcaagactgacccgaataggccttggagtgggttggatctccctgttcagtcacaagtaaggaaactagtggccagttcgatgtacactaatgtgggcaatggcaaaaacacccttttttggagggacagatggataaatgggtgctctatcgctgagctggcacctgaagtaatctcaaaggtggataaaaaggttgcctttaccaggacagtgcatcaagccttagagggcatgtcgtgggtcagggacatcaagccaaccctctcccttgtagggatacaacaatatcttacactttgggacaccctgggtgagatcgtgctcactcttcaggaggatcaccatgtgtggagattcgagtcttcgggccttttctcttctaggtcctgctacaaggttctgtttttgggctccatcaccttcgaaccttggaaaagactttggaaatcttgggctcctcctaagtgtaagacctttttatggttagccatgcagaataagtgttggacagctgacaggctgcaaaaaagaggtcttccccatccggaagcatgccctttctgtgaacaagagcaagaaacagttcagcatctgttgactggttgtgtcttcgccagacagttttggcataacatcctctccccctttggtatgggccacttaactccaggaccagaggatactcattttgctgattagtgggagctagtgaccattcaggtgcacagaagcaagagaaagggagtcaacagtgctattattttgggagcatggtgcctttggttgcatagaaagagttattttcgatggagatttaccaaccattggcaaggtgcatagaagcttcatcgacgagctatccttatgggtgctggctggtgccaaacacctcggaagccttgggcttgctgctgctctaggcgcagcaggcccgacttaatttttttccttggtcgtctttttgtatcttagtcctatggatagttttatttatgcttgttgctggccaccatagggtgttttttttgtactggtcctcttggaccttaatttccccttcttcttaatataaagatgcgcagctctcctgcgtttttcgaattttttttttcgaaaaacgcaggagaactgcgcctcattatattaagtaagaagaaatagggtcgaaaaggacccgaatacaggacctccttatggaggccagaaacaagcataaaggaaacaatccatacacaactaaaagatacaacttatctcaggcattggtactgggagcagctaaaaaggaaagacccttagctcctgcaaccatccatttctccctttcctcagcagtggcctctaatagtgtagtgatattggggggggacccgtcaaacaccactctgtttctgaacttccagatcatccaggctcccagaatcaaaagtgaatttacccccttcttggtcatgcctgacacaatatcagcaatgcgtttccaccactgcaggaagtttgtgtcatcttggataggggcaagaatgtggagcccgaatttccgaagagtgatgtaccaatataatctggaaaagctacaagaaaccaaaagatggttgatggtttcaggctcttggtcacaaagagggcatctaggaggatgatttagtcctcttttttcaagtctgtctgcagtccagcacctattatgagccaccagccaaaggaagaaccgacacttaggaggtgcccaagttttccagaccattttgtaatgctcaaaaccaacagagccagtgaagaaacccttataagccgagcatgcagaatactgcccattagaagcgattgaaaagatatgcttatcctcagagttaggttgcaatacaacatcagatattgcattccagaggtgtaggtaatctaccagaactccccaggtcaaggcacctttaatatcagagacccatcttctattagttagagcctcgcgaacagttcttttagaaacaattctttttggaacagtcaagaggagccttggagcaatatcagaaacacttctggcattaatccacttgtcactccaaaagaaggtgttagcaccattaccaatttctgtgacaagcacagaagagaagagggctttagcattgctggggacatgaacaggaaggttattccagggccgggtagggtcggtcctttgcagccatagccatctcatccgaagtgcccaacagagttcagggaggctggaaattcccaaacctccaaagttcaagggtctacacactttgccccaagccaccatacaatgccctcctttaacctctcttctgcctctccataagaaacctttccttatcttatcaatttccttaatgacccacatagggaaatcaatagccatagcagtataaacacacatcccagtgagaacatgttgcactagaattcttctccctgccctatttaataagtcagccttccagttaggtaatctgtcagcaatcttatccaccaggggccagagttgttggttggttaatctatgaagggatagaggaaggcccagatatttgcaggggaaggaggcaatatcacaaggtaacatatgctggacgtccaagatagtctcctcagagcaccttatagggtaaatattggatttatgagtattgttatgaagcccagaggcatctccaaagagtccaagaatatccagagtaatggagatatccgactgaatggggtgcaggaacaagacaacatcatctgcataaattgaaattctgtgaagatttttccccaagtaaagctgttgaagtaaaccagcctcctcagccctggagaaaaggacccccagaacatccatgacaagaatgaaaagcattggggataggggatctccctgtcttagtccccttctatgctgaattcttttcccggggcagccatttagaataacctgagtagaggaggaaccaagcagcccacaaatgatgtctatccaaagatctccgaaacccatatgcttcataacttcaatcaagaaagcccaggaaatagaatcaaaggctttagaaatatccagcttaaaaaggagtcgtgccttgctttgggaatgaaaaagtcttgcagtttgttgcacaagcataaaattatcttgtatgaatctgcctttgatgaaagcactttgaataggagacaccatattatttaacttttttcccaatctgttggcaaggattttggtgactaatttggcaaagctgtgaaccaaactaattggtctgaaatccttgacctgatcagccccctccactttaggaaccatagtgatataagcactattaagtttgtacaaattcaagaagtttctgttccataaagctgccacagcattcatcacctcttttttaatgatattccaacaaactttatagaatctcccagtgaaaccatcgggacctggagccttgtcagaaggtatggtcttgatagtttcccatatttccagttcagaaacaggcagctcaagatcagcaaggtcatacatcggtaatccaagagcttcgaggtcgatggatctagctctttcagccgtatggccaataagttttgaataaaataggtcaattacttcagctttctcatggtggctggtcaggatgttatccccatccttaagtttagtcaccagatttttcctctttctgtgccttgcatgcatatggaagtatttggtattagcatctccttccttcagccagcttattcttgatctcagcctggccatagttcttttaaaggaggccagcagcaaggattgcatcttgagcttgtttttgagccaattctcagccggtgaaagcagtctgtgatcttgggcaatttcgaatttatgaaggagctcctttgcaagtgccaactgggaggcaacatgacccactttcttagtactccagctttgcagccttttagaagtctctttaagctttctatccagggtcacaagggggcaatgcaaactacccacagagtcccatgcagactgaacagtatcaagaaacccatcaatttttggccagaatgcttcaaagtggaatctttttttcccaaaggaattatcttggagtcccaagagtaaggggcagtggtcagaagcctgagaagcagaactttgaagcagcacatttggaaaaatagcctcccaatcagaagagcaaaaaactctgtccaactttaccaacacaggattagcatgctgatttgaccaagtaaatttcctgccatgcaattggatttcctttaatgccagatcattaataactgccctgaatctagacatcattgccatgttcagatttgagttatttttatccgatgccttataaataaggttgaagtctccagcaatgacccaaggtccagcacaggcagctctgatttccttaatctcctggaggaaaagtattttatctgcatctgactgaggcccataaacgcaagttaaccaccatggtgtgccatcatttttatagaattgaaccgaaacgcagtgattatctattcttgtcaaccctgtgtgaccaacatgcctcttccaagcaaccagaattcctccactagcacccaacgaaggcatgaagacaaagtctgaaaactcaattcctagggtagagaggatatttgtacgagtaatctgctgcatttttgtttcttgacagcaaactacatccacatgaaaggaatcaataagatctcttacagcatcctgtttaagagaggaattcagacctcttacattccaaaataaaattttagcaggatccatcaataacctttagcaaccaactacaaacaaggaagacctgagcactaactctccaagtcggcagggagggtccagccgaacaaggcagagagggcctccacctgaacctggttcaagcagcgattaaatagtgcagcatattcttgtaaggcttcgttgttgatttcttcgttttctgataggcatttaagggccaccatagctttcctgaccggcttggatttctctttgtgcaagttggatttctctttgtgcaagtcgaactcgacaccaataccagcaagccgcctgctgcgtctgggggcctgcactccagatatgggtgtagccaccagggaggttcttggagttggtagtagggcatccgacttcttgcagattttgctgaaaaacttgacaatgggtggactgtcctgttccggagcaggttggacatgttcctcagttggaagcagcggagtagtatttttccttcttgaatagactttcagattcgatatggctagcgacccagaagaaatgcagggttgaacacgggccagagaaaggggcgatccaagcctagctgatttctgcgtctcattcctcacggactgaggcgaaaccggcctggctggggtcagcgacccggggggcccaagcctagacaccaccgggaggggcgaactcagccctgtcatttcctgcgacccagtcactttggactgaggcgaaaacggctgggtggagttcagcggcccaatagtgcatgtccagctgtcaataggggcctcatcaaggagactatttggctcctctgtaggcaactcattaaggagtatcatcccattatccgaggccatctgctgtaactccggtgcgtcaaagagtggctgttcatgtcccctagatgtatgtgaagtccttccatgtccggacggcgggagaggcccaaggcgaaggtgaacagaccgtcgctggggcaaggaactgcccaaacgccgaggctcaacattcctttggtcatccatgtcgtccgaaccatcagactgatcgccatcctccggtggagtcagcagcgaggaacctcttataccatcatggcagattgcaagtacccttacgcttatattataggctaagcatctccgttcagagctttgagggcctggctccagaatatgcagaatcatatcacggtgcagttgtttcggttggaagcaccaagcccatgctatgaataccttttctgatttgtttgggtactctcctttgcaccttgccccaccacttaacaaaagagcccacctctctatcaggcgttagatggcccatcctcaaagatgaaaagatattatgccaaaattgtctagcaaaactgcacaagcataagaggtgcaagatagtttcctgttcttggtcacataaaggacaaaccaccgggtgcagtaatccttttctctgaagcctatcagcagtggtattaataggtattggattgactgatgtaaaatatattatagttgtgtcatggcattcggtaaactgtggtattataaactgcggtttgaaatatgtgttcccaaacaggcccttatttgttttttgtcaaagttttttaaagagtacactacatattttccagggccaatttgccaatctacataccacataccttgtatttcgtatgtatgaattcttacaggattgggaaaacgactaggaagttgtttcacatcagaattaacctgcttttacattcaagagaccagtttagtctctaaatttccattgaaaatcaggctggggtggttatgttgttttttctttcctttcatttcag

SEQ ID NO: 1071 - DNA, 7184 bp, Zea mays
  Intron number 4 from transcript GRMZM2G174236_T01 (locus G RMZM2G174236) derived from phytozome v7.0 (chr-ID 1; pos 3 5043930 to 35051113 reverse strand)
gctgtgttcaaagagcttatatttgagccaaaagagtaagtcccttgcatttgttatttggcttctgtttgaacttggcagaatgataaatgatacaactgtgactaattgtattttgacattataaatgtgttaataaatagtaaggattactgcattcttttaagttctacaaaattttcttgtcagaattttgcagtgattctttaatgatatgatacacatctcctgtgtatttgagaaaaaagaatctctaacactaatcccatctttatgtgcactgtacaaatttacaacagttaatacgatgtgtaatatggaacttatttttgccctttaactagttatatatacatcttcttaatctggatgcatcattgtttatctgaggcacaggcacatgtgtctatgcttttagtttccttggggtcatagagtggcattttgtgcagtataggaataagaagctttattatcttgttttcgataaaggaagctttattaatcttagacaattacatcaagctgatacaagtgaactaagattactcccggcctctacacactaaggtgtacacagccaaaaagaaaagaaaaaacaacaagagaaacatattcctctcaaaagcgagctatcactcataacatagccttcaagtcatccactaaccaggcaaagctagaaccgagactgaggctctccataagccaacgtcttcaggaagaaaacgatatacaagaatcacctaacggcccgtttggatgcctagaaatgaaaccttttccaagaaataaattccaagaaatgaattatatagaattcaatcgactagaaagtgattcaattccattatttttgtttggttgtacaagcaattgaattcctagaattaaattctagatgttgtttggatactttgcacacagaatttgaatttgaatacaaacaaggatctcttgactttgcatctgcttaaaaatgagcatgaacaatttacaactatcagaaactattaagttcacaaataacagttccacaaaggcaagtcacacataacaatttcacaaagtcatcaaattcgcacataaaagttctacaaatacatcaaatcttcacatagcagtttcataaagccatcaagttcgcacacaacagtttcacatagccaacaagttcgcacacaaaagtttcacaaagacaggttcacacaatcagttcaacacagagatctaagttcacatataagttgtttcacttccttagctgcatcataagccacctcttcctcctttccattgggagtgccatcattgactcaaacttgcgtgcattagaggtgaggatgtcataaagctcaagttccgtgtcttcatcaagtccttcaacctcttgtaatgcggcgagaacttcggcggaagagggtagctttggaccatcatctttcaatgcagatgtaagcatgtcaaacttatcacaccatatagagttaaatgaatcatctgatctttgtctttttaaactactcgaggaagatacagaatatggagcatccttgcctccggtatcattctcttttgccatttcctttgaactttcagctgctgttttagcaccctctccatttgcttggtctttattgtacactaggctcagtagatcccaaaacttcacaaccttatgtctatatccttttgcttccttattcctctacaaaaaaattgttgcaaagatacatcaacaaataaacttggaattgaaacataaactaagctgcaaaaaaatggaataaactactaggcaacagtagcatgtatgaccaatttagagtaaaaataagaactgtgcaacatatatggcacgatggtaagcaatctctaaaacaaggtattattaaaagcatacacactcatatgtacacttaaatatacactcatatgtacacgacagctaaatgtacactcatatgtacaggcctaagcagcccaacaagacaggcctaagcagccaagctaaacttatgtgtgtatgggaatatggtctgaaagtgctgccaaggatatgaacaaacaggtgggtatgaatgtctaaaagtgccagacaataatttatttgattgatgggaatatggttttttatgccaaccctctctctatgtcaagtctcttgctcgtctggctggatgggtggtgttgtgcttacaatatgctgtggtgtgtaagtagataggctggcaggaaacgactcttgcataagataattaacaggcctctatctagctaggcactagtggacaacaaaaattgaaccgcaacaattgaactgcaaaaattgaactgcaaaaattttcttacctcaacatactcatcccatacagtgtcactatcaactttgagcttgttcttctcccaatcccatccaaaaccactagtggacaacaaaccattaatgatattgtagtgcttatcaaaggtcttgctgcgagagctaatattttcctttgtaatggtgacattgcacttctcacaaacattcttcacagcagctgtgtatacatgaaacttccacccattctgacatctatcacctttattgtaatagtccacaaacgtatcgaggagtaccttatccatctcatcattccaaggaacatagccccttgttttcttgtcctacaatcaaagaaccacacatataaaaaacacaaacacaaaaattcataaatgacaaagacatagaaaacagaagcatacaactatgagctttgaccacgcctcgcttgataatcaacaaacatttcactagctttggtgtctctaaaattaccccactcattagttgattgaacatgcgtaatcagactcatttctccttgattttcagcaggagcagcagagatgagactatcaacttcatgtattagaatatcgtccatatctctttgtctatctcttaaaaaattatgcaatatgcagcaagcatggatgatcctaatctgcaaagaataatatggctaaatcaatacacaattttaaaactaacgattgaatttcaattgaatacctactatgttatacctggttttctaaatcaaaatatgagctggtcctcaagattgcccatctcatcttcaatagcccaaaagttctctctatcacattcctagccgttgcatggcgtaggttgaataactctctcgcagtagatggattgttgccttgaatagcccattcattcaagtggtaccgtgtagatcggtacggggcaagaaatcccggaccatttgtatatccagcatccactagatagtatttaccactaggaacaacaaatgagtcctcccgtgacatggcatcacgtagtatgcgtgaatccgaagccgacccttcccatccagccaagacatacaaaaacttcatttgtcgatcacaaacccctaatacattagtggtgattcgttgcttcctatttctatacctaccttggttagtcaatggaacattcacatcgatatgtgtgccatctagtgcacctagacaatcctcaaaccatttccactttggatcctcaggtagagtggtttctggattaggaagcttgatgaactcatgacttaaaaataggaatccctctaagcacttcgttgaagtgtcgactgattggttcaagagaccacccataagtgctacggatcaacctcattttggtgttatgacctactataagcagaaaaattgcaagcttttcttctaccgacacatttaaggtatcctgtaggccactcttttcccgtaagatggcactcaagtcactaaaagatctcttagttaggcgcaaactgtcatagcaatagacatttgaaccctggtacatattacgtagcatttgttttctggactcgacatttctctcttgaacttcgttagcatctacgatgtgtctaggtctcctccgttgataccggtttgcaataatagccataatagacacaactaatacaacaactctctttcgcttctttctcttccttttaatttcctcctcgttagtatattgagttgatatctagaacaagtaatttatatgcaattagacatgctagttgaaagcaaaatgctctactcaagaataaaaacactactagtaggagcacaaggtggaataggagaagtaccgatgtagccatggagattgaaggatttgttcgaggtagctagatgaaacttgaggcggcaaatcccaaaacagcgagctgttttagcactcctgcaaatgatttgttggaaacattacttaacgcacaaaggaagaagaaaaagaagatattagaacagcagacaagtaaaaaaactgaaactcaacaggttgaatatgataaactgtacatcaatcagatgcctacacaatgaatcgccacaagtcagatagttacatctgatgaaaaaactgtacaacaggatgggaattctcccttcacctacagacctacatcattgttgataacaagacgtgggttctgacttctggcctgataataacttctcttgtgtttcaattagcgtgaaagcaatatgtgggggaaagagaactgatgggactatatttgtgcactttactcccctgatatgccctggaaattcttgctcctgaattctgatgcatcaaatctattctagtcataatgctactagaccggatgactcaattagacagacaagtagtataccaaccatcacctggctgttaaattctaccccgaccaattggctgttgtcaagttctgtagcaaactgttattcttgagcgactggataccggatcttcttctgctgcttgttacttttagaatttagaagggatacatagaagggataccggatcttgagcgactggaggcggtccttggtagcctcgtcgtactcctcgagcagcttggtgaggtcgtcgtcgcaggtgccagagatgaagtaggcgacgcgggagccgtagccgaactcgtcgcgcccacgccaggcacgccacgctgggtgccgccacgaacaggaagaacaccaggtgcaggtcgcagggcagcgtgagcggtgagcgatgccgcgagcagggagcggggcggctaaccctagccactttctgacgctttccgatgggtgatggtctgaaatgagtcaaggctaaatttccagggacgagaaatgggctgaaatggccaattcaattctaagggcatccaaacaggcccagacatggaatttgattcaatttggaccaattctagggaaccaaacgggctgtaagagaaaagacccttgatacttcaaacaatgccttcatcaaggtcaatgtcaggcacaaacaacaaaggtcaggcctagagatttctcccggaagtcgacgagcccggtacccaaaaggcccaccaaagtcaaagatcaccagccttgcgtccaccttctttccatgctcataccggcataccaccaactcttggataatatcaaacggccatgagctccaagacaacattaaatttttagacataccgtcctacgaagacagagtcgcgaactagcccatagacacaaacaaagtccacatgttgcatctaaaaatcaaaagtgtcccacaagcaaacgattctgtgaatcaactccaagatgactctagtcttaggttcgtgtgcacgacacttgcaagatatgaagacaaagaagcgagagatagtcgcacctgccacgatctagtttgctggcacaccaaaaggcaacaacgccataaggtcggctccagcagccaccgaagcctaggggcacaaacacgaggccatgaatgtcgggaacggcgccggcgagaatgtgtccccgtagccaagactgagttgaggagcaggaagcgagcgacgaatgccaggcaggagctccagtccaacagaccaggacgcgggcgcccgaggcacaagaccagtgggcgtggagcagcccccccatccactgcccgcccacccatggtcagcgcaacatccgtcgccgccctgtccaggaggaatcaagcgccgccacaccggacgacgtcgccagcaacgggaagaactcgccgccaccgcaagagcacgcgctccaacatcgcccagatctggacgcgcaggagagaagggccccgccaccgccttccttgggggtctagacggcgacagtttgccccctcgggcgacggcgaggagggagaaggggggagggagaggtgaagctttattatctgcaactgtgtcttatagggccttgttcggttacaagggatgaaatcccagtatcccaccatggatttaatccagttctggattgggtgaatctatacttcacacctagggtgcgattaaatccatcatttaatccatgtatctctcaaagctagttattttttgattcatggattctaatataaacttgtgcaatatcttcatggatttgttccatacctaatgagctatggataaaatccatgccttccatagtttaaaaaatttccaaacccatgggttataatccatgatgggtttaaccgatttttttgagtaggcttggattattttcgggcatggattgtgacatggatttaatttcaatccatgctaatccagatctagattggtgtaaacgaacaaggccagcttagtgtgctacctgatatgaacaaacttttactatattgaaaaatggagatgaaaccaaataccatagatctttctgtttttgttccgttgtcacaagtcctattctggtgcatacttcatttttagcctttaacctgtaagagtgttgattcactgctggaagtagtgtgcattgcattatattaaagacttaaagctgagcaacaacaacaaagtcttttactccaattaagttgggtatgctaaagttgaaacccaacacgatagtttggtgttcggtgtttttgtctggtatattgattgcctatgcaggtgttgtctatcgtgcttgagccattcgtacataaataagaagttttatctgttggaacatcttaatcttttctacataacatggttacccatatgcctgatttataagtatataattttgaagctgaagggagattagctaacgcttgtgcattgtataaccacccaacaggtacaagatatttgggaaagctctagcaagaattc

SEQ ID NO: 1072 - DNA, 6061 bp, Zea mays
  Intron number 5 from transcript GRMZM2G167338_T02 (locus G RMZM2G167338) derived from phytozome v7.0 (chr-ID 9; pos 1 28403317 to 128409377)
gcaaccgtatccttttctactttatgtgttggcttacacatgtagcgtatgttgaattgttgatagtgtctctttgctggtaatcatttgaatagctttaaatgaaaaaaagccaagttactcctaccaaacggctgggatgttggagcacgaggcaatgagaatctgtgatatggttccactactttctaggttgcattctgtaatatccctgttaacattggtgttgttggcccatgtgggccaggttgtgtacttgtattggtgtctggtggtttagtagtttagtaccaccttggattataatccttgtagctccaaacatagttacacatttattagagctattgctttgtacatagacgagactttcagaaactagatttttgtgaccacatgactataactttgaccacatagtttttttattctgacattcagagtgaaaggcagctcaataaacagtgtagctttgaattcctttcctgtttaatatctttaatgccttctccactgaaaagaagtcaatccgggtaatggattgaaagagcatttttttttgtaactacacatatgatcaaacatcctatagccaaattttaacggtatcacaaactacaaaaacttgatgcatatcagcagaagtattttagttatcacattttcttgaatgcaagcttaataatcagaccccacaattctagtttgagcaagcgcaaagcactccttgtccccttcaattgctagataaagaaaacactcaaacagtacatagatcgagaaaaaaaataaagtgacactattacactaagcacacaagcactcttgctgcaaaataaatttggtgaaggataaaaaaatacatggctcatttgcgcattagtcgcaacactgcatgtagtattaggacctgtttgaatccatggtgctaaagtttagcattacacttttaactaaactttagtacatagagatccaaacatgaacactaaaatatgcttaaagtgaagtgctaaactttaacacccaatagcagtttagctcctcaaggtgtgctaaactttagcatgctaaagtttatttttgttgaaaaaatggcaggagctctgcctttcaattaagatagggaagaggttatgtacatgcttagaattaaaaaggagcacgctcccaacaggtaaccgggcagcactaaggtgcaaaagaaaccaaggaaaaactctacggtgagagctttttccactgccattgtccatgcgaaaaccttgcacttgttttcagcatgtgctttctagattaggctggaccggaaaggtctgaaggagcctctaaactggacacggtaagctgagcgagcggagtatgttccgtctgccgtccatctccatagaatggagtccctcaagccagacgtaaggtgggtgtcctaggttttgacccaaagggagacgaactcctgcatctgggttgcagtggtgattcgtcctcgcagcgcgttgatccagtggttatcccggagctccatgaacaccgatccgtttttcgtcctggatatcacaaataggctaggagctaagtggcatggcgcttctccatcaagccaagcgtcatgccagaaacgacatctatggccatctccaacgacgacccttgttgaggtagtgaaaagtgcttgatcagtgccgtccgtcggggtatcgatgccagcccaaggcttggtatcatccacccattcctgccataaccaacgtaggtgtaaagccctgccgaatttatcaaggtctggtatccctaaaccgcccaagtccttcggtcttgtgaccgttgcccaattcactaggcagtggcccccgttggcgttttcttctcctttccagaggaaggatcttctgattctgtcgattcccaagtccttcggtcttgtgaccgttgcccaattcactaggcagtggcccccgttggcgttttcttctcctttccagaggaaggatcttctgattctgtcgattctcttacgggcccagactgcgagcgggaacaccgtcagatgataggttggtatggaagagaggaccgatgagacaagagtgagacgaccggctctattcagccacttccctttccagccagggagtctgtgagcaatacgttcgatgagcggctgaacgtgcactttctttagagggcgtgtatggagctgcaggccaaggtagcggcatgggaaagattctatgatcccattgaagggctcaaggacgtggtctagctcgatgtcttcacaacgtattggatgaacagagcctttttctaggtttatgcggagaccagagaaatgcccaaaagcctggagaatctccacgaccgcctgcatgtcttgtctgaccgggtttaggagaatggcaacatcatctgcgtataacaaggttctccatctagccgtctcttcgggcaacgaggaaagtgtgccatggttggttgcaaggtcaagtatgcgttgcagagggtccatagctaggatgaatagcaaaggcgagagagggtctccctgacgcaccccctggcatggaaaagctttgggcccggctggccgttaatgagctcaggggaggtggccgtgtgcaagagaatggacacccattcgcgccaccgctgaccaaagtccagaacatgcagtacttcgatgaggtagctccagttgattgtgtcaaaagccttatggatgtcgagcttcatgaagagtgcaggcgtcttatgtctatgcatttccctaatggtggattgcacgtagaggaaattatcatggatgcttctcttcttgatgaaagcactttgacagttggaaaccatatcatttaggtgggggggggggcgagtttgttggccagcagcttggcgaagattttagcgatgctgtggcatgctaaagtttaacacatgggatccaaaccggcccttagtttagataggttttagcaacacatcagagttaaatacgaagtggcactcgtgattcaatttcaggaaacaagtgttgaaacttgtaacaacttgggcagaaaatgttaggcaaattcaggagctaaggtatgtgatcgcaccataatggtgtgaagctcctgtaccttacatatggatttgaattcttagctaacgtccaatctaaagtagcatctaacaaaattgtacacttacctctagctgagttggttaggtggtctgattagcactcctcaggtcatgagttcgaatctcagtgggagcaaatttcaggttgaggttaaaaaaggtcactcgtggttgtgtgcacatgagatggactgacctatggagggcggatcctcgtgtaggggctaggagggctcaaagtacgagtaaagatctggcctataggaggcggtcatgttgcacgagggacaactttcgtgaactttctcggttggggctccgattgagcttcttagtataatatcgcaggggtggtctttcccctaccatccgagttttttttgataatggaacatttgtagcattgtgatattggttaaaaaagtacaattttgtgataattttggtcttgtaagtgtagttcccttcgaatttactcaatcttaaagcttgtaaaggtagaacatgagtaatacaatggttggacacccagtggccagttgtggtgccagccagccaggtcaccttgagttttgcagaaaaagcattgacttttatgagcaaatgctttcatagttatatgtgatcatgttgtgggcttttggcattagacaccttcctttactcttagtgtcaatgctatggggattgttctgccaaggtgtcatgggcatcatagggagcggtcactcatgtggggccgcacctatgcgcgccaaaagcgagaggccgcagggggcgctggcagcaacgcgcgcaaggaaggcacgggcgctggcagcagcgcgcgcaaggaaggcatggcaaaggaaagtgactgatttggtggctaaattgatagacctaaattgtaggggagataattccaattagtcacttgcctaattagtggttgcctagttggtcaaccggtggcctatatataggcctgtacgccggagacaaagaaataatgaatatattatcaaaccaatctctctctcttgcaatgactctcaagcgcctagggctgctaccctagaaccaagcctgcgacagagggtataacctcgtcggagaagacagctatccccatggaccgaacacctggtatcagctccaggttatcctcaccaccaccagccgcccatccctcaccaccaccagccgccgcaacgccctcccacccgccctctccatctccagctgcattcactcggctcgaagagagttttggccgtttcgcagagaagtgggatcagttcgttgtgatgttccaccgctacaaggagaagacagagaaggaactccaagcaacggagcggcttcaggcggcagcgcgagggttcctggcacgccgccagatacagtcccttcgtggggagaagcaccttgctgtggcctccagggccaccccatggccgtcatcacatgagcaggccgtggtgcgcctgcaagccgcagtgcgcggcttccttgttaggcgggaggtgcggaagctgcacttgctgatcagctcattgctgcaccaactcgcagcctgcgcacccaactaccaggtctcgtctatactttttgaacccactgcagaagtcgagatctggttatgcagcccccctgcacggccaaagagggtcgtctccttcattcgggcacctgccttggtgctggacagacccaacataagaacgagctggttcctcctccacctttcatccaacgtgaagtcctcagttcagctctttctttgggatccaggaggacaggaggacataactgcagttcaaatttatattttagttccacaattattttgtattttcgtcttaaataataaaggtaagccgagatgtaaaaggcttaaccttaagtcgtgtcaggtaagtctatggcagctcgaggacgagctggtcctcaagggagggggagatgtcatgagcatcatagggagtggtcaccaccatgcagtccgcacccgcaggaaaggaaagcaacaatctgtgccaaggctaggaggaaagagaggattagttgctatccaaggtcaggaggaaagataggatacccctttttattgaattgattcagtattatcagaatgcaagtcctccccttgaatttacaggatacccctttttcctctcaatgggattacatcccgagttattgtgaaaaaaagaggttatggaagtaaatattctcgcatttattgctacaacattgttcattctagttcctactgcctttttacttattatttatgtaaaaacagccagtcaaaatgattaattggaattcattgaagaaatgaaaaagggattaaagaaaataaaaatccaagtcttaaatgaaagggtctggttggaatcataaagttgctattgttagtccttaattctaggagccgattagctctagtcatgccggccaatggctatatatagcccctgtactcggcagttggaagggggaaggaattatcaaaccaatctctctctctctctctctctcttgcaatgactctcaagcgcctagggctgctaccctagaaccaagcttgcggcagaggggtataacctcgccggagaagacaactatcctcatggaccgaaggtccatgacacaaggattgagttttttaaagcatgtaaagggtatacaaatttttgtttgtgtttgttcagtatatgattttcttctgcccaatgtgctgattctggcaatgtagatttaggatttgtgcagtacctctaggagcatagaagtactaaacatgttacaataataatattttttcttccaccaattaaccctttttgcctttttggcaataactgcttttatgattttccatgcagtattctatgctagttttccttaatgctgttagacatattaaacaaaaggaaaataccag

SEQ ID NO: 1073 - DNA, 6153 bp, Zea mays
  Intron number 1 from transcript GRMZM2G393583_T01 (locus G RMZM2G393583) derived from phytozome v7.0 (chr-ID 2; pos 2 6550546 to 26556698)
tacacaaagcttacttgcacttttgaaatagtaggttgttggaaaattaacagggcctaagattaatttgataatgcagcataaaacgaaaaatccagatctactggcagataatatcaacaacattataatagaacagatctggactaactcaacaagattaacacataacataagaatcgacaacagatctaaccataagaccatcatcgcaataaactgaaaccgcaaatttactcacagtgatttccacgagtgttgaagaagaacccgagtggacgtgtgcgaagcactttccagaaacctgattcgtcggcacccgtgtaggtcgtcaaaatgccggcggtggttcggagacaccgtttgtggcggaactgcccgaattattccaacttaagtgcccaaatcccgcctcagaggctagaccacacttaaatgggaataacccgtcaatccctcggatctagtccgacacggccactgacaggatcaagtaccacaatctcactcgaaggtgagtcacagagcaaatacaataaagcataaaaccatacatgtcacaatgttaaattattacatcaccatcatcatcatcggagttttgcaaaagtaaccatcattgttcgaagtgcagcggaataaaactaacgataattaaacggggagatggggaagcctgtcccatcactcctcgtgctcctcctcagccgaggcagggtcccactcaacagtccaacccggtggtaaggtggacggccaagtcactctagcaaccatttcctccagagaacctgtaaaattatgccacaagcaaggctgagtatactaatactcagctagacttacccggtgtgaggagtctactcctctacctctagacatgtagctgtttggctgtggggtttggttgccaaaagcactagctgagtttctaaatcaagattttaacttagtcaaagttaagtgtgactctcttaaggctaaaaatgtactatctattcatacaaagtagcaaacattttagcaatcaacatcttatatcatctccgcataattccacttgttactcaatgtagcagcatggatcaagcagtctcattagctgcgagaagcagacgattcggatcgagttttatccttgcaaggtaaacctaaacacacgacatgcaggggcactccgtccccacacacatcaaccgtccccatcgattccccgtcagcagatcagggctcaccgccttggtgtacaatgccccactgaccccgactggccgtcgtgcagtgaccgcacttgtacccaccataaccggaatgggagacctcgtctcaggatgcgtgaggggatatgtccactgccaggttcactcaggtactaggcttaccgatttaccatatttctcggcatgtgcttagtacgttcaaacgcttgactcacggtaccacaccttaatccttatgcaaattttatcccgtggacaaccaatccccatggattgttgtccacaaccaacatcagtacgatatgaaagtgggtacaatcaatgtcctgacctcgcgcgtgtgctagaaaaatcactcgtcttctaccgagatcctacttaataaagcagctactcgacttagcatactagtattcatctcaataggattcctgagatcatgcaactagggtttcacgcaattcctatacttaagtgcacaatcaatcctacaatcattaagtgaagtaaagtagcataaataacaggttatgcataaaaccggggcttgccttccaaagcagtggcaggcaggtcctctggtgcaggctcgggtgctggatctggggctacctcctgagcagctccttgctccggcacgaggatgtattctccgtcagcaagattacagtctatcgaaatgcaatgaacatgtatgtcatgattatgcaggatttaacaatattatgctaaagagaactaagtcaagaagtaacttagggtttcttagtcatgcggggcttttggtggtatatatatagatacatagacttattaccttttatgcttaggttttcttttagaataacatagtggattggtattgccttgatacattttagtggacagattacaagggtcctaggataaccttgattcacattattctttttcctttcattaattcccatttagggtttctagggtaggtttgaactacaacagggtttcaataatttccaaaaattctgtaaaaatttcagtgggttgccctttgctattctaacttgttttaagaagttgaggctttaagtaccaaggctaggctttaaacaaaaataacaaaagttaggcaaaatgggccactttacactacacctcttggttaggggtaggtcctgtcctaaaggttatttttgctggtatcccatagcaataataggcctctgtgctaaaaatcacagaaaactaaggggtggttatttagttatgattttcttaaatttaatgtcaaaaaggctctttctactaccttattatttgaaaaatgtcaaacagcagatctcctatttttcctaagttcttcttaatgaaatattagttatcccaagggtgggggtgtttttacctgggggttatttttgtagagtttttctaagtttcatttgttttattaaaacaaaagagatcttacttatcttacactaaaacagggtatgatatatttttctagtaaactatattgaataaataacctaacaaaaatagaggtactctctggtccattaattaaattacattttctatttttcctatccttaagcatattatagagtaaggggtaaaactaacttaaatggagtagacagaggggtttagcatttttatttggtttagtaggtatatataaactcctcagaatttttctaaccccagtcaaatagtgcaactaattttggccttattattaagcttttggtcaaaactataattaaatcagagctttaaagttttctatagtacataggggttttatatttttcctaaataggtttcattatttgaagtctgacaaaattggtttgaccaaatttggatgatttaaacaaaagttatgcattttcaaagtttctgtccaatttaaaaacagatttaataaaggttttctggaaaaaccgtttacaccgaggtccttgggtttaaactaaatccaccctcacaaatctacccccacgccactattcccctgtgtcgctgacattacacaaaaccccctgacctttcttccctctcacccgcagtccttcccctcactgaaacagtaaccgcgggaaagaaaagggcggcgcggcttaccggcggcgagggaggtccggcgaagggtggggtcggctcggggagactctggcggtcacgtcgaggtacggctcggcgtcgggggtggccggaatcgctcggtccacgcgtgcaggcgggtgtcctcgtcggcggcgagtataccggccaaaccacggcgaactggttcaatccgagggtacggtgagcatcacggggtcacgtaatgactgtgtgcacaaggaatcgaaggatggtggattggtttacccggtccacgtactccggcgggggtgagaactctggcgagcgtggactggctcctccggcgaagggaactccgattccttgctcggggagcctcacggaggtgtgcacaagcctctccgagggcatgacggggttggggatggctctgctagccggtctatggtggcagaggggttgggcggccgcggactcgctgcacgcgggcaaacggcgacgagctaactccggcgaggtgtgaagggtgtgcggaagggtgtagccgaagcctgggagggctttataagctcgggcgcgggccacggcgcgggtttggctcgggcgcgacgcggggcatgcgagggcgcgcgcgagcgtgctctggcgcgggcagaaggcgtcgaacacgtggcagtgagtttcttccaatgttcaaacgcttccagagatcgcaaacgtgcgaatctcgccatgaatccggcgcagacctcctcctggcacctagggctatctcacatgtgtgagttccaagggatgatacgccctagagagggagatagacgggcgccaaatctggcttgtctccctgcccgctcagcgacaaaactgatgtcaagtgctgtcaaacgtctgagtctcggtctcaaatttttccagggggtgccttaagtggtatagcacatttttggtatagaacccaagtggttttggcgccatcttcaaagtgaacacggctggtctttgaattagggcaaaaatgtgacttagagggaaatagagagctctagctctctctccacttggagatttgaattggggtttctccaggggcctttttgcaatatttccctcccttaattgatggttacactgttgcttagggtttgggcaaaagttacacacacttgcacccttgttcactctcttccccccccttttacttagggttttggaaggtagggcttttgagaggtctagggttcttctccccctattatccaaggtagtaagtgtgcaaggactagagtaatgcttcctatgtcattggcaacttgattagcacatgagctccaaagttcctatgtggtgccctaagtcttcaccattgtgaacacagcttctagtgccaaagtggctctagccagggtaacacctggggtgttacaccgttctcccttgatctgctgcacgacaaacgaagggacggcaaggcagagaagcgacaacgcagagaattgagaagaagaagattagtcggttgctattcgcctctgacctctgacagaaggacatctgccctttatagacgggccgtcgcaaccccttgatttgatctgctatattccaggaaccgcccctagaatatctctacgtgcaaccgcctggagatctcgcatgtaacgtgcgtgcccgttgctcctggttgacgtggcagtataggtgtgatatttgataaccaaataaacaaaaggcaaaaattaaactatcgtttagaatacgtcacgacgcgatcacacatcgtcgcaagtcacaagtcacgcgataaataacgcgaaacgcgagcgagcgcgcgtgtggcagcctccatagccctttatttgtcttatgtgaagagtagggaacactcccacatataaactggttctctcctatctagatgggcaatatgggactaaaatctcatgccatctctacacaccaccttggcttccttattgaattgggccacacattagtgggcctaattccaacaatccccgccaaagccaaggtcttcaattgactcaatctctacgctttcatatatcagctttacagtgcagacccaatacaggttgagctacaccttgtagtacaggattcacctcctcatgacttggcaatggacaaagctttgaattgctagtcttgtgtaagttggtttcacctataggcatcactgatactaggccgcctaaagccatgcctctgattggagcgttacgatcatgctcctgtgtcttttagtgaatttatttgagattacccacatctcatagattgtgacctcacagtcaaactcacataggtgtattcttacaagtgtaccctgcagggcagtaccttgcctattaaagacctcagaatacattaagacaaaagtcaacctcccttgtagtactaagagtacgcatcttctagcggaaaacaagtaaaataatgtactatcttgttatacaaacagtctgttcttcccaattactaattcacgagatctccgatcacatagattgggttaccactgtatgataacatcatgtgggcttcaatcccatctcccttgatgctctatcaattacatcacgtgctaatccttttgtaaaagggtccgccaagtttcgaccagtattaatatactctacatcgatctctccagtatgtctcaaatgccttactgttttgatacgtcgtttcacatgtcttgagaactttgtgttttcctttgcatttcctacaattgtgatcatgctttgattatcacaatccaacagaatggctagtaccggtttatcaaccattggcaagtccatcgagagctttttcaaccactctg

SEQ ID NO: 1074 - DNA, 19193 bp, Zea mays
  Intron number 9 from transcript GRMZM5G898684_T02 (locus G RMZM5G898684) derived from phytozome v7.0 (chr-ID 2; pos 2 09587232 to 209606424 reverse strand)
gaataataagcagcaaactagcatatgtaagttgacatgttatgctttgcggagcaccaatttgaagttgtactggcatttaaaaagcgaggaaattctagctaatgccgtgtcaacacaataacagtagcataaagtagcatcagtgtgtgccctgttagatattatattacgctcacgctagctgttactgcatcacttgcagaggttgcatcaggaactcccagacgctattctgaggcaggtccggcagtgtggccatattcctcacgtggagaagccaagggaggccgcaaaacatgttcttgaattcctcgcaagaaacacgtcagacaagtcagaccagtctccttccgagccgtcagacaagtcagaccagtctccttccgagccgtcagtagtcgtgtaagctaccatgattactatcctgctggatgcttcactgttcgtgcattcagtcgtgaacaccgttgtaccgatttaatcgctcaatttcatatgcccggaaacggtacaggaaccgctgagcagatcacagatccttgaagggtaggctgtacaaagtggaatgtttggccatggatgatggatacagtcgctaactcgctatgctcagccaagctgctgctgcggaaggctgaagctgaactcggcgatggttctcagcgacactagaagataggttgttggtcagttaggactaactgtactgtacggtagcactgcaatgcaagggacgcagtggatgggagcatgacaatttcggctgttgccagtactgtaaattatgcaatgtaaaattatttggagtttgcaagggcattgcccttttccctcgccgttgatatccagacagcgccgccatcggcacaagccaagctagcaaccgagactgttttcaccttccccttggtggagcaacggcgtcaggactcaggaaacacaggactggacttgttatgcaggcccgggtcatgactcatgacaccgcgcttctcccgcgcaggcgcagcagcacgcgtgctctgctcttgcgcgcgcgcgtcattaccactccgcgccgtaattcgcccggccccgtcaccgtcatcaggtagtagtacccgtcaatcatgctactcgccgcgcgacgccatgtgcggccgcacggaaccagcgcccccgccggccctccattggtaccatgctgcgctttgtacagccgggcagcctgtgaccgcatcattcatcgctagtcacgcacgcagctgtcggctggatccaggacgccgtcgtacgacgcccgctggccggccccgggcgtgggacctgtaggttttgcaacaactttgcgcatctacctgacgtcctgtttggttcacatgttttttttttgacccatgagcggtggttctgctctgtttgacccatgagcgcccaggcggcaccgaacaagaagcaggcgctagtgggatgcattagtttttttccccaataattcccaccctttctccatagataatcagagtactcctgaactacatacacctcccaaaagggcagcgctttctactactactagcatgcaggcagtaggttgttgtttccgaggtcatgtgaaggcgtcacgcgagcacgatggcggagaggaggagcgcgacgagggcagcgcacagcccagcctctgggaggaggagcaagccccccgccgccgccgccgctgtgtccatgcctgctggtcctaggccgccgaacccggtacccgtagtgcctgcagtccccatgccggtagtgccggctgtgcctgcgcctgtcccggcgggcgtcaaggtccctgggcctcccgctcctcccattgtgccgccggtggtcggggtcacggttcccgcggcgctgtgtaaacaaggcagtgctgttagtgttgtggctggtaatactgatacacgacacacatgctgaatgttccgcgattcttaagtacaaaaaatccgccgaacaaactgcatcccggcccaaagatctggtggcgcaacatgatgctcaacttccttgggggtgtaccagttcccaaagcgcgcaggtttgaaacatgaactacatggatcatggtgcacagttaatttaagctcgccacgtaccttgcactggtggtggggtaagagcagcccgaagagcctgaaagtttggaacacaaaggtcatataaggtactacaggtaggactctgaatgggtggtaaaaatggacagtgtcacaagactgaagagcatggaagcagcagaacacagacaccacacaccatagaagacattggaatctggctttggagtttggagtcataaaacaaaacaaaagaccgcgttacagtttactttcccttttggaaaaatcggggggaaaattggacgcactttgatgccaatgtctgcccagtagacactatgatagggttttacttttagggtcgagaataataaagcatatataccgcaaacagctttgcactttgcaaatcttattttacagttattcgctcagaaagttggtgttttttttcttcttcttcctattattagttattaggcgaggctacagtgctacaccgatagccaaaattaattaccctgtacagaacccgattccttgaagcttaacaatgctacacggcatgcatgatcgttcgttggttccacttactcgggtcgctggtggtgagggtggcggtgccggcgaagtcgcaggtggcgcccttggccttgttgttctggtagtagctgttggcggcccaggagcagtgcgccgggacggtgttggggttgtagcacgccccggtctcatggatggagttgcagtccgccccggagccgcacgcgtagtcgatggtcttctgcagcgccgtcctccgaccgtgtcgccgtccgaggctaggccggacctcgccgaaggtgtagttgacgccgagggtgctgctgctcccttcaactgtcaagatccgagcctacaggatcgggttatcttgtagtgtgcgtatgttttctgcggcggccgaggcccaaacatactgtcgtcgtgttgtaaagctgtgttccttttcctgttgtctcgagtatctggacttatttgtcggtaacagaattgcttgtccgagcgagagttacttttcgcggaaggtggcgagtgaggtatccgtatcccggaggcgtaggaatccctcggctcggtcggccttgccgcttacgtgcactcttactcgtccatagggttctgtcaccgatgtagtcgagaaggcccaaaaaatcgtttcggcagaggagttttcgagcgtgaagacttgttcggtccgcggaatcacttatccgagcgtgagttacttatcgcagaaggtgatgagtgaggtatccgtatcccggaggcgtaggagtccctcggctcggtcagccttgactacttacgtgtactccgtcgttttcaggatccactttcaaagtagttgaaaagcacgaaagacattctggcagaaaagatctttttccgaggaaaattttgacgcagagggggttccccccttttagcccccgagggagggtcgggctttgccgaggcaaggctgacccttccttgatgactagactttgtatgtgaccgaggtgtatgaacgacttgaaagcatcttaagggtagacgcgacgtagctgtcggatgttccaagcgttgttgtagacctcgccttgactgttggctaccttgtacgttccgggcttcagaaccttggcgacgacgaacggcccttcccagggaggcgtgagcttgtgctgccctcgggcgtcttgtcacagccgaagcaccaggtcgcccacctggaggtctcgggaccgaacccctcgggcgtggtagcgttgcagggactactggtaccgcgccgagtgtagtaaggccatgtcccgagcctcttccagttggtccagtgagtcttctcgattagattgattgctttggtcgccgtaggccctcgtcctcggggaaccgtattctaagtctgtgggcaagatggcctcggccccatagactagaaagaacggtgtgaagcccgtggctcggctcgacattgtcctcaaactccagaccaccgaggggagctccttcatccatcgcttgccgaacttgttgaggtcgttgtagatccgcggcttgagtccttgcaggatcatgccgttggcacgctctacttgcccattcgtcatagggtgagccacggcggcccagtccacccggatgtggtggtcctcgcagaagtccaggaactttctgccggtgaactggatgccgttgtcggtgatgatggagttcgggaccccaaagtgatggatgatgttggtgaagaacgccaccgcctgttcggacctgatgctatttaggggtcggacctcgatccacttggagaatttatcgatggcgaccaacaggtgcgtgtagcccccgggtgccttctgtaaggggtcgacgaggtctagaccccacacagcaaacgaccaggtgatgggtatggtctgcagagcctgagcgggcaggtgggtctgccttgcatagaattgacacccttgacaggtgcggacaattctagtggcgtcggccaccgcggtcggccagtagaagccttgtcggaaggcgtttccaacaagggctcgaggtgctgcgtgatggccgcaagcccccaagtgtatctcttgtaagagctcctggccttcggcgatggaaatgcatcgctggaggatgcctgaggggctgcggtggtagagctccttcccgtctcccagcaagacgaacgacttggcgcgccgcgccaaccgccgagctttggctcggtcgaggggtagctctcctcggtggagatattgcaggtacggggtctgctagtttcgattaggcatgggccagctccgctcctcctcgacgcgcagtgcctcaccctcgggggccgagggtacctcgggccgagccgagggtgccttgggctgagccgagggtgcctcgggccgagccgagggtgcctcagactgagccgagggtgcctcaggctgggccgaggccttctcgggctcgggtgtgtcgtcggtcttgacggagggttgaggcaggtctcgggagaagacgtctgggggaaccgttgttcgccccgaggctattttagccagctcgtctgcagtctcgttgtagcgtcgggcgatgtggttgagctcgagcccgtagaacttgtcttccaggcgccgaacctcatcgcagtaggcttccatcttcgggtcgcggcagtgggagttcttcatgacttggtcgatgacgagctgcgagtcaccgcgagcgtcgaggcgtcggacccctagctcgatggcgatgcgcaactcgttgaccagagcctcgtactcggccacattgttggacgccgggaaatggaggcgtagcacgtagcgtaggtgcttcccgatgggcgagatgaagagcaggcctgcgcctgctcctgtcttcatcagcgacccgtcgaaaaacatggtccagagttccggttggatcggagctgttgggagctgggtgtcgacccattcagccacaaagtccgccaagacctgggacttgatggccttccgaggggcgaacgagatcgtttcgcccatgatttccaccgcccactttgcaattctgcccgaggcctctcggcactggatgatctcccccagggggaaggatgacaccacagttaccggatgagactcaaagtagtgtcgcaacttccgctgcgttaggatcatcgcgtacaacagcttctgaatttgtgggtagcggatcttggtctcggacagtacctcactgatgaggtagactggcctctggacgggcaatgcatgcccctcttctcgtctctcaaccacaatcgcggcgctaaccacctgagtggtagcggcgacgtagatcaagagggcttctccggcagcggggggcaccaaggtgggcgcgttcgtgaggagcgccttcaggttcccgagggcttcctcggcctcaggggtccaagtgaagcactcggccttccttaagaggcggtacagaggcaggcctctttcgccgaggcgcgaaatgaaacggctcagagccgcaaggcatcccgtgaccctctgtacgcctttcaagtccttgatgggccccatgctgctgatggccgcgatcttctccaggttggcctcgatgccccgctcggagacgatgaaccccaagagcatgcctcgggggaccccgaagacacacttctcgggattgagttttacgcctttcgccttgagacatcggaatatcgctccaaggtcggaaaggaggccggaggctttcctcgtcttgactacgatgtcgtcgacgtaggcctcgaccgtttggccaatgtgttcgccgaacacgtggttcatgcacctttggtatgtcgcacccgcattcctcaaaccgaacgacatggtaatatagcagtacatgccgaaaggtgtgatgaaagaagtcgcgagttggtcggactctttcatcctgatttggtgataccctgagtaggcatcgaggaaagacagggtttcgcacccagcagtggaatccacgatttgatcgatgcgaggcagagggtagggaactttcggacatgctttgtttagactagtgtagtctacacacatccgccatttccctcctttctttctcacaagcacagggttggcaagccattcgggatggaatacctctttgatgaaccctgccgccattagcttgtggatctcctcgcctatggctctgcgcttttcttcgtcgaattggcgcagagactgcttcacgggtcaggctccagctcggatatccagcgagtgctcggcgacatccctcggtatgccggacatgtccgagggactccacgcgaagacgtcagcgtttgcgcggagaaagtcgacgagcactgcttcttatttgggatcgagctcagagtcgatccggatctgcttggaggcgtcgttgctggggtcgagagagacggatttaaccgtctccgctggctcgaagttgccggcgtggcgcttcacgtctggcgccttcttagagaggctctccaggtcggcgatgagggcctcggattcgacgagggcctcgacgtactccacgcactccacgtcgcattcgtacgcgtgtcggtacgtggggccgacgatgatgaccccgttggggcccgacatcttgagcttgaggtaggtgtagttggggacgaccatgaacttggcgtagcatggcctccccagcactgtgtggtaggttcctcgaaacccgaccacttcgaacgtgagggtctcccttcgaaagttggagggtgtcccaaagcagacgggtagatcgagttgtccgaggggttggacgcgcttcccggggatgatcccgtgaaaaggcgcagcgcctgcccggaccgaggatagatcgatctgcaggagcccgagggtctcggcgtagatgatgttgaggctgctgcctccatccatgaggaccttggtgagcttgacgttgacgatgacggggtcgacaacgagcgggtaattccccgggctcggcacacggtcggaatggtcgtcttggttgaaggtgatgggcttgtcggaccagtctaggtaggctggcgccgccacctttaccgagcagacctcccgacgctcttgcttgcggtgccgagccgaggcgttcgccactcgcccaccgtagatcatgtagcagtcgtggacctcggggaactctcctgccttgtgatcttccttcttatcgtcgtcgcgagccctgccaccctccgcgggtggcccgaccttgtgaaagtggcaccgaagcatggcgcagtcctcaagggtgtgcttgatgggcccctgatgataggggcacgactccttgagcatcttgtcaaagagattggcacctccgggaggtttccgagggttcttgtactcggcggcggcgacaaggtccacgtcggcggcgtcgcgtttcgcttgcgacttcttcttgcctttcttcttggtgccgcactgagtttacgcctcggggacatcttccggtaggcggccctggggctgcttgtccttccgaagatggcctcaaccgcctcctggccagaggcgaacttggtggcgatgtccatcagctcgctggccctggtgggggtcttgcggcccagcttgctcaccaggtcgcggcaggtggtgccagcgaggaacgcgccgatgacatccgagtcggtgacgttgggcagctcggtgcgctgcttcaagaatcgccgaatgtagtcccggagagactctcccggctgctggcggcagcttcggagatcccaggagtttccagggcgcacgtacgtgccctggaagttgccggcgaaggcttggaccaggtcgtcctagttggagatctgccccagaggcaggtgctccagccaggctcgagcggtgtcggagaggaacagggggaggttgcagatgatgaggttgtcatcgtccgttccacccaggtggcaggccagccgatagtccgcgagccacagttccggtctcgtctcccccgagtactttgtgatagtagtcggggttcggaaccgggtcgggaacggcgcccgtcgtatggcctggctgaaagcctgcggatcgggtggttcaggcgaggaactccgatcctccccgctgtcatagcgtcccccacgcctggggtggtagcctcggcgcaccttcttgtcgaggtgggctcgacggttgtggtgatgatgctcgttgccgaggcgacccggggccgcaggcgctgtgttgcgcgtgcgcccggtgtggaccgaggcttcccgcatgaatcgggaagtcgcggcgcgatgttccgaggggtacccctgccttcgggaggcagagctttcggcccgtcggaccgcggcatcctctaggagattcttgagctctccctggatacaccgcccctcggtggtagatggctccggcatcgcgcggagaagtattgccgctgcagccaggttttggctgaccccactggagaccggtggtggccttaccctgacatcgtcggcgatgcggtgctggatgccttggggtaggtgacgcacttctccgaccggaggttggcccgcccattcctgcccaatgtctcggcggaacggctcaagtgttcctgctccctcgtcgagcctggcctgcatctcgcggattttctcgagctgtgggtcatgaccccccgccgggacggggaccatagctagctcccgaaggatgtcaacgcgaggcacaggcctagggggatcaccgttctccggtataccaagatggttgccttcgccgggaccccctagatcgacgtggaaacattcacgacttgggccgcagtcctcgtcgccgaggctgcggctaccgtcggaacagtcggaaaggcagtagtcgcatgcagtcatgaagtcccgcatggcactggggttaccaagtccggagaaatcccaacagaagttgggctcgtcatcttccttggaacccgagggcctgtaggtcgagacggtcgtcagccggtcccagggtgaccacatacgataccccagagggtttggactcgcctctatgagagcgtccaccgaagcgaagtcgcttggtaggtcgagaccgaatccaaaaggcacgagatgggaatcggtcggtacctcttggtcgacgagcggtgacgaagtcacgtcaggggcagactgcaccgtcgtctcaagtacgagggtgacgcccagcaagtccttcgcgagcgtgctggcgtcgtccgtttgcttggggttggcgtgttgcggggagatggcgctcgtcttcgtctcagacgcaaggtcgatgcccgacgtgccccccgttggggcgccggcgccgtcgactcgctcgacagccgacgaggtgccgcctcctgcttggccttggttgccccgcctcctcctccgtcggcgggggaggggacgggacaagcctgaatgttgttcttccaccacgtggggaagacgtcgtcgatttcgccgccggcgggcaggttgtcggtcgccattgtcgttgtcgcgcggcgggggaaggagtatcatgtcgtagctgccgtcgagggacatgaactcaagactcccgaaacggagcaccgtcccgggatggaaaggttgctggagactgcccatctggagcttgacgggaagttgttcgtcaacacgcagcaggcccctacctggcgcgccaactgtcggcgtttcgaacccggggggtccctggaccgacgagtaaattatcgccgcgtgccccagcccagatgggtcggcgcgagacggagcgcgaaggggggaagaagccggagggagacaggcgtaaaaggggaaacccgcggccttcgtgtttgtcccgcgcccaggtcgggtgcgcttgcagtagggggttacaagcgtccacgcgggagggagcgagcggcttacgcgagcgccgtcccgtccttccccgcgcggccaaccctctgtaagagggccctgaaccttccttttataggcgtaaggaaaggatctaggtgtacaatggggggtgtagcagtgtgttaacgtgtctagcggaggagagctagtgccctaagtacatgccatcgtggcagccggagaggttttggcacccggttcgtgtggtgtcgtggccgtcggaggagcgctggagcctggcggaaggacaactgttggggctatcgagtccttgctgacgtccccttgcttccgtaagggggctgagagtcgccgtcgtcatagagcatgcggggcgccatcattacttgtttaccggggcgagccagatgagacgccggtcttgctccccgtagcctgagttagcttggggtagggtaatgatggcgcctcctgtgacgtggtcggtccgagccctgggttgggcgaggtggaggctcctccgaggttgaggtcgagtctgtcttccaaggccgaggtcgagtccgagcccctggggtcgggcgaagcggagttcgtcgtcttccggggctgagcccgagtccgagccctggggtcgggcgatgcggagttcgtcgtcttccggggctgagcccgagtccgagccctggggtcgggcgaagcggagttcgtcgtcttccggggctgagcccgagttcgagccctgggtcgggcgaggcggagcttcctatggcgctcgaggccggacttggctgctgtcagccgcactctgccgagtggcgcagcagtcggagcggcgcaggcggcactgtccttttgtcaggccggtcagaggagcggcgaagtgactgcggtcacttcggctctgttgactgaagggcgcgcgtcacgataaaggtgtcagaccacctttgcattaaatgctcctgcgattcggtcggtcggcgcggcgatcgggccaaggttgcttcttggcgaagactgggcctcgggcgagccgaaggtgtgttcgttgcttgaggggggcctcgggcgagacgaactttgtatagagatgattatactctttttccttctaacaaaatgatttgtaaacgaggtagtcattgcataactatggtaactttaatacaaatattaagtttgcttttgttcaaaattatttgtcttatcttttatttgtttgtttttttgaatttagggctctcatgtgaatttcggaccaaaaaatgaatttcggaccctaatgtgaatttcggtcttttataatttcggaccgcatgaaatgagcccgtcacgacccgaaattcaaacggatcggaccaaaccgaaattcaaacaatatgggccttttcgggcttgggcccggcccgaatgtacacctatacatgtgccgagaactcgagatgataatgcccacaggttgataggaagcaggactgatgacatagttcacacaaacttttaggccccgtttgtttcgttggaattgaattccattttaataattataatttagacaaaactaattaagttcatatatttatatatgtaatatatttgtatattatcttaaatcatatgagaaagatagttatatactacattcatgttataacgaaacaagtagaagagtgtgctataagttgtacatcggaaaaatagcatgtaaatctatagaatcaatttccatctcacaccccatgaatttgagataggcttatatgataactttggaaagtggtggaatgtcacattctaaaaaaataatctattccaatagtaagattctaattcctcaaaatgaaaggaaacaaatgggaccttaaggaaaaattctcattatgtctctacgactttgttcaatactttattctgtcttcgtaaatgttataaaatattctataccacccggatacaatttcttaacatttcatgccaccgtcaagtagtcaactactttgactctgacggactagataaaataacgaaattactatggttatgtttggttcacgaaatgtaacgtaaatgttaatgataattgtttacacttgagtaccagcggtaacaaatttgaatagtctggtatcatttttcagtgtggtatccaattacgttttgactaaaacaaacatgatttatcgttatcacttatccattacattataaatatgtgaattaaacgacacctaaatgcttttcttacagaataacaatatcttaagtactattcttacaaaattataatcccttaaatgccactcttaagtacacaattattcttttccattaaatttaacatatatgataattagtaattttaacatatccagtcattactactggcttcgtctcaatttataattcatttgacttattttttaccaagattggccggctcgtcttattaaaaaaatttatgaaaaaaaaattaaaaacaaaaaacatatttaaagtatattataagctaaaccatatcacaataaaaattaataataattatatttttttattaagatgagttgatcaaacttaatgttgaaaagtcaaatgagttgtaaattggaacagagtaataattaaaattttcagctgtttagcccacttgtaaattaaaaatttaaatcatcgtgtaacttgcttatgtctacaagagcagttattttcttaagacacctaaattatataagctgtattttggtgaaatgctagtagggtaaaatattattttgaaaatgataaataaactgaaataaactactcaatactaatttattttagcttatttacggtttcaaattaatattttacctttatactattttattataatccaaattatatataatttaagataagactgaaaccaacagaccattagtcgttatctccccatcattttccagtaccctcccaaagacccgtgtcgcatgcacaaatcaatcaatcaatggccagtcagtctattcagccattccagtgggtggaatggtcgcccccaatgacgtcagtgtctggcaagcatgcaacgacgtttcgactcacaagggtaaagtttggtccatatcaaaccagctgtttgaatatcgattcgaatatcaaatataatgtaattacaaattttattttatagatgaaggctaaataatgagaagaaatcattaagacaaataaatatattattatcaaatgtttacctagcatcacatgaggaatcaatcataatacatctattattcatttgtgtgtctatctacgagattttaccgtgttatagatgtccttgccaatcataaaacaacctccacgtgtttcttcctgacgagtctccttcgaaaggtgtttaggagtttacatggcgataaatatgatcaacatgagtttaatcgatctctagagatcagttttatcattctgctatgttcctcgctgcgtgtcaatgctgacgcactagctcttactgtctgactcttccttcgttaataagtgctgatcacatgaccattttatcgtgttgcagcattgtcaaagacaactgccgttgtcaagagcaatggaccattcacaaacaggtacggtgtttaaagaaaaagaacctgcattatttggtgtacgacatcgacaccataacccccttgctagcctcatcgaggtgggagacgtggtgatggtgttccctcatcacggtcattgcgatatgagaatagtgctgtctccggcgactcagtgagcagttcgtgctcggtgtcatcgaaggaaaccccgcgcctgatctatacctctctatggtagacatgttaagctccgttcgttttagatcaaatgtacattcattaattaacctataaatatacctataaatataatttgtatgtatgtctttatttattatcattaattgaatattgataaaaaaaagctaaaaataattatattttagtatagagggagtaatgattttaagaaataacatgctcttctaaatatcatccacatacgtggatgatatttagaagagcatggtatttcttaaaatcattactctctccgtatcgatttatattggttctacaatatttttgtccttttcaattatagtcacagtagtctaaacaattgactttaatcagaagcgaacaatttttctagctttaagaagactcgtaatccaaagccttgttcattatttttatatctaatggattaaaaaggacgaaagattttgacttaatggccctgtttggcacaacttattttcagcttcttcacaaatttaagcagaggttccgccaaacaggcagcttctgcagcagcttatcagttcagctgcttcttagaatacactaaaagcagccaacaagcagaagctgcttttcaccagcttctcagataagctgctttttcaacaagcacccgctgtgccaaacagagcaaatatactcactcaaaccctctctagagagggtgccccaagttgggtgtttctcgcattttttttgtttccgccgaatctttccttcccattctctttcgtctcgttcgtgttaaaaaatcacatctgcctagcccgtggccgtggcatggcaatgcggcaccacacgatgccacgcggcctccaccgtcctagcgccctataacacccgtgcagcggagtgggcatggcacacagctccaggccacgagaccgtccagcgcgcgggcaggcgcgccgctaaactaaacccgaccaaatgccgcctctcctcacctcctcctccgtaccggcgctgccgctggccgcgtggtccaggtaccgcctcagggttgcggcttccaacgccgcctccgccccggacggggccggcgccactgccagatgcaccagcaccggcgggttcccgtccttccttcccggggcggtggagcgcatccgcgacggcgctgccatccgcctggccaagcgaatcgagcgcgtgcccgtccaggcgagccgatttctcccgatttactgtgctgtcgtacgctcaaatgcgcaatggctgagcctgaacttatcctatcttcatcttcagaccagtttctcgggtagcgcgatatcgagcagctgtgtgaggccgctcaagcagcaacaggacggtgatccggtcgtgctgctgcatggattcgacaggtgggctccaaatttctaatgcacagcaaagttcgttgctcaactaggtcaggtttttagtgctagctggtcatcattgctcgaggagcctgtcccaatattgaaatgcggtggttctgctatctgctatcagtgtggaccattttaatgtatcgtctacagttctgttctagaatggagatacacctacccattgctcgaggaggccggattggaggcttgggctgtggacatccttgggtggggcttctctgatttgggtacgccccatcctgcacaccatgtgatctggtttggttactgtacctggtaaggttgtgatttcgtactttgtaggccccttgtaatatctttgcttgtctcgttcgtagaaacacggccgccatgtgatgttgcatccaaacgcgagcatttttaccaggtactatgaaagtactactatcgctggtgctgtaccctgtgctaatttccacgtgatgtgtccttctcctttcgtgaacttatttctgattttaatatggcaaatgctagaatgacactgatagtagctgatctgagcaacttaattaacactatagtacatgattcagcaacttagcatgagagtaactgaacaaccgtccttgtcaggcatgctataaaatatagaacttccagtttactttccacttccctatttatttctcaaacacgtcacttcgctaaggaaaaagtacgacagagtatgacaccgcacccaccgtttctccctgtacccagcagttcagccaattaagaccagacagttcttgtcgtgaactgacgccactatctaatggttacattgatctgtttttttttcttggttacagtgatgtgatccttacaacttttatgtgtagttctggaaatcttacatcaaaaggcctatggtgttagtcgggcccagccttggtgctgctgttgccattgatttttcagtcaactaccccgaagcggtacatgcttaaaatacttttgttctctatatttctttactgcagactacagagcagtacacaggtatctgtagggctttcttttatgtgaagcttggctaccgtgcgataagccttcatacaagacagatcttacaagtctgagagtttttatattccagctaatttaagcttggtttcacaggtctcgaaattgatcttcattggtgcaagtgtatactctgagggcccaaaagatatgaccaggatgcctaaatttgtttcatatgctggggtgagtcattctgatttccacgctaatcttatttgtttttcttttacatgttacatgttttattttggatgtcgcaatgtccgtatttttcattaggtgcttagtaatattatcacttgttggttatggctgtgctaattttttctcgataatgatggttgtgctacttaagaggaatgtttcatgttgacctattatctctaattggatgaaagaaatcttgtggtgtgtgtctgtattgactgggcaactggactactggagtaaactgattgttttctttgcttccccaggtgtttatattgaagagtcttccactgcgatttttagcaacaagattggcatttaaaaaaactccaaatgaattctttgattgggtgcaagtaagcctctatggatcactttcagatttaaaaggaatgcgaaaataagataaaatcatgtcctagttgctgctctagtagttttctctaccttttggaattagggagaagcccactttctcttccaataaagtctgtctttctccaatgctgtaagaaactggcggtaacagtgtctctgttggaactacttatacaataatcatgtttttgtagatgggagcaaacagattaatccaaaatttcctgattcatgctaaaattatattgaaaataaaattattacctgccactccaattttccttttctctgtctgacatcctaattttaacagtgcaaaattattgccttaactaatctaataaattttgcaaacaggctattcaagctatttttttttttttgaaaggaagcggcaaaagctattttagtttcctgttcctctgtgtcttgagcatatgaagttaggcattttgacatgattcccctaaaatttcagattggccgtctgcattgcctacttccctggtgggaggatgctacagtagattttatgattagagggggttataatgtcataaaccaaataaaacaggttcttttctttaaagactctgcttatgaattttcactgtccaaggatgttaaagtttctatttttatagttcatccgtgaattgcttttgtgtttagaattgaagttcctttgtggcatatatttagcgtgccaaattttatatcatgtgtccttagagccatgcataatcttccaaatccatttaactagtagtactcaattcattacttttgtgtcaattatccctggacctccttgatcttttggtcttgtcatcatttcccacctggccatgtgcgacttgtgtttttgcccagccccttgcccgaaaaagtttgctcttatagagtccatcttactgtgtgtcccatcaacctgtagaagcccatggtataagttgggataccccttaaacaagtattggtaagaattaggttcccttgattttactcttcgatggtcctaacttttgctcattttactgaaaattttctgtagatgacgataagggcaagtgcacatctgataagatatatttttgttctccgtataagggctttcaactgtttccttgtcattaacaaaacctattgagtgagaactgcagtaccttgaatattccatgttctaagtgaaaacaccaataggctgttgcactgttgttcgtcatactcttgccaagattagagtgtatggaagggatgctgcatgttgcatctaggggtggtaatggatcacgatccaaatatttcttcaaaataagttagggtctttaattaattttagattaaaaatgaatagaaatagagtccaatcctaatttgatttgatccttaaattttatagtgtgaaatctagagcccattaccagccttagctgcatcatagctttacagtacactgtatattactgtcactgtatattactataaattttatagtgtgaaatctggatgctagctcccacctttctggatcaaagctaggcatgaaaaagaaatagaatgggttcagtagaacagatgcattactaatgatgttcctgtttctctttacaggtgaagcataaatgcctgatcctgtggggagaggatgatggaataataagcagcaaactagcatatgtaagttgacatgttatgctttgcggagcaccaatttgaagttgtactggcatttaaaaagcgaggaaattctagctaatgccgtgtcaacacaataacagtagcataaagtagcatcagtgtgtgccctgttagatattatattacgctcacgctagctgttactgcatcacttgcagaggttgcatcaggaactcccagacgctattctgag

SEQ ID NO: 1075 - DNA, 13374 bp, Zea mays
  Intron number 1 from transcript GRMZM2G346449_T01 (locus G RMZM2G346449) derived from phytozome v7.0 (chr-ID 3; pos 5 8094550 to 58107923 reverse strand)
actccttatcctgggaaagaatttttgaactaagggtatgtgacggaacctcccaagtcattaggcccacctacagttgtccttgtccaacggacctcaaacaaccctgtaggtccccctgaatcacttgacaagttcggtatctgcttttcttacctttcccaagagcgtttcacccgtcttgcagacattacaaatcatcggagatacggaaaagcggaagtatttacaataacttatctttatttaaaacataagagtgagttttaagatttacagaccagaatataatatacgagtgcagagtattattattacaaaccatgggaggcaaaaatccctctcgataagtttcaaacaaaagttctatggaggatccattcctcgcgcagctttactcctggatttcttcttttgataccaccttagaacagaagcaacaaaagctggttgcttcctcacctaaaaacaacggggaataaaaccctgagtatggaattactcagcaagtcttacccgactaaagaaaagactctcaagggtatgctggatttgggaatcaaggagaggctttagcaaaaatcaacttagatacttttgcagaaatagttactaaagtgagtccttactttcaatattttaacgccagattaaatattaatagactcggtttgcatatggtatactttcaccatctcatcaatacaacatcatttttattcatgaggttcacatcctgacttaggttgcaggtcagtgatcaagtctccactctccggggatataacggtgatctgaatcgatttactcagctgaggatctctaaccacacgacatatgtagcacttaacccttgcatatgtcaactcaccaccggggttcttaagaccagatcaggttcacgccaaccgagagcacagatacaccaccgtccagcctcttgccacggagggtacacgctactctcgccatctctccacgcccattgcgtgttatcttattctggtattagtctgcccgaggcaaagcttaccttgtcccatttacacggcatgtggccagttaagatagtccttgatctagcaggcctacatacgcatccaatccttaattgacctaggcggagcatcacctgttcctagcccaagtcgtgagttaaatacttccatccttaggattgttctgtgttccttaggatgaagagagcattatagggagctttgcagtaagatcctagcatgcttcagatgaaaatattcttgcatgtagaagccatcctttctcgagctaggctaaggacaacctctatccacaagatctaagcagggctaagaatttttgtaaatcatgttctgatacttcaacagaagtatcctataaaggtgtggatatcaaggaaggcaatgcatcaaaaaggttccaagcaactcctagaaacctaatgcacatttcactagacttaaaatgtgcagaaattatttaaaaacacaaggggttgcatgcaccggggattgcgttggtttacaggtgaatcaggctcggatccgcagatgtcaaagtaaaaacaatttcctgcctgatgttccgcaggtggaggtggcgaagtcttctcttcttctacttcaacttctttctcgttatctaaatataaccatatatatatatataagaatgaatgctcatgaaatgcttatgagtgtgcaaagatagtaaaggtttatttctaaagtcttgaatacaactttccttcacggttttccaggaaactagggtttccggagtcagtaaaggaattcaaagggcagggggtagggttttgggttctaagcatcaaacaaggttcaaatcaaaccaaattctacccaaggcttctaaataatgtttagagttcaaataaaaagtttgggcatttttggaattattatttattttctaaaaatctagaaccaaggttttaagctattttaaatgatccaaaaaattccccatttgatctaaaaatcataaaactatttttattaaatactatggaaaattaggaatctaagaaaattagtttgatagttttaggatttttctacaatttcttacagatttccaaagcttgctagaaaaagaaaaagaaaaataatgaacagtcccgggccgaaaccagcccgagccagcccagctagggcagaaacgcgcccacgcgcgcgcccgcgctggcagactgcacagaggcccccgctgttgtgaataacctgaagcgggtcatagtactattccacggagtcacttacgcttttcaaataaacccccgaacttctaaatcttctcactttgaagccctcgacggtacaccgcgcaaagaaccgagctccggtgagctaactagccggagggagccaagaccggtgcccccaagcgactgaccccgaattgaatccctcccaagcatttcccccaatataatttcaagaatggcgatctaatttgtcctggccacggtaaccgtggatgtcacgaacagacgatcacgttcccgatgatcagtaggcttctagtccaattgagtgggttggtgagtatccagggcatgcatgggtactgagacaagaacataaatggcaagatcgaacctggattaagcagaccgcggcgaggttgcttttatggtggcagaaaaccgaattgggggaaacgagaaatttgcgagctctaagcgatgattcgaggtgcgagtcgcttcactggttgcgtaattacctaacggagcgaacggtgacggaaatttatagcctctaacggcggtggcgtccaatttcaccagggtgtgctggcggccggagaagagaaacggtactggcgcaacgaattcgtgtcctacgccgtggcagtcactccggtgatcaacagggagcgagagcaggtcacggcgatgcagtggaagtgcctggacacgcggcgcaagaccggaaggcggcggtcaccggcgtgcttatcggattccgccgcggtgagcttggtacggcggccggaatattttactggccggacttatccacggcggtgatctttacacgacttcaagtgttatccagtcgatctggtcatgaatcacggcggcgagggcacgaatctacgcgcggcgatcgtcggcggtgaactgaactgagctggcagcttaatccatttcagtttactgtaccatcgcgaattgcattcagtcggtctgacagagtagattcaaggcagattttctctaaattttctatggcaacttacctaaaactctgcagcaaagttgtagaccaatgattcagctataatcttgccataacaattatagcccaattcccactcgatcatgcttgatttcctgtccaaagatgacttggtaccactattagtctgaattttcagacatcaaatagcctgacagctcgactttgagtgtgattttcttccatttcttcataacaactatgcttacactcttaagcaaagttgttctcctttcatagagctacaaaattgtggtggtgacctagggcaaaaacctcataatttgaaagttacaaagctccaaagttgagcccatatcactgaatttcagacttaggtgaataggatttaagtggtgctttttgcaaatagacccaaaacttagggtttaacttgcattttatgactatttttcttaagctttagggttttctccatttgggtgttgttttacccccctcagaaccatatttaaggttaagtaccctacactagggttttatttgcaaaataccataacaatacaacgtgtttgaaatttttgcctagtgaatgcattctaggtgtatcaaacatatgaaatgctgatgcttatgatgttatgctcaagttttagtgacagtaacaccaggggtgttacagggtagtgaaagggaaatagggttaaccttttcctataattaattttggtggttgatagtcaacgcaaacacatggactaactagtttgctctagaactcatgtattgcaggtgcataaggttcaacacaaaccaatgaaagaatcaagttagggacataatttaaaatggagcaaagaacttgagtgtgttgaaagttggcgcaccggactgtccggtgtgccactggacagtgtcgggtgcaccagattcgtacaggtgtcaaccagcctctctctggaaaacaaaggcgcgctccgctataaatcattggactgtccggtgtgccaccagactgtccggtgagccagcagagcaacgactatctgcgggcaatggtcaactctaacggatgaacagtgcagcacagtaccgcgacagaggtcagagcagcgaagtcagagggcaccggactgtccggtgccgcaagaggacaaagcccctacggccgactcggctccgaaccctaacggttgggtgacgtggcggcgcaccggacactgaacagtgcctgtctagtggtgcaccggactgtccggtgcgcccatcgcgagcagcctccccaacggctacccaagtggttgggggctataaatacccccaaccaccacaacctttggcttccaagttttctgaagatcacattcaatacaagagctctagcattcactccaagacacaatacaaaagatcaaatcctcttcgagtcccaaattcattccaaacacttagtggcttgtgagagagagatttttgtgttcttttgcgctcttgtcgcttggattgcctttcttcttttcccattcttattctcaagtgctttgtaagcaaggcaagagacaccaagtgtgtggtagtccttgcggggtcttagtgacccgtgagattaaggaagaaggctcactcggtctaagtaaccgtttgagagagggaaagggttgaaatagacccggtcttagtgacctcttcaacaaggactaggttctttggaaccgatcctcggtaaaacaaatcatcgtgttcactcaccttgattcgtgtttgatttgttttccctctctttcggacttgaatttaattctaacgctaaccccggcttgtagtgagtgtttaagttataaatttcaggtttcgcctattgaccccccctctaggcgactttcaattggtatcagagccattgcttcattaagagtctaatcaacttgaagtgatgtctagagatcacaccaagagggagatcatgaccggcgaaaagaccgcaagcttggggaggactccgtcaagagagtccggcaacagataaaaggaggaatcatcttcctccatcaagtcgcatcggaaaggtgacaagaagaagaagatgaagaaagtggtctactacgagaccgactcttcatcaccttccacatcgagctccgagtcgtccaccacttctaagcaccatgagcgcaagaagtatagtaagatgcccctacgctatccccgtatttcaaagcacgctccattactttccgtacccctaggcaaaccaccatattttgatggtgaggattattgcatgtggagtgataaaatgaggcaccatctaacctcactccatgaaagtatttgggatattgttgagtatggagcgcaggtacctaaggtaggggacaaggactatgactcggacgaggcctcccaaattaggcactttaactcccaagccacgtctatactcctcgcctccttatgtcgagaggagtataacaaggtgcaagggttaaagagcgccaaggaaatttgggacgccctcaagaccacacacgaaggggatgaggtgaccaagatcaccaagcgggagacgatcgagggggagctcggtcgattcgtcctcaacaagggagaagagccacaagcaatgtgcaaccgactaaaacaatggtgaaccaagtgtgcaacctcgggagcaccaaatgggatgaccatgaaaatggtcaaggttattctaagatcccttgtttttcgtaatcctactcaagttcaattaagacgtggggatcctagatacaaactaatgtctcccgaggaagtgattggcaagtttgtgagctttgaacttatgatcaaagactccaaacacattgtcaacttagagcaaagcgccacctctatacccgaagtgcaacccatcgcattcaaggcggcggaagaagagaagaaggattctacatcaagtaggcttccaatcgacgcctccaagctcgacaacaaggaaatggcgctcatcatcaagagcttccaccaaatcctcatgcaaaggagggggaagaactacaagtcccactccaagaaggtgtgctaccgatgtggtaagtccggtcactttattgctaaatgtccaatctctagtgaaagtgacagggacgaagacaaaaaggggaagaagaaggagaagaagaggtactacaagaagaagggcggtgttggaacctgctctcctgggcaagttgatccaacgggaaagtagaaagagtgtttgcaaagcttaacacggaatgccaaaagctttgttcatctcccagtgcctgggcacagtacgggggtatttataggtacttgagggaccgcctgtccctgtcaaagacatttagaccctcgagtacccagtttatctccagaatattcccacgaggggaggttgcagacagtcattacggtaaaccttattacagacacggcccttatcacgcatgtccacgcggggcccatccctatgggccaaatcacacatgggcctcccccggtggtgagggagcgggaggtccatagacttcggtaggcccttcgtcttgtcacatgagtgtgaagggggtcgaataggcctccgtccgattggcgccctcggcctattctggcgggttttgtggattcagccttcatctaagcaaggagaggacgaagtcgtagagcgaagggcggcgtgttcgccatcgccccaacaggcggcgatgcccacatatgtcgggaataagactccgacgagagctccaccgactcctcctccgacgaggacaccgccaacatcgccatcaacaagggcctcctcttccccaacgtcggccacaagtgtctcatggctaaggacgtcaagaaaaagaaggtacacactagagccacccccaaatatacaacatctagtgatgagggtagctctagcgatagtgaagataatttaatgtctctttttgccaaccttagcgtggaccaaaagaaaaaattaaatgaattaattgaagccattaatgagaaggatgaactcttggatagccaagaggacttcctcattaaagaaaacaaaaaatttgttaagttgaaaaatgcttatgctcaggaagtagaaaaatgtgaaaacttaactaaggagcttagcattagtcatgataatagccttagaaatgaaaatgctagtttaatttctaaggttaaagatttgaatgtttgcaatgattctacttcctgtcttagatataagaatattaaattaaatgctagaattgaggaattaaatgcatgcaaaccatctacatctactgttgatcatgtttctatttgtactagatgtagcgatattaatgttgaagctataaatgatcaccttgccatgattaagaaacaaaatgatcacatagctcaattaagtgctaaaattgttgagcatgagctcgaaaatgaaaaatttaaatttgctcgtagtatgctttataatgggagacgccctaacattaaagatggcattggtttccaacatggaagtaatgtcaagattaatgcccctaaaagattgtctaattttgttaagggcaaggcccccatggttcaggatagtgagggttacattttatatcctgcaaactatcctgaacataagattaggaagattcatgctaggaaacctcataatgtttctcaccatgcattcatgtataaaaatgaggcttctagctctaggcataccacacatgttaaaatgcctagaaagaaaattcctgctgcatcaaatgagcacaatgtttcatttaagacttttgatgcatcttatgttttaactaacaaatcaggcaaagtagttgccaaatatgttgggggcaaacacaagagctccaaaacttgtgtttgggtacccaaggtgcttgtttctaacgtcaaaggacccaagactgtttgggtacctaagaacaaggcctaaaattgttttgtaggtttatgcatctggtggttcaagttggataatcgatagcgggtgcacaaaccacatgactggggagaaaaggatgttctcctcctacgagaaaaacgaagatccccaacgagctatcacattcggggatggaaatcaaggtttggtcaaagtcttggataaaattgctatatcacctgaccattctatttccaatgcttttcttgtagattctttatattacaatttgctttctatttctcaattatgcaaaatgggctacaactgtctatttacagacataggtgttactgtctttagaagaagtgatgattcaataacatttaagggagtgttagagggtcatctatatttagttaattttaatgataacaaagctgaacttgacacttgcttaattgctaagaccaatatgggctggctctggcatcaccgacttgcccatgttgggatgaagaatcttcacaagcttctaaagggagagcacattttaggactaaccaatgttcattttgagaaagataggttttgaagcgcatgccaagcaggaaagcaagttggcacccatcatccacacaagaacatcatgacgactaacaggccgctcaagctactccatatggatctattcggcctgataacttacataagcatcagcgggagtaagtactgtttagttattgtggatgattattctcgcttcacttgggtattctttttgcaggaaaaatcacaaacccaagagaccctaaaaggattcttaaggcgggctcaaaatgagttcggattaaggataaaaaagataagaaacgataatgggacaaagttcaagaattcacaaatagaaggatttcttgaggaggagggcatcaagcataaattctcttctccctacacacctcaacaaaatggtgtagtcgagaggaagaatagaactctactagatatggaaagaaccatgcttgatgagtacaagacaccagaccggttttgggctgaggcaattaacaccgcctgctactccatcaaccggttatatcttcaccgaatcctcaagaaaacatcatatgaactcctcactggtaaaaagcccaatgtttcatattttagagtctttgggagtaaatattttattcttgttaaaagaggtagaaaatctaaatttgctcctaaagttgtagaaggctttttacttggttatgactcaaacacaagggcatatagagtcttcaacaaatccactagattggttgaggtttcttgtgacattgtgtttgatgaaactaatggctcccaagtggagcaagttgatcttgatgaactagatgatgaagaggctccatgcgtcgcgctaaggaacatgtccattggggatgtgtgtcataaggaatccgaagagcctccacaaacacaagatcaaacgtcatcttccatacaagcatctccaccaactcaagactaggatcaggctcaagatgatgaaaatgaagatcaagaagatgagccacctcaagaggaggacaatgatcaagggggagatgaagataatgaaaacaaggaagatggtcaagaaatttagggtcaacgaccgccacacccaagagtccaccaagtaattcaacgagatcaccccgtcaactccatccttggtgacattcataagggggtaatcactagatctcgagttgcacatttttgtgaacattactcttttgtgtcctctattgagccatacagggtagaggatgcactaagagatccggattgggtggtggcaatgcaagaggagctcaacaacttcacgaggaatgatgtatggcatttagttccatgtcctaatcaaaatgttgtaggtaccaagtgggtattccgcaacaagcaagatgagcatggtgtggtgacaagaaacaaagcccaacttgtggccaaaggttattcacaagtcgaaggtttggattttgatgaaacttatgcacccgtagctaggcttgagtcaattcgcatactacttgcctatgctacttaccatggctttaagctctatcaaatggacgtgaaaagtgccttcctcaatggacccatcaaggaagaggtctacgttgagcaacctcccggctttgaagatagtgactaccctaaccatgtttacaaactctcaaaggcgctttatgggctcaagcaagcctcaagagcatcatatgaatgcctgcgagattttcttatcactaatggcttcaaagtcggtaaagccgatcctactctctttactaaaactgttgcaaaagacttgtttgtatgccaaatttatgttgatgatattatatttgggtctactaacaagtcaacttgtgaagagtttcgtagggtctactaatcaagcaactccaagatagcaccttcatcagccaaacaaagtatattcaagacatacttaacaagtttggaatgaaggatggcaaacccatcaagacacccatgggaacaaatgggcatctcgacctcgacacaggaggtaagtccatagatcaaaaggtataccggtcgatgataggatctttactctacttatgtgcatctcgactggatattatgctttctgtatgcatgtgtgcaagattttaggcaaatcctaaggaagttcaccttagggccgtgaagagaatcatgagatacttagtttacactcctaagtttggactttggtaccccaagggatccaccttttatttaataggatattccgattctgattgggcagggtgtaaaattgataggaagagcacatcagagacttgtcagtttctagggagatccctggtgtcatgggcttcaaagaaacaaaactccgtagctctttccaccgccgaagccgagtacattaccgcaggctattgttgtgcgcaattactttggatgaggcaaacccttagggactatggctacaaattgagcaaagtccctcttctatgtgataatgagagtgcaatctgcatggcggataatcccgttgaacacatccgcactaagcacatagacattcggtatcactttctgagggatcaccaacaaaagggagatatcgaaattgcttatgtcaatacccaaaaccaattagccgatatctttaccaagccattagatgagaaaacttttagcaaacttatgaatgagctaaatatacttgactctcgaaattttgattgaaacattgcacacatagcttatttatatacctttgatcatgtctctttcatttggtgcaaatgcatatttcttattattcttgtaccaaggctacgactaatgtgttttcaagtgtatttctatacttagtcttagattgaaagggaaatggagtattctgcaaagacaaggcttccactccaactctgacggtatcatttaccctttgtcgttactcccacaaactctcaatgctatgacccttcagtcatatttatattacgatttgggagaaacatacaaaaagggctctcaaagtctccgtttttggcgattaatgccatagggggagaaagtattaagcctaaagcaaaattaccgcatcaccacgaccaccatttcaaaaaatttcgaaatgaagttttaattggtatttttcgattggtatctaatttacaattgatcttcaattggtatctttaaaagtcaattttcaaatttgaatctatttcaaaaaccctcttgaaagctaagaggagaatttaatttagggggagtttaaatttagtcaaaggaaaagcatgacatttcaaatcttgaaaatgcttcttgcaatcttattcatatacctttgactatttgcaaaagacttttgaaaagattttacaaaaatatttgcaaaaacaaaacaagtggtgcaaatgaggtccaaaatgttaaataaaagaaaagcaatccattcatatctaatgagttgtttcaattggtttaactccaagtaacctatgcacattccaaatgcaaactagttacatttctgcactttatatttgctttggtttgtgttggcatcaatcaacaaaaaagggggagattgaaagggaaatagggttaaccttttcctataattaattttggtggttgatagtcaacacaaacacatggactaactagtttgctctataactcatgtattataggtgcataaggttcaacacaaaccaataaaagaatcaagttagggacataatttaaaacagagcaaagaacttgagtgtgctgaaagttggcacaccgatgcaccaggtccgtacaggtgtcaaccagccactctcgagaaaacaaaggcgcactccgctataattcaccggactgtccggtgagccagcggagcaacgactatctgtgggcaacggtcgactcttacgaatgaacagtgcagcatagtaccacggcagaggtcagagcagcgaagtcaaagggcaccagactgtccggtgccgcaagaggacaaagccctaacggtcgactcggctccgaaccttaacggttgggtgacgtggcagcgcactggactgtccggtgcgcccatcgccagcagcctccccaacggctacccaactggttgggggctataaatacccccaaccaccacaacctttggcatccaagttttctgaagatcacattcaatacaagagctctagcattcactccaagacacaatacaaaagatcaaatcctcttcgagtccccaattcattccaaacacttagtggcttgtgtgagagagatttttgtgttcttttgcgctcttgtcgcttggatagcctttcttgttttcccattcttattctcaagtgctttgtaagcaaggcaagagacaccaagtgtgtggtgttccttgcggggtcttagtgacccgtgagattaaggaagaaggctcactcggtctaagtgaccgtttgagagagggaaatggttgaaatagacccggtcttagtgacctcctcaacggggactaggttctttggaaccgaacctcggtaaaacaaatcaccatgttcactcgccttgattcgtgtttgatttgttttccctctctttcggacttgaatttaattctaacgctaacccccggcttgtagtgtgtgtttaagttataaatttcaagtttcgcctattcacccccctctagccaactttcagatagtcatagca

SEQ ID NO: 1076 - DNA, 16685 bp, Zea mays
  Intron number 2 from transcript GRMZM5G878970_T01 (locus G RMZM5G878970) derived from phytozome v7.0 (chr-ID 3; pos 9 9710807 to 99727491)
aaattggaaaagaagattagtttttacacaagtaggtgtgaccttatgttaagttgacgtttctttttccgtttttcgtatatatgatcctgattcatagattccatcatgctgttcctgtcatctgtatttcactacctgtttaatagatgtatgtataagccagacatgtaggtagtatggtgttgagggttaaaagtttgattgtatggaagaactgactgaagtgctggctttaggataaagacaatggcttttgccatatcactttctgctttattgaacatattttcttcaaggaagggcagtagctcttccaattcactaaagaagaatgtaaattgcaccagatagttagcataactgaaattttcagcaaagttagtacttgcgtggcctgcattgttcgacctaagtggttaggcttttagcggttagtttgtggttgcaattccccctccctttctaccctgtatgcagcaaaggaaatagtattttcattcttcacttttgatgatttgcataaagtaatgtagaagaagagcttagcttcatatattgtgctgagcaagtgagcatactttatgaaatttgacttctatagcaggacctttctttttgttggaccttttatgcattccatttgcatttccttaccttatttttgttttgtataatacatgacctatttcatttaccatgatggaataagtcatgtggtcagcagcagttgcagttttgactgctgcaggacagcagcagttgcagcgacaacatgcagcagtcttttgactgcgcaggacagcagtagcagcagttttttgactgcgcagcagcagcaaccttttgactgctgcaggacagcagcagttgcagcaggacagcatgcagctgcagtcttttgactgcgcaggacagcagtagcagcacagcagaggacagcagtagcagcacaacagttttgactgcactttagtatctaaaggacagcacctgtgtgctgcagcgtgtagtgtagtgtgtagtgcagtgtagtgcagcccctagggctataaatatgtgtccccaacccctctaagggtatggcattgtgtagtgtttgaggaaataaacagaaaattgccccaactcatagtgtcatcctcttgatgagagttagagtccctctacttacaattggtatcagaggcaaactatcctgcagcctaaacatctcgtgctcatctccttcccgtgcctctccccacactcagtcggtagcaagagctccaactgttccttcctcccctgctcagacgagcagcctttcgtctgagacagcctcttccacacgcagcaacccctcactagcccaccatgtccctacgctcggccacttcgagtgcgcggcgccagcaggaggccgaggtcgccgcggcacaagaacgcgagcgagcagcagcagcggctgcagcgacagcggcgagggcagcacggttggcggcggcggaactggcagcggcgagagcggaagtagaagcagcggaggcggcggatgctgcacgtgcggcggcaacagagctcgaggttctgcgcggcagtagagctggcagctctgcttctgtcgacgacaacaccgacgacgagctcaggctggcgagggaagcagcgcgagagcaggcggcacagtgggcagccgcgcatccccatgggggcgcgcgtggcggcagcccggataggcgccgacacgctgacggcgctccaggcgggggcgcacgcggcggcagcccagacgggcgtagacgcgccggcggtgctcccggcggcggcgaccgagtcgacggaggtcgcggcctctacaggcggcgcggttctccctccccggatcggtaccatggtcgtcgcatggcccaagccattgtcagggacatcggtcccggcggtgggtggcctaccctcaccaagaccaactacgtcgagtgggccgcggtgatgagggtacggctccaggttcgccacatgtgggaagcagttcgttacgacgacgtcgactaccacgaggatcggcgggcgctggatgctctcattgctgcagtcccgcccgagatgcagttttcgctttcccagaagcggactgccaaggaggcctgggacgccatcgctgcgacccgcatcggcagcgatcgtgcccgcaagaccacactgcaggcacttcgcaaggagtgggagaacctggccttcaagccaggtgaggatgttgatgactttgctctccgcctcaacactctgttgcagaagatggtgcagttcggcgacgacacctacgatgaggagagagctgttgagaagctcttccgttgcatccccgagaagtacaggcagattgctcgctcgatcgagtctctgctagacctctccacaatgacgatcgaagaggcgattggtcgcctcaaggtggtcgacggcgacgaaccacaggctctctctgggcctatcaccatcggcgggaagctacatctcactcgggagcagtgggaggcctgccagggtgacaagaagcagggggagtcctcctcgacacgaggccgcaaacgcggcaagccgcgcaaggcgcgtggaggtgcccaggccggggcgcgaggacatgctgagggtggtgcacgtggaggtgcccaaggcggcgccgtcggcaacaagaagcccgcacgagacaacggctgccacaactgcggcaagcttggccactgggccagggattgtcggcagccacgacgtggtcaggccaatgtcgcacaggcggaggcggaggaggaggccctgctcctggcacatgcaagcatcgagccatctccagcggcactcctccaccttgatgagtcgaaagcacgcgctttcctcggcgacggctccaacaaggacatgatcgaaggatggtgcctcgacaccggcgccactcatcacatgaccggccgacgggagttcttcaccgagcttgactctagcgtccgaggctccgtcaagtttggggacgcctccggcgtagagatcaagggcgccggctcagtcgtcttcaccgccgcgtctggtgagcacatgctgctcaccggagtctactacatccccgcgttgaggaactctatcatcagcttgggacagctggatgagaacggttcgcgcgtggaggtccagcacggagtcatgaggatctgggatccctctcgtcgccttcttgccaaggtacgcaggagtgcaaatcggctttacatcctcaatgtgaaggtggcacaaccttgctgccttgctgctcgtcgagacgacggggcatggcagtggcacgagcgcttcgggcaccttaacttcgaagccctgaagcggctcagcgccaaggagatggtacgaggcctgccgtgccttgaccatgtggagcaattctgcgatgtctgcgtgttgacaaagcagagacgactcccctttccccagcagtcgagcttccgagccaaggagaggctcgagctcgtgcatggggacttgtgtggcccggtgacaccagccacaccaggaggacgacgctacttcttgctgctcgtcgacgatctctcccgctacatgtgggtgatgatccttggcagcaagggagaggctgcgaacgccatcaggcgtgtgcaggtcgctgcggaggcggagtgcggccgcaagctgcgcgtgctgcgcaccgacaacggcggcgaattcacggcggctgagttcgcatcgtactgcgcggatgagggcgttcagcgtcactactccgcgccgtacagcccgcagcagaacggcgtcgtcgagcggcgcaaccagacggttgtggggatggctcgggctctcctcaagcagagaggaatgccagctgtcttctggggagaggcggtggtgacagcggtttacatcctcaaccgctcgcccaccaaggctctcaacgggatgacaccgtacgaggcttggcatgggcgcaagccggcggtctctcacctacgggtcttcggctgcctcgcgttcaccaaggagcttggccacatcagcaagctcgacgataggagcaccccgggggtgttcattggctacgcggagggctcgaaggcctaccgcatccttgacccaagaacacagcgtgtgcgcacggcgcgcgacgtagtgttcgacgaagggcgaggatgggcgtgggacaaggcggtggacgacggcacgactccgacgtacgacttcaccatcgagtacgtccactttgagggagctgggggagtaggcaactcttctccgagcaggtctaccccagcccccaagtctccaccgactccagcgccacactctccagctcctgctacaacgagctcttcgccaccacgcactccagccacgaccccggctacagcgagctcttcgccaccacgtactccagcaccgacggtaccctctccgggaacgtcctctccgacaccagctcgtgtcgagcacgacccagtggagctcgtgacccctctgtcccgcgacgaggagcgcgtcgacgcgtgctacgacggcgagccgttgcggtatcgaagggtggagggccttctcatcgacccgtcggtgccaggccctgcatctcgcattctggcaggagagttgcatcttgcatgcgacgatggtgagcctcggtctttcgcggaggccgagaaacatgcggcttggcgtgccgcgatgcagtcggagatggacgcggttgagacgaaccgcacttgggagctcgttgatctccctcatggtcatcgcgcgatcacccttaagtgggtgttcaaactgaagagggatgaagccggcgccatcgtcaagcataaggctcgcttggtggcacgcggtttcttgcagcaggaggggatcgactttgacgatgccttcgcccctgtagcacggatggaatccgtgcgactcctcctcgcgctggcagccctggagggctggcatgttcatcacatggatgtcaagtcggcgtttcttaacggcgacttaaaggaggaggtctacgtacaccagccgccaggttttgcgatccctggcaaggagggcaaggtgttgcgcctgcgcaaggctctctatggcctgcgacaggcaccgagggcgtggaatgccaagctggattccacgctcaaaggaatgggtttcacgccaagcccgcacgaggcggccatctatcggcggggcaatggaggaagtgccctgctggtgggtgtctacgtcgacgacttggtgatcaccggcgccaaggacgcagaggtggcagcgttcaaggacgagatgaaggccaccttccaaatgagtgacctggggcatctctccttctacctggggattgaggtgcaccagggagactccgggatcacacttcgccagaccgcctatgccaagcgcattgttgagctggctgggctcaccgactgcaacccagctctcactccgatggaggagaggctgaagctgagtcgcgacagcacgacggaggaggtggatgctacacagtaccggcgtcttgtggggagccttcgctacctcgtccacacacggcctgacttggcatactccgtcggctacgttagtcggttcttgcagcgaccgacgacggagcatgagcaggctgtgaagaggatcatccgctatgttgcggggactctcgaccacggtctctactacccgaggtgccctggggaggcacaccttgtcgggtacagcgacaacgaccacgccggtgacatcgacactagcaagagcacaagcgggatcctcttcttcctcggcaagtgcctcattagctggcagtcggtcaagcagcaggtggtggccatgtccagctgcgaggccgagtacatagcggcgtccactgcttcgactcaggcgctctggctggctcgactgctcggtgatctcctcgggagagacactggagcggtggaactcagggtggacaaccagtccgctctggcattggccaagaaccccgtgttccatgaacggagcaagcacatccggctaagataccacttcatccgagactgcttggcagaagggagcatcaaggcgcgctacatcaacaccaaggatcagcttgcagacctgctcaccaagccccttgggaagatcaagtttgttgagctttgctccaggtccgggatggtccaactttcccacaagacgacgcacaagacttagggggagaatgatggaataagtcatgtggtcagcagcagttgcagttttgactgctgcaggacagcagcagttgcagcgacaacatgcagcagtcttttgactgcgcaggacagcagtagcagcagttttttgactgcgcagcagcagcaaccttttgactgctgcaggacagcagcagttgcagcaggacagcatgcagctgcagtcttttgactgcgcaggacagcagtagcagcacagcagaggacagcagtagcagcacaacagttttgactgcactttagtatctaaaggacagcacctgtgtgctgcagcgtgtagtgtagtgtgtagtgcagtgtagtgcagcccctagggctataaatatgtgtccccaacccctctaagggtatggcattgtgtagtgtttgaggaaataaacagaaaattgccccaactcatagtgtcatcctcttgatgagagttagagtccctctacttacataccatgatttgggctcgaactcttgaaagagttgttttgttatttcagaagtaaaagatgcagttacttccttaaatgctaagaagactgtcagtaaggtacttcaaactcctctccatcattaccatatataattgatttcttcctggattttccatatctgttaactctgcagttatgaacattagtttaaacatcagttttctgcccacataaagaaaatcatattgtttactgccctgccaattgcgaggattcattttgtttaatgtaaacatctgataaaagttattctgtaagcttctatagttctaatcacctccttatcatagaagttgtgtatgccacaaattaacttacgaccacattcaatattttagtattggttaatctgtagtgtagctattctgaaggataccacacgtcagttacagggtcagatgccctgaccatggttgatgtcagcatgtgcattcgcttgtttactaaataatttaatatagtgtttcagtgtttatatcagttaaacataggcctgctcctaaatattcatgtcctcaaggcttttgaacctcatattcaacctgcataggaattgagcacaaccaggcctaatttttgtgaattgtgctgaagaaaaacaagatgtttagaacttcgaactctgtcttttcctagaaatttgaaaagaagttagggatagtattagctactcatagctgagtcgaacaagcataatcaatatcaggatgctaaatgttctatcatgaattctagaatgagctctgattgattgtttctaggttgctatgcaattctcgtattggtagattctccatcttcaacatagatgtgatgactgtataggtgaatcactttactattttaagaacctgatgttaaatgcatctgttagattgtatttggtagtctagatattgtgtctagtagactgtcatatatgttagagtatatttggttgtctagatattgtgtttcaatactgtcatgtgtatccatgggttgcctatctcctatgtcatatactctatataagtcgctgaagggttcaatgcaagacatcatcttttgctacaacatataccttcctttgtctaacatggcaatccgagcctagatcctttgccgccccctggccacaaccctcagggtcgccgctccattgcgggcagccaccacccctcctcgtcatgtcaccgtacctgacgttgctgccctcaagcagtggctcaacgacctaatcgttgccaccgacattgcaaaggagaaggccgccgacgcacgcaaacgtgtgtagaccaccctccagctctttgaataggagcaggccatcgctgccgacctggaacggaaggtcaccactgccaaacagtcgttgtcaaacaaccgctgccatcttcctcgaccttggatgcctcgctagacgcctcctacgacgaggcgttcaccatcgacggcctccacatccaggcctagttgtcccgaacattcgccaactggtgaatatcattatgaacacctcatcgttcaactacgctcgttggcatgatctcatgttgctggtcttgacgcgatatgccctctttgaccacgttgagtccgacgacgccttctccaacaaccctggctagaaccgcatggaggctgtcgtcctctgttggctcaccaacacgatctcccctaatctttaggatgtcgttcgagaatgtggccacaccgcgcgtcacctatggcttggccttgagaacaagtttgtaggtaatcgcgagacccgtactattgacctgcatgccgccttccacaacatagtacatggtgacctctctgtgatcatgtactgccgcaagttaaaaagtgatagtgtggaatattgtgtgttgtattgcaatgagtagcaggattacaatatatagacctcaaccagattgtgctccacctgatttatagaaacaatgatcagggagtcaatcaatcagggagatctcacactaaataggaaacaaccatataggaaagagtcacccattagcacctaatcaggggcaatcagccaacgcctgatagggaagggtatcacctaattaggggcaatcaaccaacacctaatagggaaggaaacctcctaaacatggaaggaaataagctaacaccctctcgcagtcgaaacgtcgatggcgcagacgttaagactggagcgaaactcggagaagtgtccgcaaaatgagacgtcgttgggacatgaacacgaacatcaccaatggcaacgcactcgcggacgaagtggagatcaatctcgatatgcttcgtgtgctgatgctgaacctggttagtggacaagtagacaacactgacattgtcacaataaactaaggagctcttggtcaagggactgtgaagctcctgtagtaactgacgcaaccaggaagctttggcgacaccgttagcaattgccctgtattcgacctctgcactagagcgaggcaccgtaggctgccgcttggaggatcaggagacaaggttgtcttcaaggaaaacatcgtaccctgaagtagatctgcgagtgttcgggcatccggcccaatcaacatctgtgtagacgagcagagcagagatcatgcatgggcgaagtaggagaccatgactaagtgtcccacgtaggtagcgcaggatacacttgagtaccaataggtgaacatcccgaggatcatgcatattaagacacacttgctgaacaacataggagatgtcattccgggtgaaagtcaagtactgcagagcaccaaccaggctgcaatactgagtgaggtcgctgacagtggtaccggtcatggcaaagaccttagcatgagtgttgacaggagtactgcacggcttgcaatcggacatatcagcacgctcaagaatatagagagcatactgctgctgtgaaaggaaggggccctctgaatgttgttgaatagccacacctaagaaatgatggagagtaccgagatccttcatggagaatggcttctaaagagcagtgataatgcgacgcagaaggtcttggctggaagcagtgagaacaatgttgtccacataaagcagcaagtaagccatatcagtccgacgatgatatataaacagcgaagtatctgacttggcttcgacaaaccccagagtgagtgagtagcaaagcagctataccaagcacgaggcgcctgcttcagaccatagacttattgagccgacagacaacataaggctgagtgggatcaacaaaacctgtgggttgagagcagtagaccgtcccagtgagagtgccatgtaagaatgcattcttgacatcaagttgatgaactggccagtgggttgagagcagtagaccgtcccagtgagagtgccatgtaagaatgcattcttgacatcaagttgatgaactggccagtgctgagagaatgccaaggacaaaacagtgcggactgtgaccgacttgaccactgggctgaaggtctcatcataatccatgtcgagacgctgagtaaaaccacagaggacccaacgagccttgtatctgtcaagagaaccatcaacattgaatttatgacggaaaatccacttgtcggtgacgatgttggtgccaggtggtcggggaacgagatcccaggtgttgttggagagcagagcgtcgtactcttcttgcatcacgtggcgccaattgggattggcaagggcgctgcgataggtctttaggacgagcgagggcgtcgtggcattgaacgcaacaggcactcgaaaactagccttgccgcgggtggccatcctgtgatggttgaccatcggtgtgatgggaacaacacaagtgggtagtccagtcggcgtaggagccacgggcgtctccaagacaacgcgtggttgtcgatggtacaccttcaagggtgcagccgacagggccgttggggctgcagctggcataggcggcgaggttgcgcgtggtgcgggcgaagacacgaatgtctagtgccgagcgggagccggacgtagtgcagttgcgactgatggcagtggcaacaacacggagccctgttcagcagcaggcgcactagggcagcaaccgcgacaggcgaggtgaggcgagtacctgcagtggagggctcgatcggcaagatcgactcctcaagctcagacaaaaagtcaaggttagtgatcgaggctcgagagtcggcaaggggaaacgaggcctcattaaaaaccacatggcgcgaggtgagaattttttggtggaaaggtccaaacaacgatagcctttgtgattgctggaatagccaagaaagacacaatggctagagcggggggcaagcttgtgaggagcggtggcggacatgttggggtaacacgcacaaccgaaaacgcggaggtggtcataggtagggtgagagccgaagagggcaaaatacggggtgccataaataagggtttgtatgggtagccgattaaggaggtatgtagcggtgtgaagaccttcgacccaataggatggggcgagggaggcctgacataaaagggaacgaatgatgttgttaatggaacgaatcatatgctcggctttaccgttttgggaggacgtgtaggggcatgacatccggagcaaaacaccttgagtgagaaagaaggtgcgagtggaagagttgtcgaactcacgaccgttgtcacattgaatgcttcagatggtgcagccgaaccgtgtcttcacataagagaaaaaattagccaaggtagtgaatgtttcggattcaaggcgaagaggaaacgtccaaagaaaatgtgagcaatcatcaagaataataagataatatttgtaaccggacacactggaaatgggagaggtccacagatcacaatggattaaatcaaaattcttgagagctcgcgagtgtgacacccaacttgacaagcatgacatatggaatcactagtaattttattacaaccgatggcagaagtactagtgagtttggacagagcctcatgtccaggatggccaaggcggcgatgccaagtagtggaggagacactggcaacaagggcacgggatatcggggaacatgttggagcaacaagggcccggagctattgtacctggcgatcacgctcctggaatgaagatccttcacagaaaggccaagagggtcaaatttgacagctgacgaactgaaatgaggttttaaacaatatcgagggcaacaagaatgttattaagataaaagggacccagtataatggagtggccagaagttgtgataggtaaagtggatccgtttccaaccatgatggaagtggagcgcggaggacgaaatagagatgttaccactgtcgggagtcatgtgactagaagcaccagaatccatgacccaatctgtgatgccaggaggactgagggtcatggtgctgaagttgttggcgagagactggtgatcccaggatctagtccatggagtccatggcgcagtcggggaggtaggaactgcagggggctgctacggagtcctgagctgatgcagtggcggaccgagttgatgctgaaccagcccgacagggtgggtaaagtgacacagtagaggggtgtactgggtcggagtagcgaagagcgcctgctgtggtgcgccctggtgtgcaggcggacgtccgccatgctgctgtctgtggggtcgggccacatcgcgatttgcctggtccatggattgtatagtgaaggccagggcaaccgagccttgcctcctccactgttggggcaacgccgtcgacaaccactagcagaggagcctcgccatgggtgttgcaccagcgggcgccgtgacacctccagggggaggggcgatggaggaagcagtggtactggcgacgagagcggtggacggaggcggaggtgaggcgcgcgggagtcgatctcctcgaggatgagatcattgtggacgtcggtgaaggaggggaacggcttcgagcgccctaagtggagcttcatgtgggtgaacttctcattcaggccacgcaacatgttcaggacgatggtacggtcgtggatgacctctccaagatcaccaagggcctcagccatccccttcatcttgcgacaatagtcgccgacggagagatcgccctacatgaaaacatgaaactcggcgtcgaggcgaaatgcgcgagcttcgcgattgccgaggaactgctcctcgatggacagccaggcgcggcgcgcagtgccatcagaggtgcgagcagactccatcagctcgggggagagtgtgcccaacacccaggacaacacaacgacattcatgcgccgccaggatggcatggcggggcaagcgtccgagaggacatggtcggtgagggcgtatcgctcgagggcgagcaaaacgagatcgtgttagcgattgtagtggggagaaaggggatccaaaaccacgggcacaagggcacataggttctggatactcgtcgcctgcgcgtgaaggttggcaatgagggtggcctcgtagtcgaggtcttcaacaacatcgacgttgttgttcgggacaccgccctggggtggtgggaaagcggcgttgtgggcgacgatcgcaacgcgctcaaggttggaggcagcctagcgttccctggcgagggcgtcctgggcggcggcgaccaggacctagcgagctgtctcctgcgcagcatcaacgacgggcggaggctctgcagaggccatggtggcgcaacacaggcagtggcaggcagtgtaggtagggaagagtttagcgaaagcgataggtcacaggactgtgactgtctcgtgataccatgatagcgtggaatattgtgtgttgtattgcattgattaacaggattacaatatatagacctctaccagattgtgctccacctgatttgtagaaacaatgatcagggagatctcacactaagtaggaaacaaccatataggaaagaatcacccattagcacctaatcaggggatatcatccaacgcctgatagggaagggtatcacctaattaggggcaatcagccaacacctaatagggaaggaaacctcctaaacatggaagcaaataggttgtctaacaaaacgcatggtcgatgccctaactcatctgggatctcccatcgatgacatggtccttgtcctcaacatcctgcgagggatcaaccagcgtttcgagcacctcggcatcatcatccgtcgctatttgtcgttcctgatatttctaaaggttcgtgatgatcttttgctggagatccatctggacatctccggtctagcgacgacttcgacagtggtctactccaaaagcacactatttgcttcaaagttgccatcctcaacattgtctcgttcgcccgactctggcatcagaaacgacactagcattggcaacaccaatttcgacgacaaccgaaacaagggcaacaactaccgcaatagcggcattggcggcgtcacacacagcctcaacaatgattgtggtggcttctctagcacatctgccacactttctgtgggagctgggagcaccgacggcaaggtgacgccctcgtggtcaacatacgtccacccatggcatggggcacattgctatgtacctcggatgattttactccttatctctggatgattttacgccctcgtggtcaacatacgtccaccctacgctagctataagtactatttaatcctcttggatgattttactcattatctctagacttttccgttaaaacttaaatctgacaccttcaccaccccgtccaacttttttttgcttatgttgccacttagtttagctgcactatcaaggcgatccaatgcgacaatgggcatgaatttaatagttcttctacccagttttttcagctctccaaaggcactcagttgtggatgtcctgcgtttacacgtcccctcaaaacagtaaagccaagcgtattattcgtaccattaacaatgtcattctctcgttactgatccaggcatccctttgtggacggtacttggttgaggggctccacacttccacttacctactgaacttctccccacaaagatgatcgatgttggttgtcctcgtgtcgctttgtctggttctgcaccttcgcatgaccacctgagttttgggttgcgcatgttaccctaacactgcctctactgcttcgcacaagctcgctccttgatccacctagtgtctttctcggctactccgacgatcacaaaggctatcattgtcttgatctatcttctaaccacatgctcatctcttcatctcttgccatgtggtttttgatgaggacagcttcccgctcgctgccatgccctcatcccatctaaataactttgattttctctgtgagtctggttcctcggtttccaccttacggtccctctagcatttctgccctatgcggcagcgccaacttcgttatgctatgcgcaactcccctgctagttggatcgtgagtgacaccgacacccctgacgcgtcgtaagtagcacctgtgcctcttgccacgctacacgcggcttcggtgccccgagtgtggccatcttcgctgattgcctacactcgtcgctcgcacttgcccataactctggcacccctggctcctgcaccagtgacaccacgtatgacatcctagttcgcatacatcttcacgaagggcctccccttatcggtgttcaatgagttcacgtccagtgtcaatatttgcagtggctacagtttcgactgcgagaggtataacatatttggtagtctagatattgtgtctagtagacatgccatatatatgataaagtatatttggtagcttagatagtgttttatagactgtcgtatgtatttgtgggttaccttatctcctacgccatgtactctatataaaccatctaagggctcaatgcgagacattatcttttgctacaacatatacttttggcttacagcatatgttgctaatatgaagtatacaattcttctatatttttttaaaaaaatagtatgtacttttatggtcgaaaagtgaaaaaacatagtatgtcggggttctccacacgtagattataacttagggctagtttaaaaaatagtatgtatattatacggatagtacccgtatgactgtattcgtcccgccaacaaaaatacccgtatcggtgtccaaaatttcgggttatttcactacccgtatccggtacccgaccttggtacccaccccgttttcacccctatttggctctgttgtgacaggtgtattggctctattgtaataagggcttgtttggtgtggttcctccacgctcgctccatagcgtacatgaaaatggcactggctctgttctttccttttgctgtccagaagcactccacacgagggcgtttggtgcagcagagccgcagagctggtggtgaagccggtgcaggagccgcaccaaatgggccttaagtccttattgtggcatgtgtttggtcaatctgatggcatgggcgcatcgcctcagtttcttgtatgtgtatccctgatgctgtgaacagatgctacggaagagcaaaattcttatgtcatttgcatgttcatgtatatccgttgaccataaaagcaaatagccatgtcgccataaactgatatttacagtcatgatctgtcaattgatgagaacttaaaattaactcaaaatccttttgacgctagctatttatatgtttgtggatattttcggagaatgtctgctccattcgaaagtagagacccctgcagcctggcttatttattttctcttgtgttgctatcacaatgttcaccacacgcatttgctatggatccaatatctaaattcacgtacacttgccatcgtacgtaatatgcttttcattttctattatgatcctggtgttttacaatttttttttcccgtaaagcagaaaaataaacagagtcggcgccagaagaagcttaa

SEQ ID NO: 1077 - DNA, 3865 bp, Zea mays
  Intron number 1 from transcript GRMZM5G828171_T01 (locus G RMZM5G828171) derived from phytozome v7.0 (chr-ID 10; pos 114655896 to 114659760 reverse strand)
gagtctgcattaggtgagtgttcttgtctttcgtcttcagatgttgctgttaggccccttatgttccattggacatatcaggttagttgcagcaaaggatttctttgttttctttttcccttttgactgcttgtgtttggtttttatgggctaatttttagttactcaattttattctattttagtacctaaattttaaaatatggaaagtaaaactctattttagtttttgtatttgacaatttaggactaaaattgaataaaataaaaggactaaaatccaaacacccctttaaagaattcagccgtttttagtgcattgtattttttttgtttatcaaactcaaggcatgctcgttatcaggtcattcttttattctagttagtaagatggatcttgaaataagaaatacacctagcagctaaaagagggtattctgagcaattgtaagaatgaggttcattgatattcctggtatagtagatgctatcacacatacagtcatactcaattcgatggaattatttgatcttaaagggggtcttctataatctcgcacataaggggttatttcttaacgcggtagaaaaattacgccaatccattgagatatagtatgctacaagtgaatatttgaaacaagaaatgaattcgaattttcgaataacgggtccttcttatccagtctatctaatgtatttttcaggagccagaggaaatgcatctcaggtacaccaattagtaggtatgagagggttaatagcggatcctcaaggacaaatgattgatttacctattcaaagcaatttacgcgagggactttttttgacagaatatataaagtattggtaatatcttgccctctaggtggcgttaattcattgtgttgatcagcctgaacacatatggagtgattgaaagggtgttgtaaacatgctcacacttcagagtgtaaaattgtaggattttcggggtaatatcatttttacctagaaaggtgtggctatatataatctaaaggtgtgtgtctaacttgtactttccaaattgttctgagataatgttgaatcttgtcagcacttcaattttggtacactatatttttttgaaccgcacaggagaactacgcgttatttcattaagagagaaaaatatacccctatgagattagtatccccaaggttaaacacagactcatacacttaggtcaggcaaaggcacacgactagactcatacacttacaggcctggcaaaggcacacgaccacgacctctaggagccgatcctagcgactaagtcttggagggcttttgacctagccaaacaccataagcaaaaaatgtagttagaacttaccgaaaaatacatgtgttagtttcagttcttttaaaatacatgttcaagtggtgtagctcccaattctttcttattgagttttatctgttatattggattctacacaattttagatctattattcatctattgcacatgtagtgttgttagccatttgttatagcctcttggagtactgggttgtaacttgagatgaagctttttgatgttatacttccttttttattatatgtacaataaattcaaatgaatgtttatttgattaacttcttatttttttatctttaatatctggaaataaaagattttgtattctgtatgtgcttatgagatagaagacacattttacctcagcttgaaaatatccatgcctccatggagcttcattttgtgacacactccacaattttagatctaaactctaaacgcttaaacggtctgaacggtcacctatcatttagctatttattcaggctaaacggcaatctaaatggactaaatggtgattaaacaggataaatgattgattaaatggacacggcaagccactgtgtagtgtttacacggcgtgtaaatgggataaacggatgtgtaggtgaacatttcactagtattgaccttagctgcaattctttttggtcattattctctgtagttcagaaaatccattattccacttgttctttaatttctctctttagtgaatctcctggtttacccctttagtgaatctcctggtttaccctttgtttcactaatgatcttacaattatttttatatgtaaaatactataatttgtgagaatggaagaacacattaataaatgctctcttgcttaaaaaatgtaaggtgtgtaagttttatcctaccttgtaagtcaaacttcttagcctttgatcaagtttgtagaaaaatatatttatgtctataataccaaatatatgcactataaagacatagtttatgatagatttgataaaactaatttggtgttgtagatgttggtacatttttctataaattttgtcaaatcaagagaagtttgacttagaacaaacataaatagattgcattttggaacagatagagtaagagtactaggctcgattttttttatttgctatttcacgttagtatgttctttggcctatcaggcctatcatactctggtttggtttgtgcagatttttgtaatcgcctatttgcttgtgatttaggtgtgttataatcgataacaaggcaatacacataggcccatacactcaccaaacaaaacaggtgacacatggtaattcttaaattagctacgttttgtgttttatactgtaataaattttgacatgacattcggtttttctttgtgtcttgtttctttcttcttttccctgttaacaactcatttctttttctgttgtcttgtcaccgaactaccatattacagcctgaaacattgttgttttcatgaatgaatgaattgaaagggacaagcttgcgagtcaacatgaattaatgggcatatactatataggcacatgctattttgatctttcttcttttgatgtgattcaaatccacttgtagtatccgataatgatgacattaaccggagtcaccttttatcaagtgaacttcaatatattggcttgacaaagttgaccaaagcagcattgagtaaggttgttgcataataatgttcatattcagataaatgcactgtggaaacagagtgacgcatgctgaaattcatcagtatttattgcatggcgtcacaccaacttttttcaaccttttttaaacatatccctttccaatttggaattccatcaccatttcaatacctgatgtcttcatggctagctgatagagtccatgaaatacacgtctttttgttgcaacgtggaagcaataatgccaattgatcagttcagctaaccatgtcggaaattgaaaccgaggcggaagcttggatttgaagctcctatgtatgatagaatgaagttacttcccaatttcactctaccagggtgaacttttcttatcttgaaatgaaaagatacgaagtccggtccgtataaacaaaactactacatttgctgaaggctttcacatgagtggggctctcgtgaagggataaactgaggtaagtctttcccctgcaatgcagagaggctgcttccaacctgtgatttggtgactcagtgagacagctttcaccactacatcagaaggataaaagatatagccatcactcgccagtgtacatcaaaattgtaatactagcgtatgggtgctcgtttcgttattttagtatgtatatatcagtcacactgaagaaatgactggagaaaatagaactactggaagacttcatagaactctttttcatgatgctcagcctaatggaaccatatcgttcatcccttcctgctcctcctgctgctattattactgttgttgctgttgtcctgcaggaagtcaaggagcacagggctcttgcactgggggc

SEQ ID NO: 1078 - DNA, 29036 bp, Zea mays
  Intron number 1 from transcript GRMZM2G102189_T01 (locus G RMZM2G102189) derived from phytozome v7.0 (chr-ID 5; pos 1 06100393 to 106129428)
tcttcaggtcagtggaattgttctttgctttccttgcttgtaattcttggcacacacgttcctgttattttgtttgcttcaacttagtagttaatttcatgtaataattttgtatttgagtgattgtaagtaatctaccttccactttttacttctgcttgcatagtgtagacttctcccactttttacttctgcctgcatggtgtagacttttcttctgtggttttcatgctccagtttgtgtactaaaattactaataaatatggtgtttggtttgagtaatgagttagtccaacatcgactcattcctcacttttttgtttggtttgtggaataaaatagattcatacatgacatcatcacctcatgcctcacaagataataattagtactattacgaagaatgaacccttgatgcatcgcctcatcttggatatagtggctcctcaaaccaaacaaactacatgttcgttgctgaagaggctgaaccatctgttgtggttgtttacctttattttttatttggttgtctaattatcaaagtgtccaaattaatctaatcgagtgtacttgtggggggcttgaggactggcatggagcagctctcacttcgcttggctctagtttccaccactgagatgtagcctgccattatgttcagtatgccctaccttttgtttgacagaatataaatcgacaaaaaaacaatatctttgattcttcctgttttgtgttcttagattgttgttatgctggtgcttattctctgatgaaaccgtgttatattgtgcgggatatctcatggagaatcattacatttcagttttgttatactcccttttaatactaatggagaattatcaattatgagcattcattggaggaacatgtgaagcaaactctgtttggttactagattttcattgtctggtgattctattagtgtgtagaaagctgatgtgggatttcataggaccttttgggacaacttatttctgtagagcttttatgagaagcggtctatctagagaacctgctagctgaagaatctaagtgttttgcaatcctaattttctgcaagaaggttgtctgttctaaatgtaaaaggacctaaatacccttggagctgatgatgtcttgtttgattgccaaataaacacatattgcaactacaaactataaataacgtgactcttactctcatcgagacgatgacactacgagttaagaatttttttcttgtttatttctcacactacacaatgacatacccatctaagggttgtggttacatatttatagcccaagggactgccgaacatatactaagatgctcctagagatgctaaacatgtagagatgctgtgctctaactgcagcaagaagatctgtcctttaaagcagtcaaactgcagctaaactacagagatactgtccactaactatagtaagaagatggtgtgtctcccacaaaggccacaaaacttattctatcattctctccctaaatctttgcgttctcttttgggaagttgagccattcaggacctagagcaaagctcaaagaacttgaccctcccaaggggctccgtgagtaggtccgcaagctggtccttggtgctgatgtagcacgccttgattgtggcggaaccacccagattattccagtttaagtgcccgagtcacgccttggaggcaacaacacacttaaatcggaataacccgtcagtccctcggatctagtccgataaagccacttatcaaggatcgaataccactagttcactcgaaggtgaggcacagagaaatacaataaagcataataccataaattaagaaagtaacagtagtgattacattatcggagtttcagaaatagtaaccatagtttttaatgcagcggaaataactaatggagaaaaccgagtaacatggcgaagcctggccatgctattcctcttggtcctctcctgcggaagcagcaacccactcaaccgtctatcccggtggcagggatggaggccaagtcacaccatcaactaatcatccaaggaagtaactgtaaaaattatgccacaaggaaggttgaatatactaaaactcagctagacttacccggtgtgaggagtctattcctctacctctagaccatgaagctgtttggctgaggggtttggtttgccaaaaacactagttgagtctaaaacaagttttaacttttccggttctagaataataattttagactagatgagcacctaactatccatacatggtattaaacattatgtcaatcaacatcttttgccagtatcctcatttccacttattactcaatgtagtacaatggatcaagcagtctcattagctgcgagaagcagacgattcgaatcgagttttaaccttgtaaggtaaacctaaacacacgacatgtaggggcactccgtccccacacatatcagccgtccccatcgattccccgtcaacagatcagggctcacggtcttggcgtaccatgctctattgaccccggccgccgccgtgcaatatccacacttgtacccaccataatccggcatgggagactccgtctcaggtccagtgaggagtaaagtctacagacaggttcaatcaagtactaggcttatcggttaccatatttcccgacatgtgtttagtacgttcaaacgcttgacacaggtatccgcacgttaatccttattccaatttcgtctcgtagacaacgcatccccatgaatccttttaactatctgtgtacatgggcctcgctcacagcccactaggggtccttatcactgtagttgttagggttagggtttgtacaataacattctatccaatccaacatggtaccagagctctaggtttcttcctccctccagccgccgccgcccccacccctcccctccagccgccgccgcctctccatggacgaccgaccgccgccccctcccttctccggcgaccctttccctccccttccccttcctctctcctacagggcggcactcgccgcgcccctggcgggcgttttccccccagccggcgcgccgccgggctttgccgcacctgtggcggccctctcccccgcggccggcgcgccgccgggactcgccgccccttcggccaccacttcctctgcgtccggagcgccgccgggcctcgcagcccctccggcgagcttctcccccgcgattggcgcgctgccgggccccctccctcctccggcgaccatctcctccgcggtaggagccccactgggcaccgccacgtccctggcggaccttccctctgcggccagtgagcccccggccgtcgccgcgccccctgcgacccacttccccgccacacccgctgtctccggccatgcgcgtcccttcacggccgaacttcaggacatcgttcgtgtatcggacgacactgctcaccggatctggggtgcccttgaggctcagttcctcggccaccgccatacttggattctgtacctcgagaccgcctttcgtcagcttgctcagggcgatctctctgtggacgagtactgccgtcagatgaagacgatggcagacactcttcgcaccctcggggcccccatcaccgacgagtgcctcgtgctcaacctcctccgcagcttgagccctcgcttcgatcgtgtgacgcccatcctcacccgcatgaagccttttcccacctttgcggagaccaagaacgatctgcttcttgaggagcttcgcctctccgcccactgcgatcgccgctcccgccacgacgctctacagcgctcctcgggctcccccctctgcctctgggggatcctcttcaccgcactctggtttcccaccgtctggagctcttcggcagcctactggctccagggaggtcgcggtcgtggtcatggccgtggtcgcaagagtggacgcaacgtccgaggccattcaccaggtggctcccagtggccatccttctacaacccgtggactggcaccatccagatgtggcccgggctgtccgcgggcacctcggccccttgccccgccacccctcagcaggttttctttgccgctccacctccggcggcgccctcggcacctccccagcctcagcaggggctccttcccctcccagggcctccggccccacctgtgtgggggccctggaccaatgggtgagacacgcagtctctcgccaactcctccacaatgacgctggccccacccacctcagtctctgactgggtggctgacaccatcccggacgcaggtattctgtcttccacctctcccccacccctccccttccgtcctccatcgtggttggaaatggctctgcccttcccgtcacctcagtcggtgacgtggtccttcccggtcctttttcgtttatccaacgttcttgttgctccccacactattcaaaatcttctttccgtccgtcagttcactactgacaactcttgttccatggagtttgacccgtttggtctttctgtgaaaggatcttgccaccaggacccttctcgctcggtgtgacagccccgggcctctctacacacttcgcctgcctgcttccactacaccgacctctgccccgcctgttcttgcagccgtcgcctcttttgtgacttggcatcgtcgtcttggtcaccccggtcgtgatgtgatgtctaagctctccagcagcacctccgtttccggttgtaggggatcttttgagcacctctgtcatgcttgtcagttaggtcgccatgttaggctcccattccccatctccccttctagagcagcaggcatttttgatctgatacactgtgatgtatggacatcccctgtaatcagcatttctggctataagtattatttacttattcttgatgacttctcgcattatctgtggacttttcctctacgtcagaagttcgacacttttcccaccctgtctcacttcttcgcttgggtctccactcaatttagtcgcaccatccggagcatccagtgagaaaacgggcgtgagttttataacaatgtgtcccgtgactttttcctctctcgcggcgtccacctccgcatgtcgtgcccctacacgtctcctcagaacggccgggctaagcgtatgattcgcacgacgaacgatgtcgtgcgctctctccttttccaggcttcccttcccgctccttactgggctgaggccctcggcactgccacctacctcctcaaccatctccccaccaaggcggttgcccaccccaccccttacttcgctctcttcggcgtccatccctcttacgaccatcttcgtgtcttcgggtgcgcttgctatcccaatctcgcttctactgctcctcataagatcgcccctcgctccactcgctgtgtcttcctcggctactctcccgatcataagggataccggtgtcttgacctcgcctcccacagagtcctcatctctcgtcacgtcgttttcgacgagtcggacttccctttttcctccacccccactgcctctctcaccgacctcgacgtgctcctcgacctcgaccctgtgtcccccacaatcgtgcctcccttccccgccggtttgtccacttcaccgcctcgcgtggccctgcctgcgccgcccgcccctgcactgccacgtgcggcctcgacgccctctgcgccgccctcccccgcacagccacgtgcggccttggcgttcccagagtcgcctcgcgtgaccctgcctgcgtcgcccactcccgcacagccacgtgcggcctcgacgttccctgagtcgcctcacgcggccctgtctgcaccgccctcccccgcacagccacgtgcggcctcaacatccccttcgtctcccacacagcccagtacgacaccgacgccttttgctccatcactccccgctctgccgtctcgctacaccgaccccatctagacataccagcgccgtggtcgacgcggtaccccggctcgttctcccgccgaggtcccgacctatcaccccgtcgtcgtccaccgtgatcctcgacacatccacccgacgatggtcacccgccgcgcggccggtgtccttcggccacctgatcgcctgattctctctgccacctcttctttagctcttccgccggtacccacgactgtccgtggtgcgcttgccgacccacaatggcggcgccccatggaagcggagtacgaggctctctaggccaaccacacctgggacctggtgcctgctccccctggtgccagcgtggtcaccgggaaatggatcttcaagctgaagctgcaggccgacgggtccctggagcggtacaaggcctgttatgtgctccggggcttcacccagcgccctggggtcgacttcgacgagaccttcagtccggtggtcaagcctgccaccatccggactgttttgactttgacactggctcgggactggccggtccaccaactcgacacgacgaacgccttcctccacgacaccctgacggagacggtctactgcacccagccggttgggtttgtcgaccctgctcaacccgacttggtctgcaagctcaacaagtccctctacggcctcaagcaggcaccccgggcttggtacagtcgcttcgccaccttcctgtgttcgcagggtttcgtcgaggccaagtcggacacgtccctgttcatccttcgtcacggttcggatacagcgtacctcttctacgtcgacgacatcgtcctcaccgcctcctcccccgagcttctgcgtcgcatcatctcctgcctccaacgggagtttgcgatgaaggacctcgggacgctccaccacttcctgggggtcaccgtcgagcgccgttcccagggcctgttcctccaccagcggcagtacaccgtcgacatccttgaacgtgctgtcatggttgaatgcaagccctgcgcgactccggtggatacgcagggcaaactctccgccaccgcccccccggtcgccgatccaaccggctaccggagtcttgccggggcccttcagtacctcctctttaccaggcccgacatcgcctacgccgtccaacaggtgtgccttcacatgcacgaccctcaggagccgcatctcaccgcgctgaagcggatcctgcggtacttgcgggacacttgacttcaggctccttctacgccggtccttcgccacggaacttcgcgtctacaccgatgccgactgggcgggctgtcccgacacgcgccggtccacctcgggctacgccgtgttcctcagcgacagcctcgtctcctagtcgtcgaagcgccaactggttgtctcccgctccagtgccgaggccgagtaccgcgccgtggccaacggcgtggctgaggcggcttggctccgtcagctactccaagagctccacaatccgctgaccacgagcaccctggttttctgcaacaacgtcagcgccgcctacctctccaccaaccccgtccaacaccagcgcacgaagcatgtcgaaatcgacctccacttcgtccgcgaacgggtagcttgtggagctgttcgtgttcttcacgtcccgaccacctcccagttcgccgacgtcttcaccaaggggcttctgtcggtggtcttcacggagtttcgatccagtctcaacatgtgcggtggctagagtttcgactgcggggggtgttagctatctgtgtacatgggcctagctcacagcccactaggggtccttatcactgtagctgttagggttagggtttttacagtaacattctatccaatccaacaaatccgtgtccacagaccatcatcattccgttatcaaaatggatacaaccaattcctgacctcgcacgagtgctagaaaaatcactcgacttctaccgagatcctgatttagcatagcagctactcgacctagcatactagtatccatctcaaaaagggaatcctgagtttatgcaactagggtttcagacaattcctacacttaagtacacagtacaagcctacaaacaacaagtgcagtaaaatatcatatataacggttatgcatagaaccagggcttgcctggaatccaacactaggtaagtgttcgctagatgacactcgcttggcgagcatctcctatcttggcctttgttcaatccatccatcttcaagttgtcgaccgactttgccttatggttggctccacttcacgtcctttattttgcacgatcagcatctctcggttcaaaatgagatgcaagatgcatatgtatgaatataatgaaaaatatcacaagatactgtaagtacacgctagcgaactaaacaataagtagcgagacatcatgagcaaccacacacaccagcgctagctaactacatgtcatcggtgttcgacattaacaccactagaaggacgacagacatttcctatattacccaacacaaacacgacatcacgagcacaagtatttaccacgttcactttaatcatccattagttatttaacattaaattagttaagtacataagtttgctacgacttatatatagacagacttagttgaaaaggaattagtcacttaattgggctttacaattattcactaggcaaacacttattagaccttaaccaatttggttcactaacttagcgagacgcgtactagttacttatatatttaggctcaattatattagttatattatcattacttcgttcaatcaagatcaaaacaacaagtaatcgactcaagacaaacacactggagtggaacaatcactcacatctaacatgtttaggacaacagcacaacagttgattgtttcagttataacttataagatatttatccaaaaatagtgaacatatactttttggaaagcttaagaaactctctaaaactttggtattgtcatctcaaggtgattagatacttaacaaggttaaatagtgataaacgacagctctgtccatatttggacagattcagacttgcgacttcaaaaattcataactagagactcaggcatccaaatcaattgatcctagactttctggaaagctaatgaaattgccaacaaaacatttataaacatctcaaggcgattcaatatgcattaaggataaaagacactagaaggctttgctgtccagatttggacagattcagacttcacacttcaaacgcctataacttaatcttcagaccaccaaaaagagtgatccaagacttttttgaaaagcttagcaaaagcattacaaatcttttataatcaccaagaagtggtttcaagtttaatcaacgcaacaacacagttttcgaaatttgttcagagagtggacataatacaacaatcatcttataaaactcataactctcaaactatcaggtttatggtcatgaaaatttaacacaagtacgataaggaagttatctacaactttcttataattgacaaggactgattctaaactgaacttaagcaaacaatgcaatctctgaaatctgtacagaaattggacagattcagttactgaacttgtgaaaagtataacttctaaacgatcagacttatgactttcaaattttaacacaagcaagataataaagttatctataacttttctatatgacttttctacataaaacataatttagttcattaaacagacagcacggcgaaaacagtgcgcgcaacccaaaacaacaactaataaatttcagctcctatttactttaagaattaccatgttctagagactggaattactctaacactttaccatttgttagagttaaaataatcaaatgaggaccaacaagtcgacttactaatttttatctaagtcatttcgtgcgttagaattaccgtacacaattaacaaaggcattcaccacaataatcaaacccagtatatatgtgtatatcgatgcgctcttcacacaataatttgcattttaacttagacatcacatgagcactactacttttcatccacggccataaccatgcgcatttaggccacaacaagcaaatcatcgtgatcgcgagcttaaccaagccatctagcaagtcggctaaccggagcaacgacatagcccgctatacaacatacacgtcggcttgcctattattatcgaaatccgagacacaacatatatataacaatcacagattcagtttgagagcacgaattcggatgaaagatttgagacataaatcgaatatcgagaaatcaagtttggacacagaccggacaacaactgttgagagttcgaataagaggagttttaggcgagaattgcgagacgagatttataaatcgagattgattatcgagtttgcattcgtgccaaaaaataaaagttttaacaggctccaaattcggcctttctcgagatcgaataaattcagaaatcggtgaaaccttcacaagtaacttgataaaaggagatagatgcgatcgagaaatagaaatttttattgagcatccgagattaggataaatctcccgacataatacgaaatagacacatggggtgtcacattgatgctcccttctgtcaagtagtatcggatgaagtggtacctcaccaggatgtgcttgatccattcatggaacacaaggtcctttgccaaggccagagcggcctgactaccaaccctgagttccacctctttagtgtatctgccgaggagatcatcgagtagtcaaggtagccagagcgcctgaattgatgcggtggaggccgctatgtactcggccttgtagctggacatggccaccacctgctgcttaaccgtctgccagctaatgagacacttgccgaggaagaagaggatcccgctcatgattttgccggtgtcgatgtcgccggcatgatcactatcgttgtacccgacaaggcgtgcctccccagagcatctcgggtagtggggaccgtggtcgcaacatagtggatgatcctctttacagcctgctcatgctcagtcgtcggtcgctgtaggaaccgactaacatagtcgatggagtatgctatgtttgactatgtgtggacgaggtagcaaaggctccctacaagaccgatactgcatagcctccacctccgtcgtgctgtcgcgacttagctttagcctctcttccatcggagtgagagctaggttgcagtcggtgagcctagccagctcaacgacgcgtttggcgtaggtggtctggcgaagcgtgatcccggagttgccctggtgcacctcaatcctcaggtagaaggagagatgcccctggtcactcatttggaagatggcattcatctattccttgaacgttgccacctccgcatccttggtgccggtgatcactaggttgtcgatgtagacacccaccaacagagcattccctcaattgccccgcctgtaagcaacaggactcttactcttatcgagaggatgacactacgagttgaggcaatttttcgtttatttctcacacgctactcaaatgccatacccatctaaggaatggggatacatatttataaccctagggtctgcactacacactacacaaagttgctgtcccctagtctgcaacactagagagtagagatgctatcctgttgtcctttagatgttaaaggaggacaaccaaaagactcctgctgtcctctagatgctaaaggagtagatgttaaaggaggacagtcaaaagactgttgtccttcacaaggctgaaaagagatgctgctgtccctacaacgaagactaagatgctctaaggaatgagatgccatgcaacaaaagattgagatgctgctgtccctgcagtcctccacaagaccatgctgctgtctctgcagtcctccacaagaccacatgacctattatgtcatccccccccctaagtcttctgcgtcgttttgtggaaaagttgggccatcctgaacctgaaacaaagctcaatgaacttgatcctcccaaggggcttggtgagtaggtccgcaaactgatccttggtgttgacgtagcgcgccttgatgctcccttctgccaagcaataactgatgaagtggtacctcacccgaatgtgcttgctccgttcatgaaatacggagttcttggccaacgccagagcgaactggctatccatcctgagttccatcgctccagtgtctctcccgaggagatcattgagcagctgagcatgccaaagtgcctgagttgaagccgtggatgccctatgtactcggcctcgtagctagccatgaccatcacctgctgcttaatcgactgacagctgatggggcacttgccaaggaagaagaggatcctgcttgtgctcttgctagtgtcgatgttgccagcgtggtcgctgtcgctgtacccgacaaggtgtgcctccttagggcatctcaggtagtagagaccatggtcgagagtccccacaacatagcagacgatcctcttcatagttgttcgtgctccgtcgttggtcgctgcaggaactgactaacgtagccgacggagtatgccaagtccggccgtgtgtggacgagatagcgaaggctccccacaagacgccggtactgtgtagcgtccacctcctctgtcgtgctgtcgcgactcagcttcagcctctcctccattagagtgagagctaggttgtaattgctgagcccagccagctcaacaatgcgcttgtcatagacagtctggcgaagtgtgatcccggagtcaccctggtgcacctcaatccctaggtagaaggagagatgccctaggtcactcatctggaaggtgaactttatttcttccttgaacgctggcacctctgcatccttggcgccggtgatcaccaagtcgtcgacgtagacacccactagcagggcattttctccattgcctcgccgatagatggctgcctcctgcaggcttggtatgacctcttgcgcatggaatccagcttggcattccatgcccttggtgcctattgcaagccgtagagggccttgagcaggcgcaacaccttgccctccttgacagggatcaaaaacctgacggctggtgaacgtagacctcctcatttaagtcgccgttaagaaacgccgacttgatgtccatgtaatgaacataccaaccctcctgggctaccaatgcaagtagtcgcacgaattccatccgtgccacgggggcaaaagcatcgtcgaagtcgatcccctcttgctgcaagaaactgcgtgccaccaagcgagccttgtgcttgacaatggtgtccgcttcatccctcttcagtttaaacacccacttaagggtgatcgcgcgatgaccgtgagggagatcagcgagcttccaggcgtggtttgtctcaaccacgtccatctccgactgcatcgctgcacgtcaagccacatgtttctcggcctctgtgaaagaccgaggcttgccatcgtcgcacgcaagatgcaactctcccgccaaaatgcaagacgccgggcctgacaccaacgggtcgatgagaaggccctccactgtacgataccgcaatggctcaccgtcgtggcacgcgtcaatgcgctcctcatcgtgggagaacggggtaacgagctccaccgggtcgtgctcaacacgagctggcgtcggaggggacgtgcctgaaggggttaccgtcagtactagagtgcgttgtggcgaagagctcgttgtagttggagctggagagcgtggaactggagttggtggagacttgggggctggggtagacctgctcggagaagaagagttgcctactcccccagctccctcgacatggacgtactcgatggtgaagtcgtcgtacgtcagagtcgtgttgtcgtccaccgccttgtcccatgcccatcctcgaccttcgtcaaacactacgtcgcgcgccgttcgcacacgctgtgttcctgggtcaaggatgtggtaggccttcgaggcctccgcgtagccaatgaacacccccgcggtgctcctgtcgtcgagcttgtcgatgtggccaagctccttggtgaacgcgaggcagtgaaagacccgtaggtgagaaaccgccgacttacacccatgcagcctcgtacgacgtcatcccgttgagtgccttggtgggcgagcggttgaggatgtagatcgctgccaccaccgcctctccccagaagtcagtcgacattcctatctgcttgaggagagcccaagccatctccacaaccgtctggttgtgccactcgatgatgccgttctgctacaggatgtacggtgcggagtagtggcgttgaatgccctcattcgcgtagtacgacgtgaactcaaccaccgtgaattcgccgccgttgtcggtgcgcagcacgcacaacttgtggccgcacttcgcctccgcagtgacctgcacacgcctgatggcgttcacaacctctcccttgctgccaaggaccatcacccacatgtagcgggagaggtcatcgacgagcaacaaaaggtagtgtcgtactccttgtgtggctggtgtcaccgggccacacaagtccccatgcacgagctcgagtctctctttagctcggaagctcgattgttggggaaaggggagccgtctctgctttgtcaacacacagacgtcacataactgctccacatggtcaaggcacgacatgcctcgtaccatctccttgacactaagtcgcttcagggcctcgaagttaaggttcctgaagcccttgtgccactgccatgccccattgtcccgatgagcaacaaggcagaaaggttgtgccaccttcacgttgaggatgtaaagccaatttggactcctgcataccttggcaagaaggtgacgagcagcaagatccatgggccatggcgaccatcgcccttagcacgtcctcgcgtcctggcttgggcgcctccgcgcgccttgtgcggcttgccgcgtttgtggccgcttgttgaggaagaggactccccttcttgtcaccctggcaggcctcacactgctcccgagtgagatgtagctttccaccgatggtggtaggcctcgaaagagaccgtggttcgtcgtcgtcaacaaatttaaggtgacgtatcacctcttcgattgacatcgtagagaggtctaacagagactcgatagagcgagcgatctgcttgtacttttcagggatgcaacggaagagcttctcgacgatgactctcatcgtaggtgtcgtcgccgaactacaccatcttctgcagaaatgttgatgcagagagcaaatcgtcaacattctcacctagcttgaaggccaggttttcccactccttgcgaagtgcatgtaatgtggtcttgcgagcacgatcgctgccagtgcgagccacagtgatggcgtcctaggcctccttggcagtccacttctgagaaagtgaaaactgcatctcgagcgggactgtagtaatgagggcatccagtgcccatcgatcctcgtagtagtcgacgttgccataccgaactgcttcccacatgtggtgaacctggagccgtaccctcatcaccgcagcccactcgacgtagttggtcttggtgagggtaggtgataaggctgaattgcccgatctttcggtgagtggagataattccgatctggcggaagatgatcctcatgatttgactatgacgagcaagcccgaggcgccaatgcaatcgctgaaccaactccctgtggttaccaaacttgctggtgcaagattagcctgatcatgaagatcgttttctgcatgcaatcgaagaacaaacaagaaaaagatgcgagcaatgtgatctattactcgagggtggagttctgaatacacgaagacaacgctaatctgcgcttgttcgggaatagctaaaggctaatgtaaaacaaaactcaagggaacaaaaggagggcgcaactcctggataaatagagagagggggcgcaaccccctggtggcggccaagggggaaacatgcaaccctaggggcggcccatcctaggtcctccaccatgggccgcagttgggccgatcatctattcttctggtccctcattattcagtagcatgacgaaattaagatctcttgcacgggcccgagtgattggcccagctaatgaaggaagtggcgcctgaggtggagttggcccagctgaggagggaagtggcgcctgaggtggaggtgctgctggtgtagtcgtactcgtgttgcagttgatgttctcatcaccctctttaaagcgaagtcgtcctcgacggtaactcctcatcctcgctcatatatggtttcaaatctgcaacattaaaactagtggaaacaccaaatcctgcaggcaggtcaaggatataagcattatcattaatctttgttagcaccttaaaaggcccagcagcacgaggcattaatttagaacgatgcaaagtaggaaaccgatccttcctcaagtgcaaccaaaccatatcacctggctcaaaagtaacacgttttcttcctttactaccagcaacttgattttttgcattagtagcagcaatgttctgttttgattgttcatgtatggtaatcatttgttcaacatgcgcagcagtatctacatgtggggcgctcgcaacattaaatgaaatcaaatcaatatgcgccttagggatgaaaccataaacaatctgaaaagggcacatctttgtataagaatgcgtggcatgattataagcaaatttaacatgaggcaagcaatcctcccaacatctcaaattcttgtctaaaatagccctaagcatggtagataaagttctatttactacctcagtttgtccatcagtctgaggatgacaagtagtgctaaacaacaatttagtttccaatttattccaaagcgatctccaaaaatggcttagaaacttagcatcgcgatcatagactattgttttcggaatacaatgtaaaagaataatctctctaaagaacaattcagcaacaatgctagcatcatcagttttatgacaaggtataaagtgagccattttagagaatctatcaacaaccataaaaatgctatccctccccttcttagttgtagccaatctcaaaacaaagtccatagaaatatcaagccaaggggaagaagggacaggcaaaggcatatacaaaccatggttgcccgaacatgacttagttttctggcaagtagtacaacgtgtaacaagacgctcaacgtcacggcgcattcggggccaaaagaagtgtgcggccagcacctcatgtgtcttgtaaacgccaaagtgcgccatgaggccgcctctatgagcttcctgcagcaacaaaagacgaaccgagcttgctggaatacacagcttgttagcacgtaacaaaaatcgatcttgtacatgaaattttccctagggtttgccatccttacaatgtataaagatatctttaaacatggtacatcgacatattgatatttcacagtttgcgggccaaagattcgaaattctaactgtgaatgcatggtatatctatgggacaacgcatcaggaatgacatttttcttctcgttgtgtttaatgatataatgaaaagactcgatgaattctacccaactatcttgacgacgatttagatttatttgggtacgaatatgttttaaagcctcatgatcataatgaattataaactcgcgaggccaaaggtagtgctgccatgttggcaaagtgcggactaaagcataaagctacttatcataagtagaatatctcaagctagcaccacttaatttttcactgaaataagctatcagttttccttgtaacaaaacaacacctaacccaataccacattcaagttcaaacactttctgaaagtcaggcaattgtaagagtggagcatgggttaacttatctttcaaagtgttgaacgcctcttcttgtgggggccccaagcaaaagacacctttctttgtgagtttgtgcaaaggggcagcaatctgtaggccagctctgaatggcttcaaccttgctgctatccacctcaatgacctgcggagtaaccacataaccaagaaacgagacacgttgcgtgcaaaaggtgcatttgtccatgttaccaaacaagcgagcaacacacaaagcattaaaaacaacacgcaaatgttctaaatgatcttccatagacttgctgtaaataaggatatcatcgaaatagacaacaacaaacaaacctatgaagggccgtagaactttgttcattaaacacataaaggtgctgggagcattagtcaatccaaatggcataaccaaccattcatataaacaaaatttcgttttaaaagccgctttccattcatcaccttgtttcattctaatctgatggtaggcaaatcaaccttagagaaaataacaacaccactaagctcatctagcatatcatcaaggcgtggtataggatatcgataacgaactgtgatgttattaatagcatgacaatctacgcacatacgccacatccatctttctttggaacgagtaaaacaggaaccgagtaagggctaagagactcatgaatgtatcctttatcaagcagcgtctgcacctgtcgctggatctccttcgtctcatctggatttgtacagtacggggcgcggttcgaaagagaagctccggggatgagatcgatctatgctcaatgccacggagcggtggaagactcggtcgtaagtccgtgggaaagacatcaacatactcttgcaaaaggttaacaacagcagggggtatatccaaagacggtgcatcatcaagcggaacaagcatatgcgagcatacaagtgcataacaggcatatgagcctcatgtaaatcatcaaaatcagcacgtgtagcaagtaaaacaggagcattcaatttgatttcagatttaacaggtgcgactgatggagatttgacttattgtgcagttttagcagccctactaagatcatcttttaaaatttggtcaggggtcattggatgtataactattttctggcctttaaacatgaaagaataatgattcaaacgaccatgatgtaaactatcagtatcatattgctaaggccctagggcctgtccctccaccagcgccagtacacctttgacatcctcgagcgctctggcctggctgattgtaagccctgttcgactccgctggacacttagagcaaggtctccatggacgcctgctcttcggtggctgatctaactagctatcggagtcttgtcggggttctgcagtacctcgtctttacctaccccgacatcgcctacaccgtacagtaggtgtgccttcatattcacgccccacgggagccgcatctcaccgctatgaagcggatccttcggtacctcagaggcaccatagacttcgaccttcttcgtcgatctgtgaccaccgacctcgtcgtctacaccgatgctgattggggtggttgtctcgacacctgtcggtccactttcggtttcgccgtgttccttggtgacaacctcgtctcctggtcttcgaagcggcaacctattgtctcccgctccagtgccgaggccaagtaccgcgctgtggccaacgacgtcgccgaggcgacatggcttcgtcagctgctctaggagttgcacaatttgctgacctggatcacacttgtctattgcgacaacgtcagcgtcatgtatctttccaccaaccccgtccagcatcagcgcatgaagcatgtcgagctcgacctctatttcgtttgcgagcgggttgccgtcggagatgtgcgggttcttcatgtcccgaccacttcttagttcgccgacatcttcaccaagggcctccctacatcggtgtttgaggagtttcggtcttgtctcaacatctcccgtgcctagagtttctcaactctgctttcatcaccctattgcctaaaaaggatgatgctttggaggtcaaggactacaggccgattagtcttatccatagttttgctaaactggttgccaagctcctagctaacatattatctcctcatctgcctagactggtctccattaaccaaagtgcttttatcaaagggtggagtattctggacaattttctgatggtatagcaacttgctagagtgttgcataagaaggaacctcatgtgctcttaaagcttgatatctcaaaggctttcgattcggtgtcctggtcatttctgttagagttgctgcagcatcttggttttggtcgcaagtggtgtaatatggttggtctgctgttgtccatatccactactagaattctggtcaatggtgaactgggcagttgtatacttcatcgtcgaggcccaagggcaggggcggacctaggtataggggagtgagggcacaggccctcgctcatttatttggtgcaagtagtagagactagattttcactataaggtcccctgcttagtttaacttagatgcccctgctctggtgttttaatgtttgtctttataagtgtgtcctcactctcatttcgctctgggtccgcccctgcccaaggggatcccttgtcacctatgcttttcatcctagttatggaagttttgaactctatggtaaattttgcaactcaggagcatctcgtacagccaattgcatatcgacaggcccatacatctcatttccatatatgctgatgatgttgtgttgttcctccggctcctaagatcagacctctccttggtcacacgtctccttgatatcttcgggcaatctacttgtctcaggacaaacatcgctaagagttcagtcactccgattcagtatggggaggaagaattggctgctatcttggagctcctgccttgtgaattaaaggaattccctgcaattatttggggctgcccctgacaatcaaaaaaccatcaaaagccgagttgcagcccgtcattgacaaggtaccaaacaagttaccaggttggaaagcctctctcatgagtcgaggaggccggcttgtgatggtcaaggtggtcaatccccatctactctatgggtgttcaatccccatcttgcttttgatggaataagtcttgagcatctagaggacaacaatcgcttttgactgtcctctgtagtcctttagcatctagaggacagtttgactgtcctctgtagtctctttagcatctagaggacaacagtcgctttttgactgtcctctgtagtcgctttagcatctagaggacaacagtcacttttgactgtcctctgtagtctctttagcatctagaggacaatcctgttgtgtagtgtgtgtgagaaggtgtggtagtgcagcctctagggctataaatatgggtctccaacccttagatgggtatggcattgtgtagagtttgaggaaataaacagaaaattgccccaactcatagtgtcatcctcttgattagagttagagtccctctacttaaaattggtatcaaagccaaactatcctgcagcctaaacatctcgtgctcatctccttcccgcgcctctccccacactcagtcggcagcaagagctccaactgttccttcctcccctgctcagacgagcagcctttcgtctgagacagcctcttccacacgcagcgacccctcactagcccaccatgtccctacgctcggccacttcgagtgcgcggcgccagcaggaggccgaggtcgccgcggcacaacgcgagcgagcagcagcagcggctgcagcgacagcggcgagggcagcacggttggcggcggcggaactggcagcggcgagagcggaagtagaagcagcggaggcggcggatgctgcacgtgcggcggcaacagagctcgaggttctgcgcggcagtagagctggcagctctgcttttgtcgacgacaacaccgacgaagagctcaggctggcgagggaagcagcgcgagagcaggcggcacagtgggcagccgcgcatccccatgggggcgcgcgtggcggcagcccagataggcgccaacgcgctgacgacgctccaggcgggggcgcacgcggcggcagcccagacgggcgtagacgcgccggcggtgctcccggcggcggcgaccgagtcgacggagatcgcggcctctacaggcggcgcggttctccctccccggatcggtaccatggtcgccgcatggcccaggccattgtcagggacatcggtcccggcggtgggtgacctaccctcaccaagaccatctacatcgagtgggccgcggtgatgagggtacggctccaggttcgccacatgtgggaagcagtttgttacgacgacgtcgactaccacgaggatcggcgggcgctggatgccctcattgctgcagtcccgcccgagatgcagttttcgctttcccagaagcggactgccaaggaggcctgggacgccatcactgcgacccgcatcggcagcgatcgtgcccgcaagaccacactgcagacacttcgcaaggagtgggagaacctggccttcaagccaggtgaggatgttgatgactttgctctccgcctcaacactctgttgcaaaagatggtgcagttcggcgacaacacctacaatgaggagagagctgttgagaagctcttccgttgcatccccgaaaagtacgggcagattgctcgctcgatcgagtctctgctagacctctccacgatgacgatcgaagaggcgattggtcgcctcaaggtggtcgacggcgacgaaccacaggctctctctgggcctatcactattggcgggaagctacatctcactcgggagcagtgggaggcctgccagggagacaagaagaaaggagggagtcctcctcgacacgaggccgcaaacgcggcaagccgcgcaagggcgcgtggaggcaccccaggccggggcgcgaggacatgctgagggtggtgcacgtggaggtgcccaaggcggcgccgtcggcaacaaagaagccggcacgagacgacggctgccacaactgcggcaagcttggccactgggccagggattgtcggcagccacgacgtggccaggccaatgtcgcacaggcggaggcgaaggaggaggccctgctcctggcacatgcaagcatcgagccatctccagcggcaccggccgcagcggcactcctccaccttgatgagtcgaaagcacgtgctttcctcggcgacggctccaacaaggacatgatcgaaggatggtgcctcgacaccggcgccactcatcacatgaccggccgacgggagttcttcaccgagcttgactctagcgtccgaggctccgtcaagtttggggacgccttcggcgtagagatcaagagcgccggctcagtcgtcttcaccgccgcgtctggtgagcataggctgctcatcggagtctactacatccccgcgttgaggaactctattatcagcttgggacagctggatgagaacggttcgcgcgtggaggtcgagcacagagtcatgaggatctgggacccctctcgtcgccttcttgccaaggtacacaggagtccaaatcggctatacatcctcaatgtgaaggtggcacaaccttgctgccttgctgctcgtcgagacgacggggcatggcagtggcacgagcgcttcgggcaccttaacttcgaggccctaaagcggctcagtgccaaggagatggtacgaggcctgccgtgccttgaccatgtggagcaattctgcgatgtctacgtgttgacaaagcagagacggctcccctttccccagcagtcgagcttccgagccaaggagaggcttgagctcgtgcatggggacttgtgtggcccggtgacaccagccacaccaggaggacgacgctacttcttgctgctcgtcgatgatctctcccgctatatgtgggtgatgatccttggcagcaggggagaggctgcgatcgccatcaggcgtgtgcaggtcgctgcagaggcggagtgcggccgcaagctgcgcgtgctgtgcaccgacaacggcggcgaattcacggcggctgagttcgcgtcgtactgcgcggatgagggtgtttagcgccactactccgcgccgtacagcccgcagcagaacggcgtcatcgagcggcgcaaccagacggttgtggggatggctcgggctctcctcaagcagagaggaatgccagctgtcttctggggagaggcggtggtgacagcggtttacatcctcaaccgctcgcccaccaaggctctcaacgggatgacaccgtacgaggcttggcatgggcgcaagccggcggtctctcacctacgggtcttcggctgcctcgcgttcaccaaggagcttggccacatcagcaagctcgacgataggagcaccccgggggtgttcattggctacgcggagggctcgaaggcctaccgcatccttgacccaagaacacagcgtgtgcgcacggcgcgcgatgtagtgttcgacgaagggcgaggatgggcgtgggacaaggcggtggacgacggcacgactccgacgtacgacttcaccatcgagtacgtccactttgagggagctgggggagtaggcaactcttctccgagcaggtctaccccagcccccaagtctccaccgactccagcgccaaactctccagctcctgctacaacgagctcttcaccaccacgcactccagccacgactccggctacagcaagctcttcgccaccacgtactccagcaccgacggtaccctctccgggaacgtcctcttcgacaccagctcgtgtcgagcacgacccagtggagctcgtgacccctctgtcccgcgacaaggagcgcgtcgacgcgtgctacgacggcgagccgttgcggtatcgaagggtggagggccttctcatcgacccgtcggtgccaggccctgcatctcgcattctggcaggagagttgcatcttgcatgcgacggtggtgagcctcggtctttcgcggaggccgagaaacatgtggcttggcgtgccgcgatgcagttggagatggacgcggttgagacgaaccgcacatgggagctcgctgatctccctcatggccgtcgcgcgatcacccttaaatgggtgttcaaactgaagagggatgaagccggcgccatcgtcaagcacaaggctcgcttggtggcacgcagtttcctacagcaggaggggatcgacttcgacgatgctttcgcccccgtggcacggatggaatccgtgcgactcctccttgcgctgtcagcccagcagggctggcacgttcatcacatggatgtcaagtcggcgtttcttaacgacgacttaaaggaggaggtctacgtacaccagccgccaggttttgcgatccctggcaaggagggcaaggtgttgcgcctgcgcaaggctctctatggcctgcgacaggcaccgagggcgtggaatgccaagctggattccacgctcaaaggaatgggtttcacgccaagcccgcacgaggcggccatctatcggcggggcaatggaggaagtgccctgctggtgggtgtctacgtcgacgacttggtgatcaccggcgccaaggatgcagaggtggcagcgttcaaggaagagatgaaggccaccttccaaatgagtgacctggggcatctctccttctacctggggattgaggtgcaccagggggactccggggatcacacttcgccagatcgcactacgccaagcgcattgttgagctggctgggctcaccgactgcaacccagctctcactccgatggaggagaggctgaagctgagtcgcgacagcacgacggaggaggtggatgctacacagtaccggcgtcttgtggggagccttcgctacctcgtccacacacgacctgacttggcatactccgtcggctacgttagtcggttcttgcagcgaccgacgacggagcatgagcaggctgtgaagaggatcatccgctatgttgcggggactctcgaccacggtctctactacccgaggtgccctggggaggcgcatcttgtcgggtacagcgacagcgaccacgccggtgacatcgacactagcaagagcacaagcgggatcctcttcttcctcggcaagtgcctcattagctggcagtcggtcaagcagcaggtggtggccatgtccagctgcgaggccgagtacatagcgacgtccactgcttcgactcaggcgctctggctggctcgactgctcggtgatctcctccggagagacactggagcggtggaactcagggtggacagccagtccgctctggcattggccaagaaccccgtgttccatgaacggagcaagcacatccggctgagataccacttcatccaagactgcttggcagaagggagaatcaaggcgcgttacatcaacaccaaggatcagcttgcagacctgctcaccaagccccttgggaagatcaagtttgttgagctttgctccaggtccgggatggcctaactttctcacaagacgacgcccaagacttagggggagaatgatggaataagtcttgagcatctagaggacaacagtcgcttttgactgtcctctgtagtcctttagcatctagaggacagcttgactgtcctctgtagtctctttagcatctagaggacagcagtcgctttttgactgtcctctgtagtcgctttagcatctagaggacaacagtcgcttttgactgtcctctgtagtctctttagcatctagaggacaatcctgttgtgtagtgtgtgtgagaaggtgtggtagtgcagcctctagggctataaatatgggtctccaacccttagatggatatgacattgtgtagagtttgaggaaataaacagaaaattgccccaactcatagtgtcatcctcttgatgagagttagagtccctctacttacagctttggaccttcctaaatgggtgttcaaagctattgataaacggcgaaggggtttcttatggaaaggacaagagaaagctaacggaggtaactgtcttgtctcattggaatgcacccagcgacgcctgcagtttggtggcctaggaattcttaatctggaacggtttgggtgggccctgtgtagtcgctggttgtggctgcaaaagactgatgcttcccatccttgggctggtctccccatccgcgttccccctaacgcgctagcgctgtgcaaggttgctgttgttactacagttggaaacggggaatcacaatcaaccaaattctggacagactgttggctacaaggtaaaacggttgctgaatgcactcctaacttattccttttgatccccaaaagggatagaagacagaggacattggtccaaggtttgcaaaaccgtagatgggtctccgacatcagggagcgttgactgttcaagtaattgtagaatacctgcagctctggaaccttgttgacaacttagtgctccaccaagacaccccagatcagcataccttgcgcctctccaagcatggggtttactctagtaaatcagcatatgatgccttcttcattgggacagttaaatttggtccctggaaacgcatttggaagacctggtcacctggcaccattaaaatgcaaattcgtcatttggttggctgtcaagaatcgatgttggacagtggacaagctcgctaaaagtgggctgcctcacccttctgcttgtcttttgtgtgatcaggctgaggagactatccaacattgtttagtctcctatgtcttttctagagaagtgtggtttctgttattcgccaaattgaggttgtctactctgtcatctcagtctagtgacaagttcctaaactggtggagtagagctgttaaaacagatccaaagaagttgagaaaaggccttaacacactcatcatgttggctgcttgggaaatctggaagcatcggaatgattgtgtattcgaagggcaacagcctggtgttcatactgttttgcaggttgtggccaatgaatgtaccctttggtgtgctgcgggtgcctctgctcttcctgagctcctcacttgccaacccgctcttagggtttaatttgagtcgctggtagctgtgtgtcctgtgtaggtgtgtgtttctgtaaagtggctgtttgggtggctgttgatgggcctgtgcatttcttgccttctttgtacccggtgctgactcttcagtcgctccatttctgttttgtctccttaatgaattgactcgcagatcttcagcgatgttctaaaaaaatatgtaaagtacattgattaatttggcacagttggcatagctcacgaggcagaacgagctagcttggcttggctcgctgcccaacaaacccaaaaaatagcttggctcggcttgctcaaggctcgcgagtcacttcgagctcgagctgattcgcgagccttaagcttattttctagtcctaaccttgaccacgaccctccaccagttcctcgatatcccctgccaccctacactctgcctaaatcacatctactcctatgctcatctatgccctccttagtgctcacgtcgtgtcataatgtgaatgttttagttccttcttacttggccgatactatatcctatatcgttgtgacaacattttatgtggtaagggtcctatgcggttggccatctcatccatgccagtcgatggcttggcatccctccttcggagacttaattttataggggaagagtaaccacatgttaaccgaatttatgtttgggcctttaacttcagtgctgctcaatcaagagtttggaattatctacaacaaatttctcttaccttccattaagatgaattgatacatccatacatacagggatggtttaattgcatgcagctaatggcttgtttactaaaaccatcttttttagtcttataatatctaaattgttttgctcttactgaaatgtgcgtattcatgttttacaattcctaagcgtgttattattcaagccccatttcgttttaccatctatataaaaaatcgtgccatcttttttggctcaagactcatgacacttgtgttctctacatgactgtttaggt

SEQ ID NO: 1079 - DNA, 45591 bp, Zea mays
  Intron number 1 from transcript GRMZM2G519147_T01 (locus G RMZM2G519147) derived from phytozome v7.0 (chr-ID 2; pos 2 27667955 to 227713545)
cgggtacctgtcccggaaccttcaagaagcttctggtacgtacgcagtacgcgcagtacgcttgtttgttgcgccctgcacacgctggctgcacacagcaccggctgctgcgtatggccgttcgttgtcggctgctgctagcgatccaaatctttgtgctacatgcatgtcaatggtcgatccgccatgtaataagcgatcgactccatgcacgcgatgcatgtagattatagagatcgcttgtagcagctggctcaaaatctcttaaatcatacacgtgaatcgtcaaatcgcatcaatattacaacaataattcacaagatacataaattaattcaaaacatgatttagaaaataaattaacggattgtctttaaccttgtgttctcgctcatgcgcagggacgaacgtcgacgagcaggaagcgtggtcggtcgagtagggagcgggacaggggtcggggaacgcggacggtgagtacgaactccggtgagtctccacggacggcggcgatggctctaacggtgaggagagtgagagagatggtggcgagctcgggtaggaagagagaagctcgaggtggaagagagtcccggattttatagggagggagagatgagatgagaggagggcgcgggtggggcccacacgtgagtgagagagggggtaagcagggggcggctaggggagggagcagggcgcgcgcggcttgcttgttgggcccctagtgggctttagggttaggattagggtttagttagtttttttttctttttttttctaaattcaaaatatatttttaaataaccctaaaattcataataattataccaaattatttataaataaaatagttatttttggactaataattattgtattatttatttagatttttatttaagaagaaatgctattaaatattcaaaatcacttatgagcgataaaaaatcattccgaatgtaaataaataacaagcatttaaaagaaaatttattaccgtaaatatcattaataactaaatatattatttttatttaatgatttttatggtgttacaaacttacccctcttaaaagaatctcgtcctcgagattaaggaaggttagcacgaaagcaaaggagatacatggttatttgtaggttcttagttctcattgaactcttctaatattaaggaacttccttactacttcgctctgcaatgtatactaatcaggcgaccttcatcatcatacttataaaatggttggtcttctgaattattgcttaggtcatgcttgttagctttcttctctagtcggtctagacacttcttggagcattcgcgaataacatgtccttcatttttgcagtagtagcaaacacctcttgctttgagttctttgtgagttaactttgcttgaacaacagggggtgagggttgattgggtgtctgtatcttatatagccgagtctgacttgattcttctgtttgggtatccatgtgtttcgtggcttttgcttgtggttgaggtggactaatcatgtatccaaacatttttctattccttttgttgttcttcattccattcatcgaatatctctgtgactcatttttctcgttcatagttgttaaggtaggaatattgtcgttggcatcatttacttgatttccattagggtccatcatctagtcagagggtaaaagagtttagtgagacagactacataataggcttgtatgacattaagataaagtgtgaacacaacattttgatttccaatataagattagttaaggatgatttccgattccgcatagcttcatcatacaacaagagttaacaagtgttataatccttaacagagatcttttgaactttatagatttcagagcatgatatccaaatcatctttctgatccaacagtatttatttgagcacaaattgagagaaagacttgagcgggactttagggcaactagaatagagcatcacattgtttgcatatagcagatgacaccatactttattctcttataaagaggcaaaacacaataggtgcaagagattctccaaatttattcatatatcacttaacacaattacaaatcttgaaaggggcaacaccttgacatttttttcttcgtgagacatactccttcttctagctaaatgacatattattcttccttgtcagatgcaccaatcagagctggaggtcgattgtcttcaactactattctttctccagatggggtttccaaacacatggttctcttagtatgttggattactgccttagttctttgtaaccaattctttccaagaatcacatcatttcccattgattctatcactataagatcagctagaaaatctatcccactgattttaacactcacatttggacatatgtagtttactatcatttttcttttgggtgcactgatggtaatttttgatctcaagggacacttagataccatactttgttgcaaactgggcactgataaaagaatgtgttgtacgaggatcatacaacacggtggcgatggtcgtgtgaatgactagtgttccaaaaattactgcattattatacggaatggttcctgtcactgcataacttatccttcctatggactttttccgttgtttattctttgttgatgcatgagtttgtgggtgttgtcttttcttttggaccttattgatctccacatctttcttaggacaactattaacaagatggccggtatcaccacagccaaagcaagcacgacttgataagttacatggtggagttgtctttacggtgttggtagaagtttctgtgcatttttgttcacattccatgtctgaagactgagatagctttatctcggaggtgatctgtagtgaactcttctcaggacagttacggaagtaatgaccttcacgtccacattgatagcaagcttttcttgaagttatttcttgactttttccatgtttcccttttcgtttcttggacctgatgcgaccatgaggctgaaactgtgtgcaagtaatggtccatccatcaatgtaacactcatgtgtttcttcctggggctgggcatccttgtgatgtttcctttttggaatattttgtaattcatcaactgacagtgcattaggtatgagagactctgctattagttgttcttggggagacatctatctttttatgccagaaaataaaatatggttcttctgttttgtagtttcactttcgtttgtactgatctggcgacaaggaattccatagtacttacaacaacaacatgttccaaggtcacttgtctgttggtttggttgtgcatccttttgtgtcttgaatttctgttcatcagctattttatttatagtgttgttttgacttgccaacacaccacattctttgcatttagtgacatcacttgtagttgacattccaaggtctgccatctgtatgggtatggaagaatggaagggacgaaagggttgagcaaagacagattatagagagcagagaaaacctatctatctaaggctttacctagctaactgatgccattgtggacaaaagtcacacaatacaccaacaatcatttcaaagaagcaaatcaaacatgaacacaaaggacaatgaactcaagcatactagcacaacacaatcctattctactcattcaaccaaaacaaaaggtgagacaaggtttggaataagaaagatattataacatcaaggagttgggtaagaattatcaaggagttagacaagacatatttatcggtggccatgagtgaaataagataaccatgaactattaaagtgaggataaataatacaaccaaggatataaagtgagttagggagaaagcattatcaaggagaaaagtagagagacaaaggtttaatatatcaaggtagatattgcgcaagggtggcaatacaatggcaagaaaacaaaagtataataagtcaagggttatatagcaatattagggattagaaaaccaatatataatataatataatatcgcccttaccgatcaagtcgaaaatcttaatacaaaagaacaatcctatcaacctagccaagaagtctggtaatagatccaaaggatccatagcaaaacttcttgcggagtggggataagacagagaatagggcatcgtcgatagcttcgaaaaggtttcttctagcaaacttcgcttcaagttccacaatcctagcttgatcatcttgcaatgcttctcattagaaccttctgatagacgaagaatcagataagaagggttgaagataaaagagacgaggtttgatataaagtaagtttttatgaagacaattaaatcaagttttgaacgactgactgggctttccatttctaactaatctagcgacctacggtcacattgcctttgataccacttctgtcacacccggtttcagaggggcagagccgggtgcatatcatatgtgtgccaggatctatttccacacatatgttgatgttacaagtgtaatatatcaaaagaacaatgcataaaagcgtaaataacgattatattaacatattacacttcgaacagacataatgtcttaacctttattcatcaaagtacagcgaaacatggacatccatccacaggaagatgaccaggggtatcactagactagcatccatggagttcagcatcataacttcatctgtaaacttctgatcaaaatttaagcaagggtgagctcacttatggtcggggctcagcaagtgggggaaaaattaatgtaagtttatcaaggtgaggctaagattgagcagtaagcattttagttggtcaacattttattaacaacacttgtcttactaataagtgtgaatcccatgtattcccattaaacaaaggtttaagagtatatcaaaaacacttaagtgaaaccacttaagcaaaccattggcagatcatcagatctcgatttatttccatcttcaagttcaattatcatgtgaggagtccaggctgctcataaccgtgagcacgactgatatatcagttttacactctgcagaggtggcacatctttacccatgagtcacgattcccttctagcccaggttagttagactcgtattcacttccgaggtgaatggctagggtctcactatgaggcttttccctagagtcctcattatgcaaatgctggaaatggtcaactgcataaggtacacctaacgtaaccatcgtatagtccagactacaagttaaagctttgggaactatgcccgtatccaatctgcctgagccggaactataagcgcttgccagatgccctcgttccggtcgaccacgaccagcacccaacataagacttccctagttatttagccaagggcgtcccataccaccttcatggtagcactgttttcccgggtggtcactccatgttccaattaatatgcaataatcttgtttaaccatcgggttaacaataataaagtaaacttaccatttggaacattaatatcataaacaggagtgactgcataaatttaaagttgtagcaatagcatagctacttgattagatcataatcccaggttaaacaaggaataaggttagaaaggctagggatctaaataggtaacccatcaaattatgcatatatatatcgaagaataaactttattaaatgtattgtttgagattaaacagagtatgcagagggagaagtccacttgccttgcttatagaaaacttgaggttcttccacggataggaatagatcttgattcttaattactagatcaaccactgaatatcacacaaacaaacaagaagaaacaaacaccactcaataacatacaacattcaccatacgtaaaggtaaaagaaagcctaacgaaaagagtgttcgcttttcaaaaacattagacgcacgggttataataaaaaggtattcttttcaaaaatgtgtggtctatactttataaaacaagacatgagcttaaaatatcttaattaaaatatatagatattaggttcaatgtaacaccctgaatttggcggtataaaattttctttctaatgatcacccaaattcatgtgaataactcttctctctctcaccctaggttttatctctctctagatcatctcttcctttttcccttttaagtagaattagcttaaagttagggggatttaattatttatttttgccaaaacattatgggtcatgacctgttgcatcatgttgagcttaaaataatttttgaagtgttgcacatgtttgaatttatttgaatttgaaacctaatttgaatttggaattgaaaaccctatagaaaagaaatagaaaaggaattagaaaattcagagaaaaagaaaaaagaaaagcaacccagcacccagctaggcccagttaggccgcgcgcccgcgcgcccgcgccgcctcacaggtgggatccacctattagcggtgactttctctcccgctctctctctctctctctctctctctctctctctcgctctctgcccgctggggccgacctgtcgacgccagttgcttcgcctgtgtgcgtccctcttctctctctgtctcgtgggcccgttctgccaggcgctgagccgttgcccgtgcgccccttttctctctctctctctctctttgcgtcgtggaccctccctgtcagttcagcccttgccgtggaccggcgcgtgcgcactcgcgcacgtcgccagaattctcggccacgacgctcaccgacgcgccccagctccctattagagccccgccagcgcccgcactcacttccccgcctcatttcgcacaactccaccctctctcgcacggtggtcggccaatttagcccggtccagtgccccggtgtaagtccctgtgtcaaccctgcctctgctgaagccttcccaggccttagcacgcctcaagccccctccccatggccggaatccctcaacggagttcctccggtccgctcgaggccttctccccgctgttctcccctctctgccctcggattcgtggccttttccccgccactgagttcgtcgtggcattctctccctctctgcccaatcccggcgaccccggaaccaacctagcacgtgcctgccccaactccggcgacttcaccgccgcggagaggagcggcgccgcccgtagccgttcaccccctggtctgatctcccctgtttgatcttgatcgcacgacccagatcgcgggataccgcttcgcgcacgcgcgctgtgcattcgggcccgtctgtcagcgcccgtgttccctggcgctgggcccgctcggtcagtgcgccctccccctcggtcgctgacgcccctggcccgcctgtcagcgctcgcccgcccgtgcgcgcacgcccgcggccgcagatctaacctcggtcgttggtttctgatctaacagtttgaatcgtctgataccccttcgcgaggtagttttattaaaaagaccctcagtttgtttagaatcaacccgccgtccctggttttcgcgcgcaggcccctgtattcttgcagattgaaccctggacttttaaatattcacagaattagacctaatttcatattttgaattccctaacttgtttatttcatatcttttgcatatgaactccaaatttagtgattcaaattgcaaaatgttcatagtattattctctgttcaaataaattagttcctaattttatggataactattaaccagtatatgtatagatttggtgtatttaataaaataaaaagggaaaaccctagagattaaaacatgcttaatcttgtgagattaataatgtgtattacatgaattcatctatgttctaatttttaggtcacaataaaataaattgaactatgttatgtatttgtgagtaacacttagagaaataataatctatttccaaatgaagttagtttatgttatactttgaactcattatcccttatgtagtattgtgtctttttaagatgtattcctatgtttgtacatgtttggtgtgctgttcatttatactttccaaatgtattgagtacatgttcactttatttagacaacaagcagtccgaggttcctgagtgtgttgttggagaccttcctgagcaacaacctggtgaaggcaagtgtcctctgacctattatgtcgtacatactttatgattcactatcccgcattacattatctaaacctaaggattgactagtttgtatgtaccttatccttgtttaccttttgggttatcatggttagcatcttgcttttgctttactttaatcaatgaacatgatgtgaacatttatgatacgatactgttatcctgattatgttgatgatcttgtgatactctagggggctcaggccttttttcctgagtacgtctccgtaaggacctgttcgtggagtgaccacccgggataacagtgcaaccatgagggtggaatgggatgccccttagctgattaattagatgaacctggggtgtagttggctttgctagagggccgtcaatggggaccggggcgtagtgctcgctctgccaaggttggggtggagaggttcattcgatttggttttgttagtaacccaccttggagaggtgtactgcgtttgtacgactggcgaaacctaacgagcagctatgcaccaggagagtctttgtaaaggctacatagtgtatccctggccattcaccttggtagtgaagtgtaacaccctgaatttaagggtataaaatttctttctaatgatcatccaaattcatgtgttactcttctctctctcaccctaggttttatctctctctagattctctctactttttttccttttaagtagaattagctcaaggttagggggctttaattatttattttttccaaaacattatgagtcatgacatgttgcatcatgttgagcttatttattctttgaagtgttgcatatgtttgaatttatttgaatttgaaacctaatttgaatttggaattggaaaacctagagaaaagaaatagaaaaagaattagaaaatccagagaaaaagaaaaaggaaaagttaaagccaattaacttaattaaatagcatcgcacatgtaaatagtagtcaaataccatgtcatgagcatacatgttgatcttaataaattaattgtgcatgcgtaatttagtgtggcgctacaacatatcttcccaagataaacatttttaaaacgctgcatcgtacattaagtgtatccgtaaataataaaggttgtcgattcatgctctcgcattattcaataaatactatcaaattcagtcttcaaaataaatcgtgtgcgtatgtgatacaatgcactgtcaaccaaagaagtaaatattaaagagataaattctctcttgtttatccatgataaagtgtatacagtgtctcaaaagacacatgtactcaaataattagaaaaaagccatacgttgagttatagaaatccaacaccatatcttgaacaaataacaagatattcataaaagtatgcataaattaaaatacatgcatattatggttcggtagagagttgaccaagctagtaataaagagatgtaattaacataatttttatgcaaatataagaattatagaagtatgagcctgcaatacctgtattatttactctattatatctaaattaaaacttgtctctgttgacgtggagatggcgcttttgccgcccgttttcccgacatcaaagtgttgcacgtgtttgaaattatttgaatttgaaacctaatttgaatttggaattgaaaaccctatagaaaagaaatagaaaaggaattagaaaatccagagaaaaagataaaagaaaagcagcccagtggcccagctcggcccagttaggccgcgcgcccgcgcgcccgcaccgcctgacaggtagcggcggctttctctcccgctctctctctctctctctctctctctctctcgctctcggcccgctggggccgacctatcggtgccagtttcttcgcccgcgcgcgtccctcttctctctctgtctcgcgggcccgttctgccaggcgctgagccattgcccgtgcgccccttttctctctctctgcgtcgtggtccctccctgtcagttccgccctcgccgtggaccgacgcgtgcgcacgtcgccggaattctcggccacgacactcacccacgcgccccagctccctcttagagccccgccagcgcccgcactcacttccccgcctcatttcgcacagctccaccctctcccgtgctctgcccacgccgccagacgccatcggagacacgcgcccgcttccccggccatccagctcgccggagaccgcgccaagccactcgagctctgccccgaggtgagacacctttgcccgtgcctaatttcctcgattttgctctgtgctcggccaattttggcattgtcggtcctcggctatggcggtccgccgcgcccgcgcggtggccggccaatttagcccggtctagtgccctggtgtaggtccctgtgtcacccctgccgctgtagaagccttcctaggccctaccacgcctcaagccccctccccgtggccgaaatcccctgacgcccctggcccgcctgtcagcgcgcgcccgcccgtgcgcaagctagcggccgcagatctaacctcggccgtggtttcagatctaacagtttgaatcgtccgatacccctttgtgtggtagttttattaaagagaccctcggtttgtttagaatcaacacgccgtccctggttttcacgcgcaggcccctgtattcttgcatattgaaccctggacttttaaatattcacagaattagacctaatttcatattttgaattctaaacttgtttatttcatatcttttgcatatgaactccaaatttagtgattcaaattgcaaaatgtttatagtattattctctgttcaaataaattagttccatttacaccctgtgcttcctaattttatggataactattaaccagtatatgtatagatttggtgtatttaataaaataaaaaggaaaaccctagacattaaaacatgcttaatcttgtgagattaataatgtgtattacatgaattcatctctgttctaatttttaggtcacaataaaataaatttaacaatgttatgtatttgtgagtaacacttagagaaataataatctattttcaaatgaagttagtttatgttatactttgaactcattatcccttatgtagtattgtgtctttttaagatgtatttctatgtttgtacatgtttggtgtgctgttcatttgtactttccaaatgtactgagtgcatgttcgctttatttagacaacgagcagtccgaggttcctgagtgtgttgttggagaccttcctgagcaacaacctggtgaaggcaagtgtcctctgacctattatgtcgtacatactttatgattcactgtcccgcattacattatctaaacctaaggattgactagtttgtatgtaccttatccttgtttaccttttgggttatcatggttagcatcttgcttttgctttactttaatcaatgaacatgatgtgaacatttatgatacgatactgttatcctaattatgttgatgatcttgtgatactctagggggctcaggccttttttcctgagtacctctccgtaaggacctgttcgtggagtgaccacccgggataacagtgcaaccatgagggtggaatgggacgcccttagctgattaattagatgaacctgggggtgtagttggctttgctagagggccgtcaatggggaccggggcgtagtgctcgctctgccaaggttggggtggagaggttcattcaatttggttttgttagtcacccaccttggagaggtgtactgcatttgtacgactggcgaaacctaacgagcagctatgcaccaggggagtctttgtaaaggctacatagtgtatccctggccattcaccttggtagtgaagtgtaacaccctgaatttaggggtataaaatttctttctaatgatcacccaaattcatgtgttactcttctctctctcactctaggttttatctctctctagatcctctctccttttttccttttaagtagaattagctctaggttagggggctttaattatttattttttccaaaacattatgagtcatgacatgttgcatcatgttgagcttatttattctttgaagtgttgcatatgtttgaatttatttgaatttgaaacctaatttgaatttggaattggaaaacctagagagaaaaaatagaaaaagaattagaaaatccagagaaaaagaaaaaggaaaaccagcccagcagcctagctcggcccagccaggccacgcgccggcgccgcctgacaggtgggatccacctgtcagcgacagatttctctcccgtgctctctctctctcgctcgctgcctactggggccgacctatcggcaccagttgtttccccctccgcacccctcttccctctgcctcgcgggcccgcgctgccaggcgctgagccgttgcacccgtgcgccccttttctctctctctgcgccgtggatcctccctgtcagttccgccctccccgcacccaccgtggatcggcgcgtccgcactcgcgcacatcgccagaattctcggccacgacgcccacccacgcgccccagctccctcttagagccccgctagctccctcttagagccccgctagcacccgcactcacttccccgcctcatttcacacagctccgccctctctcgcgctctgcccacgccgccagacgtcgctggagacccgcacccgcttccccagccatctagcacgcgggagaccgcaccaagccaccccgagctctgcaccaaggtgaaacacctttgcccgtgcttaatttccccaatttcgctctgtgctcggccaattttggcatcgccggttctcggtcgtggtggtccgccgtgcccacacggtggccggccagtttagcccggtccagtgccccggtgtaggtccctgtgtcacccctgcctctgatgaagccttcccaagccttagcacgcctcaagctccctccccatggctggaatccctcactggagctcctccggtccgcctaaggccttctccccgccgttctcccctctctgtcctcagattcgtggccttttccccgccactaagttcaccgtggcatcctctccctctctgcccaatcccggtgagcccggaaccaccctagcacgcgcctgcctcaactccggcgaactcaccgccgcggagaagagcagcaccgcccgcagccgtttatccctccctggtctgatctccctcgtccgatcttgatcgcatgaaccagatcgcggataccgcttcgtgcacgcgcgcccgacgcccctggcccgcctgtcagcgcccatgttccctggcgctgggcccgctcgatcagtgcgctctccccctcggtcgctgacgcccctggcccgcctgttagcgctcgcccgcccgcgcgcccttggccgtagatctaatctcggccgtcgatttctgatctaacggttggaatcaactgataccccttcgcgcggtagttttattaaagagaccctcagtttgtttagaatcaacccatcgtcccttgttttcacgcgcaggcccctatattcttgcagattgaaccgtggacttttaaatattcatagaattagacctaatttcatattttgaattcccaaacttgtttatttcatatcttttgcatatgaaccccaaatttagtgatccaaattgtaaaatgttcatagtattattctttgttcaaataaattagttccatttacaccctatgctttctaattttatggataactattaacaagtatatgtatagattttgtgtatttaataaaataaaaaaggaaaaaacctagagattaaaacatgtttaatcttgtgagattaataatgtgtattacgtaaattcatctctgttttaatttttaggtcaccataaaataaattgaactaggttatgtaactgtgggcaatacttaaaggaataataatctatttctaaatgaagtttgtttgtgttatagtttatgttatactttgatctcattatcccttatgtagtattgtgtctttgttggagggccgtcaatgggggtcggggcgtagtgctcgctctgccaaggtttgggtgcagaggttcattagatttggttttgttagtcacccaccttggggaggtgtactgcgtttgtacgactagcgaaacctaacgagcagctatgcaccaggggagactttgtaaaggctacgtagtgtatccctggccattcaccttggtagtgaagatcgggtctgtacaacctaggctgggaagcgatcacgacttgtgggtaaagtgtgcaacctctgcatagtgttagaaactggtatatcagccgagctcacggttaagagcagccttgggatcctctttgattagaagaactttggatacttttatgatgatggttaacaatgatgttataagtctggtctctggtatttcctcttttgagggagtacttttgggtaatacctgggtttattactaaaactcggctctactaataataataaatacttgaccaactaaaagcaactgcttaacctcaaccccacatacagctagtccactttagccaaacgggacatttgctgagtacgttgatgtgtactcacccttgctttacaaaccacccccaccctaggttgtccccattgtactcagtgctcaggaggtgatgctggcagcatggaggacttcgaggagttccaggattacgacgagttctagtttattcttagtggcaaacccccagttagctgcatgtgtaggcttatcatctatgtttcatttctctgcactttgatatttatgctaaagacaatggttatgtaatagactctgtggatgtcttggacatcttgatgtaattaagtatctttccgctatttatttcaagcattgtgtgatgatgtccaattatgtaatcgctttgaacgtgagtttctgatcctggcacgtacatggttcgcattcagtttaccttctaaaactgggtgtgacatgaagatcgggtctgtacaacctaggctgggaagggatcgtgactcatgggtaaagtgtgcaacctctacagagtgttagaaactggtatatcagccgagctcacggttaagagcagccttgggatcctctttgattaaaagaactttggatacttttatgatgatggttaacaatgatgttataagtctggtctctggtatttcctcttttgagggagtacttttgggtaatagctgggtttattactaaaactcggctctactactaataataaatacttgaccaactaaaagcaactgcttaacctcaaccgcacatacaactagtccactttagccaaacgggacatttgctgagtacgttgatgtgtactcacccttgctttacaaaccacccaccccaggttgtccccattgtactcagtgctcaggaggtgatgctggcagcatggaggacttcgaggagttacaggattacgacgagttctagtttattcttagtggcaaacccctagtcagctgcctgtgtaggcttatcatctacgttttgtttcttcgcactttgatatttatgctaaagacaatggttatgtaatagactctatggatgtcttggacatcttgatgtaattaagtaccttttcgctatttatttcaagcattgtgtgatgatgtccaattatgtaatcgctgtgtacgtgagtttctgatcctagcacgtacatggttcgcattcggtttaccttctaaaaccgggtgtgacataagtggtatcaaagccttgctgactgtaggaccactaatctagactagaatggtcgccctaaggactatagacccctgctcttaccttgcccttagagttctttcaaaagttggtcatcttgaccaactctatgttatctacttatctcaaaaagttttgtctcacttttatttatgtttactttctggtctcatagttctcttactcttgtgcttacgatgtcttttgtagatggcttgtatcaggtgcactgcacataagtctgggatcccctttttgccttctcgcctggcggagcgtccactgcttcacacggtgccaggtcagtccagtcacctggagagactgcatcgtcgtctgcacgaggagcaggagcaggagcaggagcagtaggactcctccccctcacctcagcaggaggtggagtctgagaagccgccttcccctgtacctcagccaaagatgtccctgcaccaccatagggcatcccggctgctggaggagaccctgatggagacagagacaatgacgacgccggtggtagttcgagccacggtacggagctctcggaggagccggagccagagggatggatcgctagacccatcactcgtgacgccgctcacgggtgtcatatccacgacgctctcgatacccagctgcgtcgggccttcgaccgacacacttggtccatcgagtactattgtgtagtctaccagcatcatcgcgggttatacccagaccagtgggaggctacttgcttggtgcgccgtccggacgatgatcttcggggtgttgaggccttctcagaacactattctattactgagagggatactgctgaggcagccatgcaagatgcagcacgacaggcactttctcagtattgctcgttgtttagtggggtagctgatgggcctcgacctgaagtactaccctcgcggtttgaccggcagtgctggaggtgtgattgcctcgccagttggtgagggcaatcctaggctgaacaacatggtcaatctggctgccgtgctcaacacagagttggaccatgcccttgatgagctaggtaaggttcgggcggaggttgcggaattgcatgctgagtgcgcagcacgtcactatctggatggtggttctcccgcccctgtcaggattcagcacccttaccgttcaccgccccgtggtcgctttgactatggtaccccagactgcaggacccggatagatttggatccctagatcgaaagagtcgaagtctgtaataatgcttagttcagtgtcttagtctagtcagtcttagttagagttagtttgcttatcttatgttggatgcttgttatgatggacatgtactgaagttggatctttgtaatgattttcaccaaggtgtgggtatcccctgcaacttggtgtagttattaataaagttagttacttagttgggtaatccatttattcccactttcctctttatctaagaagctgtcagtgaagatggtcatttgttcagtgctatgaggattttctatacatcttttcttatgctgaaagactgcagagtcaaatttgatatatatgtgcgatttctacagatgtctgagaacaggcgcagaggtgcgaggtgtgctcagccagaacagcaggcaccccaagaggaggcagcgccgcaacagcatttgccaccgccacccccaatgaccattgagcaaatgttcttgatgcagactcaagtagtccaagcaattggacagaccctagcagcgatgcagcaggtgcagcagcagccaccaccgcctcagcctcaggtgcaagtccagatgccacaagtgcccagagacaagcgggcagaattcatgaggggccatcccccagtctttgctcattttgctgatcccatggacgccaaagattggctgcgtaccgtggagtgtgagttgcacactgcccagtacaaccaagcagcgccagcgcaaggagggagtcatgcatgtttccactgtggggaacaaggccattgagcgaatcattgcccaaagaaagcagctcaacaacaaccagctcccaatgccccagtcagacagaatgcaatgtagcaaggaggcaacaactgtgggcagcctcgtgcctagtatggaaaggtgaaccacctagaggccaacacagtccaggagactccaggagtggcactaggtacattttcagtcgagtaccattatgcaaatgtcttatttgatactggagcaacgcattcttttgtgactacatcatgggtagaatcacataatataccagtagcacccatgtatccacctatgagggttagttcagttggtggaaggacccaaactgatagattttgccctagtgcaaaggttcaaataaggggatagagttccccgctgatttaatagttatgggtaaccaggatacaactatagacgtcatcctagggatgaattggctaaccaagtatcaagccagtcttagttgtgataagagaacggtgaagttagtgtccttatcaggagaagaagtgttagtggagttggtcttgtctggaccaaggaaaggaagttgtcaccaagtcaccgcccatattgaggagattaaaccatcagaggctatcaatgtagtgtcagaattcccagatgtgtttcccgaggagttaccgggtatgccacctgaaaggaaggttgaattttccatagagcttataccaggcaccgcccctatttccaagagagcctatcgagtgtccagaccagaattggtggaactcaagaagcagattgatgagttgtcggagaaaggctacatcagaccgagtacctcgccttgggtagccccagtgctgtttgtggagaagaaggatggcacgaagaggatgtgcatcgactatcaagctttgaatgaagtcaccgtcaagaacaagtacccctgtccagaattgaagatttattcaaccagttgagaggagccagtgtgttctcgaagatagatctgaggtcaggctaccatcagctcagaatccgaccttcagatataccgaagacaacattcatcaccaagtatggactgtatgagttcacggtcatgtcattcagtttgacgaatgcgccagcttacttcatgtacttgatgaacagtgtgttcatggactacctcaacaagttcgtggtgatgtttattgatgacattcttatatattcccagaatgagcaagagcatgaggagcatttgaggaaagtgcttaagaggctacgagattgtcagttgtatgccaagctcagcaagtgcgagttctagatcagtgaagtcctattcttgggtcacattataaaccgagagggattggctgtagatccgaagaaggtaacaactatcttggactggaaaccaccaaaagatgtccgaggaatcaagagtttcatcaaaatggccggttattatcggcgtttcattgaaggtttctccaagattgccaggccaatgatagccttgttggcaaataaggttgagttcaagtggaccccagcatgccagaagtcctttgagacattgaaggagaagttgacaacggcaccagtactgattctgctagatgttcacaagtcattctcagtatattgcgatgcttcgtacaccggactgggatgtgtgttaatgcaggaagggagagtagtggcatactcgtcccgacagttgaagattcatgagaagaattatcctactcatgatctggaattagcagccgtggttcatgcattgaagacctggaggcattatctttatgggcagaagtgtgatatctacacggaccataagagtctcaaatatatattcactcagtcagagctaaacatgagacaacgaagatggctagaattgatcaaggattatgagctagagatccattatcatccaggcaaagcaaatgtggttgtagatgctcttagcagaaagagtcaagttaatatgttgctcgcttacccgatgtcgtatgagctagcaaaggagttcgatagattgagtctcggatttctgaacaacacccaaggagtgacaatcgagttggaacccactctagagcaagatatcaggaaaggtcagaaggatgatgagaagatcaacaagatccggtggctgatcatagatggaaaaggcaaggatttctgtgaagatacagaaggagtggtatggttcaatgacagattgtgtgttttcgacatcaaatcgatctgggaactgattctcaggaagctcatgagacaacatactctatacaccctggtagtgagaagatgtaccaatacctaaagaaaagattctggtggtacaggatgaaaagggagatagcagagtatgtggctgtatgtgatagttgtcagaggattaaagcagaacatcaaagaccggcaggtttgttgcaaccgttgcagattcctcagtggaagtgggatgagatcagaatggatttcatagttggtctgcctcacactcgtactggttaggactccatctaggtagtagtggaccgtttgacaaaggcggcccatttcataccagtcaagaccacctacaacagtgcggtgttggccgaactatacatggctcagattgtgtgcttgcatgacgttccgaagaagatagtatcagatagaggcactcagttcacctctcatttttggcagcagttgcatgaagctttgggtacacacttgaagttcagctcagcttaccacccatagacagatggtcaaacagagagaaccaatcagattctcgaggatatgttgagggcttgtgctttgcaagataagataggttgggacaagagattaccatatgtagaattctcttacaacaacagctatcaagccagcttgaagatgtcaccattcaaagcgctctatgggaggaaatgcagaactccattgcattgggaccaacctggtgaaagacaggtgttcggaccagatattttgcttgaagccgaggagaacatcagaatggtccgagagaatttgaaggcagcacagtcccgacagcaaagctatgctgacaccagaagaacggaactcaattttgaagtgggagactacgtctatttgaaggtgtcacccatcagaggaaccaaaaggtttggagtcaaaggcaagctagcaccccgatatattgggctgtatcaaattcaagcaagacgtggagaagtggcttaccaacttagcttaccagagaatctgtccgctgtgcatgatgtgttccatgtgtcgcagttgaagaaatgcttgagggtgccaaaagagcagttgccagcagaagatcttgaagttcaagaagatctgacttatattgagaagacaactcaaattctggagatagcagattgggtcacccagaaaagtaccatcgggatgtgcaaagtcaaatggggtcaccactcagaagaagaagccacctgggaacgagaggatgatttgaaagccaagtaccctgagctctttgctagccaaccctgaatctcgagggcgagattcttttaaggggataggtctgtaacaccctgaatttgggggtataaaattttctttctaatgatcacccaaattcatgtgttactcttctctctctcaccctaggttttatctctctctagatcctctcttcccttttcccttttaagtagaattagctcaaagttaggggggtttaattattaatttttgccaaaacattatgggtcatgacatgttgcatcatgctgagcttaaaatattctttgaagtgtgttgacacggattttggcctcatcaaaatatatgttatgcgggctaaatgacttcgattaatgtgacctttaaatttcgatacatatgaaataagcaaatgttctataaataaatatatgaatatttaaagtagacattgatttgtaatgtccttgtgctctaaaagtttagcgccccaagatattgaaatatgtagggcttcaaatatatatccgtgcaaatatattaccaataagcagacatcatataatgtgattttatatgtgcgcactaattgaagatttgtttaaactactagcgaaaaatatgatatgtgtaaatgattaattgcatatataagtacaaataaagcgaatataaattttaaatggctatagataaacattacaaggtatcgttatcttaaaatagcaataacaacaaaaaatatagataataattaaatatgttaaaataaaaaattaaataaaaagaagaataagaaaaaacaaacatgagaactgtggggggcagatacccctgggtccactagaaggcaagaaggccctcgcgaaaggcttcgggcccattatttcgcaaggccgtcccttcgtgggccaggggaggaacttctggcagaatggatcgacacatgatcggatcaactcgagcccatgcggctcactgaattcaaacgttatccacagcattgatccgattctcccgcgcagcgccctcagacgtcggaactaaatgaagataagtcggcaggattataggaagattagctcagtcggttcactattacttaggcgcacgttgttatcatatccgcatgtaatgcctcacgatcgagtatataaggcctagggggcaccccatcaaagacaactcactcattagccatttactcagctctctagcatccttcatactagagaactcccttgtaacccccacataaaagatccacaccaggacatagggtgttacgcctctcaaagtagcccgaacctgtataaaattatccactgtctctcgtgcatctagcatgaaccatcgagctatagtcggtaacaccgtcctactccaaaaaagcacctcgaggggcaaccccaggtgtgtggtcggacccaaaacaccgacagctggcgcgccaggtagggggtgtgtcaccgatccaagctagctcaatggccatcacctttcagcacaagatcactctccgccttggatctgtgttctgcttcggaaccatttcatccgtagcagatgaagaagggactctacatcgtatagcggatccgccggagaaaaagccttccttgatgatctccgggaaaagccggaacaaagcaggaaaaaacacaacctccagcgctccgggcgaagactacctcctgcaagccaggagcagaggattcgttcacccgaagaaccccgctgtccacttcatccacggaaaaatggacacggatcacaaggaaaaaagaaacaaacgagatgaaagcccgtcaagctgcccttctggtacctccgcccccaaaggagaacagaaagaagcttgtcgtcacgacaactccgttctaccccgacgtcctcttcatcgaggggagagtggaatcatcccctgtctccgacgatgaaccaaccatacccagggaagaacctcctcagcaggaagctcaccgacgaaggaaccgacgccgtaatgtccgaagacatcatgcagtcagagaatgagacccagcgcagcctatatcacatatgagatctcggaggtgggagaaactctagatgaacgagtctttagggaaaggaggaactcccgccgacgcgatcgtcggcaagctcaagagcaagccgagcaggaggcaagacagcgtcgagagaaccctctcttcggacggaacttgaaccccgacttcacccgagccatgaacacaccgagcgaggtcggtggagtgttggctcggatagccgatggcctcccccggactccggacgccgagggctatcggtggctgctcactcaggcaactaatcatctccttcctctcgctcatcctccgagcgatctacgacatgccatcaatagtcgacgggatgcgcggagctccatcaatgcttcacgtgaacgacgacatgagaacgagattcggcgccgagaagagtatgatcgagatcacagcatccctgcacgaagtcaggccaccagggttgagtcggcaacagcttcaactggcggcacgacccggggacggtcgaggcagcactgttggggcgaaggcaaaggcgccacccctcgctcgaagtcttcgccgataaccgctggtcagacagggacagagcaggcagggacacccttcgcttgatcggcaccagacgaagaccgtcgtcgcagtcatcccacagtgcggcctcgtccagctcagaggcccacgtgcgttccggcccattgtaacgggccctgcgtggctgccacgaattacgggcctgatctgtaaaggcacccctgtaattacagtctgtaaccccactttatgggaatattctggggataacctaggtagctgagggcacatgcgtccttagcacaaggcgctgggcgctcaggtacctataaatacccctgtacagtgcccgtgggaggccagatgaacagagctattgcctcctagcacgtaaccctgttgtcaccacaattcacccttgttggcctccttgcgtttgagagcaagttccaacatttggcgcccaccgttcgtgctacgacaaaaccacccgcgatggcacccaagagagctaacccgaaggctaacgaggctgcgaaggcagcactgctcgccgcaagaaagggcaaggccctcgccctcacccaatccacccaccaagagcccactgaagacaatgttccccgcacctgcgaagacgacaccttccgcacctgcgggcccgaaggacaatcgcagccgcccccaggcttcgccccactggaaggtgcggacctcaccgaggacggtgaggtcctcggcgtctcaacggaagaacagctacagctgcgcgccctgcgcctcaagaaccgcaatctccagaggcagaaagagatactggaggccaagcgccagcgtgtgtccgcactagccaaagtgcggcaaatgatacgcgacgaggagcagaaggcccaagacctcgagcgcgagatcgcgctgatgcagcgcgaaggccaccttggcctgcagctagagccacccctccagccgtgagcacaaccggaagacacgcgcgaaggccacctcggcctgcagcatgggccacccctgcaacaccgagcacaaccggagaacccgcgtttcccccagcgtgactacaccttccagcacggcgcgccattccaaggggtcaactacctcgacgagcgaagtcccctggcgccacacctgcaagtgacgccttggccagctaacttccgagcagggacctatcccaagaacaacggcagcaccgacccggcgcaatacataatgagctatcaggtcgccgttgcatccgccggaggggacgacgccacaatggcgaagtctttcatcatcgccctagagggcccaacactcacctggttcaccagattgcctccgctgtccattgattcatggagaagtctcagggacaagttcctgctcaacttccaagggtaccgcccagacaccgacgccttggccgagctctcgctttgcaagcagctggaaaaagagactctgcgggagtattaccgcaaattcttaacactcaagtcatagctgccctccgtcgatgatcagatcgctatccactacgccatcagtggccttcgggccggcgtcctctacagccactgtatcagagatccacccaagagcctccaggagctatatcagctctttgaaaaatatgccaaatccgaagagctccaccagcgcaaggttgagtcacagcggaaacccaaagacgccccacagtccagccgcacgtggacgaggactccgcagccagactccgatcgagatggccgcagtcagcagcaagtgcacaacatcgccaaccagcagcctgctgctgacccccctcgtcgccaggaatatcccccccagggccgcggaaatggaactcgtggcaggggccgagggcgcgcacagccgccacgccgattctactgccttttccacggcgaagactgcgcccaccaaaccaaagactgccccgaaacgaaggccaccagagacagaatggcgcgggcgcagccagccgacaatcccagaattgtcgcgcataattaccagccaccccctccaccatatatccacgctcccgccccgcatccaccgcaccacgcttaccaacaccatcaggaagtacaaatcgtacctcctccacccccaccaccacaacagcaacatcaaaacatcccccatgccccaaagcaggaagacttcgccgatcaaccatatcgcggagtcattcacatgataacaggggggtccagcgctgacttcgacaccaagcggcagaagcgggaccactaccgcagcatcaaccatgtcgccgtcactggcccagtggtgcagacaaagtggtcccacataccgctaaccttcgacgcacgagacgtcgacctgcgcagcgccccccacatcgacgctatggtcatcaattgcagcgtggcaggctgggacttacacaaagtcctagtcgacaacggcagtcaggcggacatcatcttcctccacgccttcgaccgcatgggtataagccacagcctgctcaagccttcggacaacccgttgtatggcttcggcggcaagggcacctttcccgttggcaaaatagagttgcccctctccttcggtgtagcacccaatgcccgaagtgagcaagtaaccttcgatattgtcgacatggtatatccatacaacgccatcatgggccggggctccatcaataagttcgaagctgccatccacggactgtacctatgtatgaagacaccaggtccgctaggcgctattacgatctacggcaaccagcagacggcgcgcaacatagagcgggacttcgtgcctggtcagaggaacgtgcactgtctcacgacccagcgcgaggtccctgcgcccgccagcccaaccgataagcagcacgacaaggcacagttgcagagccaagacgggaccaagactgtccccctcgatcaggccacgcccaagcagacattcactatcagcgaagaccttacctcacatgaagaagagaagcttctctgctgcctggccaagaataaagatgtcttcgcctggtccgccctcgacctggtcggagtcagtcgatccataattgagcacagcttgggaattgacccttcggtgcgaccaaaaaagcaaaggcttcgcaaaatgtccgacgaaaagacagaggccgccaaggcggaggtgcaccgcctcctagaggctaaattcatcgagccagtggcttaccccacgtggctctccaatgttgtaatggtgcagaaaaaaagcgggaaatggcgaatgtgcatagacttcaccagtctcaataaggcctgcccaaaagacaatttcccgttgccacggatcgacaaaatagtcgatagcgcggccggatgcgaggtcatgtcactcctcgactgcttctccggctatcaccagatatacatgaaggaggaagacaaggctagcaccagctttataacacccttcggcacttattgcttcatcagaatgccggagggactcaagaatgccgggtccaccttctccagactcaccaaaacagtactcgaagggcaggttggcagaaatatatttacatatgtggacgacatcgtcgtcgccagcaagaataaggaggaccatctcgccgacctcgccgagacattcgcgaacatgcgagatgcacgactccgcctaaacccagaaaagtgcgtcttcggtgttcgccagggcaagatattgggctacctggtgtcacaccgcggcatcgaggccaacccaaccaagatccaggccatcgtagacatgtcgcctccgcagtccgccagggacgtccagcgtctgacaggcagattggccgctctcaacagattcatctccaggtccgccgagcgaagtctccccttcctcaaaacactccgcggtccaaaagacttcgcctggggaccggagcaagcagcggccttcgcctcactaaaacagtacctgtcggagctggccatcctcacaagccccgactcttcgctccccctactgctctatgtcgcggcttcgccgcacgcggtcagcgcggcactagtgcaggagcagacagttgagggtgcggttagacagtgccctgtttactatgtctccgaggtactgacaccgtccaagtgcaacatgacagagctggagaagatcgcctacgtagtcgttatgtcctcgcgcaaactgcgccattactttgaagcattcaaggtccgagtcacctcagacaggggactcggcgaactcttcagaaacccggaggcatcggtgaggattgccaagtgggcagccgaactatccggctaccacatcagcttcgagcccaggacagccatcaagtcacaagtcctggcagacttcgtcgtcgactggactgggccaataacacagccagacccgtccacagagaaggtttggactatccattgcgacggcgcatggtgccatgcgggggcaggcgtcgctgcagtcgtcacctcaccagccggagtcaaacacaaatatgcagcacgcctcagcttcgctctggaatccgacagatgcacaaacaatatagcagagtacgaagcggttatcctcggcctccgcaagctaagggccctcagagtcaccacatgtatcatcaaaacagactccaagatagttgccggccaggtcgagaaagactacgcagcaaaagaccccgcgctcatgcaatacctagcggccatccgaagtcttgagagacaattcaaggggttcaccttgcagcatgtggatagggccaagaacgaggaggccgacgcattggccaaggccgccgccaggggcgagtccttgccctccgacgtattctttcacatcatcggcatgccagccgtccggagccccgaagggctccagataactaatgatagcgagggccaccgcatagtcaacctaatcatgaccgaggactagcgggcaccaataaccctgttccttcaggggtactatcatccaaccgacgtcagcgaggccaagcgcctcagacatcgaagccgggacttcgcactgattgagggccaactttacaagaaaggggtcagtcagccaatgcttaagtgcgtcaccgaaaccgaaggcatccagatcctacgtgaagtccacagtggcacgtgcggctcgcacgcagggccaagggccctagctgccaaggtgatccgccaagggttttactggcccgcaatgatctgcgccgcaaatcgggtcacaaggtcctgcgaagcctgccagaagttttctcctcggtcaggcaacccctcgcagtatacaaagctgattgcccatacatggcctctccagcgctggggcctggacattgtcgggcccctgcccaccgctcaggggaaccttaagttcgccttcgtagccgtcgaatacttcaccaaatggatcgaggcgagggctgtttctacaataacatcaaagactgcccaaaaattattctggcaaaacattgtttgccgcttcggagtaccatccgaactaacagttgacaacggcaagcagtttgacagccaaaatttcaaggatttttgtttctccatcggcaccaagcttgccttcgctttagtttatcatccgcaatccaacggggtcgtggagcgcgccaatgggaaaatcttcacagctgtcaagaaaatgctcctcgatgaaaaaaaaggcagatggaccgatttgttacctgaggcagtctgggcgctaaacacaactgagtgcagggcgaccgggttcactcctttccgccttctatacggatcggaggccatgaccccgcaagaaataaagcatgggtccccgcgaacagttccgtcagccgtccccgacgtggacgagccaacttcaaaggatctcattgacggagaccgggtcttcgccctacaggccctaaacaaataccaagcccagaccaaagcatggcgcgaccacgcggtcatcccgagggagttcatcgaaggggacctcgtactcgtccgaacagctcggacggagtccaagggcaagctggagcccaagtgggagggcccctttatagtcaagacaaaagcttcccccagcgcttacaggctcacaacgccaaacggcgaggacctggagcactcctggaacatcgacaaccttcgcaaattttttgtttgactcattagggctgatttcgcccttgtaattcgccaaaaacaatcttgtaccggcccgcactcttttcctcccggggggtgaggtttttaatgaggcggagccatgtaatatatgtgagaaaaatccccccgcaaaaacttgcgtcgaaaaaagaccgcgacgacggtcttcgacattcgaccaattcgaggtcaccgcgaggctaagcgctagccaccctcgcgtgcgacgaatccgcgcagaagtcgcctaagggtgcagccggactagcacaacaagtgcgaaaaaaccgaagtctaccgcgaagactattcgcgcagaagccgcctaagggcgcagccggactagtacaacaaaagcagaaacgacagcatcaaaccgtccgcgccaagaccgactacaatcacaccagcacagcataaccaaacataccagacaaagtacacaacgccctcgcaggcacaggcaagcgagggcacacaacttcatcgtacaaacctttacacatatacaagcgagggcgccacactctacatcggctcaaccttaggaataattcccatctccctataattaaataacattatcctaagctcctcacccgcaatccgatagggtgcggcgcttcgggaaacccgcaatccaacagtacgccgtccatcaacggtcacatcaaaaacccccgcggaaccacttcgagcgagggcagcatctccgccatctagcgacgtcttcggcaccaagtgactttgtcgaactggtccctcggagggcaaatgttggggcgaaggcaaaggcgccacccctcgctcgaagtcttcgccgataaccactggtcagacagggacagagcaggcagggacacccttcgcttgatcggcaccagacgaagaccgtcatcgcagtcatcccacactgcggcctcgtccagctcagaggcccacgtgcgttccggcccattgtaacgggccctgcgtggccgccgcgaattacgggcctgatctgtaaaggcacccctgtaattacagtctgtaaccccactttatgggaatattctggggataacctaggtagctgagggcacatgcgtccttagcacaaggcgctgggcgctcaggtacctataaatacccctatacagtgcccgtgggaggccagatgaacagagctattgcctcctagcacgtaaccctgttgtcaccacaattcacccttgttggcctccttgcgtttgagagcaagttccaacaagcacatcgacaactcccctccccgggaccgacatcacaatcgtcggcaagaggacacatatggagtatcagcgctcactccgcatctcagggccattcagtggccccctaacttcaaagtctccaacgtcgacaagtacgagcctaagcaggactcgggaggctggttggccgtctataccaccgctgcccgggccactagggcaagtgaagatgtgatgactgcgtatttgcccatcgtcctcgggcaagatgcgctgcaatggctacgacacctaccccgacactgcatcgacgactggagcgacttcagtcggtgtttcatcgccaacttccaatctctctccgacaagccggcgcaaccatggaacctcaaatccatcaggcgccgaggggatgagactcttcgttcgtacctcaaaagatttcagaccatgagaaatcgtattcctgaagttgcagaagcagcagtgatcgaggacttctaccggggatccaatgactcggccttcgttcgagccatactgcaaaaggctacacctacgagcagctgtttagggaagctgacctctacatcaccgccgacgaacgggctcaggatctcatcggaggaacaaagcctacaccgccggcaccacgacgtgacatgaaccagcaactcgacaagcgttgggagaagcggcctcgcgaagaagtccacgccaccggaccacccgtctctcgtgctcgaggggcaccccgtggaggcaaacgaacattggacgacatcctcgacgcccaatgtctgtgccacaaggacatgcgccacaccctccagaattgcagagatttcaagcactccatcgggaacggccgaccgttccaacctttaccacctcccccgccacgaggaggacccgaagaacctcgacaacctcagcagcaggaagggggaggaggtggagcattcccccgcgtcgacagagaagtcaacgtcatcttcgatggacacgagtcacaagagagcaggaggcaacagaagctcaacgaccgtcaaatactggtggcggccaccggtcctcccaccccgtatcgatggtccgaacacccgatcaccttcactcaggtggatcaatggctcaacttcgatcatccgggcaagtacccgctcctcgtcgatccggtgattcgagagagcaaggtaaagaaggtgttagtggacgggggaagcagcatcaacgtcaccttcccccggacactcctaggcttgggagtcgcactcaaagagctccacgagttagacactcctttcttcggcatcgtgccgactgaaggagagtacccactcggacacatctacatgtcagtcaccttcagaactccggaaaactacagaaccaagttcctaaggttcgaggtagcaagcttcgactacggatacaacgctatcatcggtaggccaggattggcgaaattcatggccattccgcactatacatacatgatattgaagatgccgggactgcaaggaatcatcaccgtgcgtgctgacttccaaggcgctgcagaatgcttccgagtggccattcaggcggccctcaccaccaaaccaacgatgacttcttccgcacaggcgaactcaaagcctgaggaggacctcgcggtacctgcaaatgaagctcaagccatgacctctatgcggccgactgaggaaacgaaaagaatcaacctcgggttcgctgatgaacgcaagaccgccatcatcagctccagcctggatgacaaataggaaggcatgcttgtccagtttctgcaagataaccgagacgtattcgcatggcaacctatggatatgtcgggagtcccgagagagctggctgagcacaaactgaaggtctatccccaggcgaggccgatccgacaaaagttacgtcgcttcacgcccgacaaaagagaggctattcgcgccgagctagctcgcttagtcgtggcaggattcattagagaagtactgcatcctgagtggttagcaaattctgttcttgtactaaaaaagaataaagtggattggcgcatgtgcgtcgactatatggatctcaacaaacactgtccgaaggatcccttcggacttcctagaatagaccaggtggtggactcgaccgccgggtgttctgtgttgtccttcctggattgctactccgggtaccatcagatcagcctagaaaaagaagatgaggaaaaaactgcattcatcaccccgtttggagctttctgctatacctccatgccgtttggcctcaaaaacgctggagcgacttaccagagagccattcaaacatgcttagccgatcactggggcaagcgtgtagaagcttatgttgatgatgtggtgatcaaaatagaaaatttagaaaacttcattgaagatctgcagctagtcttcaacagcttgaggcggtattggtggaagctcaacccagaaaatgtgtcttcggagtaccagcagggaaattgctcggattcattgtcagccaccaaggaattgaagctaacccggagaaaatcgaagctatcatgagaatggaagcaccacgatcgcagaagaaagtacaaaggcttactggatgcatggcagctttgagcaggttcatatcaaggctaggagaaaaaggcttaccattctacaaattgctcaagaaggtggacaagttccagtggaccacagaagcacaagaagctcttgatgcactgaagaggttcttgaccacgccgctagtgctaaagccgccacgccgagccacgccagaccagccggcagaagatctgttgttgtacatctcctgcacgactcacgtggtgagcaccgcgttagtagtcgagcgggcagaagaagtcacacatatccagtacagcatcccgtctatttcatcagtgaagttctgggatcctctaagaagaagtatccccaagatcaaaaactattgtacgcagtacttctaactgctcgcaagctctgtcactactttgacgaccacaaagtcatagtagtcactagatttccaataggggatattctccacaacaaagaagccattggaagaatagctaagtgggcctgcgagctgggagctcatgacattgagtttcggcctcgcatggcaataaagactcaagcactagttgacttcgtatcagaatggtccgagcaacaagtaccaaataacctggaggctgcagaagtatggcagatgtattttgatggctcgctgaaattgcagggagcaggcgtggggatcctcttcattgcccctggtggttatcaactcaaatatgctctacagttgttattcccagcatccaataatgcagcagaatatgaagctctgatccacggattgaacattgccatatccctgggtattaaaaggttgatggtatacataaattcactggtggtcataagtcagataaataaagaatgggatcgctcgaatgattctatgggcaagtactatatagccatccaaaacctagaatacaaattcgaagggctggtatttcatcatgtggaaagagatcgcaatgcagcagcagacgcattgtcgaaactaggatccagtaggactcaggtcccacctggagttttcgtccaagaggtgccacgcccgagcatttccttagatcaggtggaagagcgcaatgttttgagccagctagagtcagactctaatgactggagggggcctatcatcaggtatataaagaacgaagaagaaccggatgatatagccgcagcagaatgcatcgcacgacagtcagcccactacaccctcattggggacgcactatacagaaggggcacaacaggagtcctcatgaagtgcattccttcggttactaggaagcaactgctagatgagatccatgccggacagtgcggaatacatgcagtatccagaactctagtcgggaaggtcttcagatgtggtttctagtggccaacgacaaagagtgacgcagccgagttagtccagagatgtgaagtttgtcaattcttatcaaagcagcagcatttaccagcacagcaactgcagaccatacccgtaacatggccatttgcgtgctggggactggacataatcggacccttcaagaaagctcagggaggctacactcacgtgttggtcgccatcgacaagttcaccaaatggatagaatacaaacctattgcttctctaacttcagccaaggcagtggaattcatacatgatataatattcaggtttagaataccgaataacatcataatagacctgggatccaatttcactagctctgaatttttcgatttctgcgaacatcggagcatccagatcaaatatgcgtcagtagcacatccaagagccaacggtcaggtagaaagagttaacgggatgatactggaagcactctggaagaaagtcttcgataaaaatgaaaagttcacaggaaagtggatcagagagttgccatatgtggtttggagactaagaactcaacctagtcgagccctgcatgggaatacccctttcttcatggtctatggtttgaaggccgtgctacataccgacctcagatttggggcactaaggctgatcttcgaaaacatagctgaggcagaggctaccaggctggaggatattgacgtactggaagaagagcgattgaatacagtaattcagtcagttgggtaccagcaaaccctgaggcgctatcatgataaggctatacgacatcgatccttcgtagtgggatacttggtccttcgccgaattctaatgggggaaggacaacacaaattgtcaccactatgggaagggccatttgtcatagcagaggtcactcggtaaggatcatatcggcatactcaaatggatggcatggaagtagggaattcatggaatatagagcaccttaggaagttttacccttagcaagatttcaaaagctattagggcagcattgtattctgtaactgggaaatacatcatcaataaaaagatttcattcttaagggcactcgaactgtttattaccaatcaacacgcttactcgacttagggtgaccactataccctactaatggagcaatcggcttaagtcggcaatgatttaagacggtgcaacatgctcacgcttactcgacttagggtgaccactataccctactaacggagcaatcggtttaagtcggcaacgacttaaggcggtgcaacatgctcaggcttactcgacttagggtgaccactataccctactaacggagcaatcggcttaagtcggcaataacttaagacggtgcaacatgctcacgcttactcgacttagggtgaccactataccctgctaacggagcaatcggcttaagtagacaatgacttgagacggtgcaacatgctcacgcttactcgacttagggtgaccactataccctactaacggagcaatcggcttaagtcggcaacgacttaaggcgatgtaacacgctcgcgtctactcatcttagggcgatttccatgccttaccgactgatcaattggcataaattaggaaaagattccaaaaccagcacgtcgcacttacttctgcatgacaactgttgaattctaacaacaggaacaaaatgttatagcattcagcaccaagaacacattctaataccctactaatattcgagtgcattgatcacacacacatatagttcacaaacgcattcagtatcttctaaacacatcaaaacatctctacttggcaatatctttcacaggagcaatcgaggaggaaggacgactcgaggcgtcaggagtagccttgacattgacaactatatcgtcaggaacaactacaccgggtcttctcatcagattcgccccgcgcgaatggctttgtccatagccttgtcacgctgagcctttagaatggcacagttgtcctcagcgactttagtagccagtcgagtagcctctagctcctgggcgactgatttcttggaggcacgcaaatccttgatgatggagtccttgctcgacaccaactgcctaagccgcaggatctcatcctgggatacttgcagctcacgacgatgatgatctagatctgtcgtggtaaagcggtggctcctctccaagatggtcagagaattgttggcgtcacgatacaacctatcaagattatcgcgagaagtcgcaagtgctcgtttctcctcctgcagacaagaatcagctctcaagtatccagtaagcagtaaagtcaaggcagatccagtcaagtaagtttacctcgttagccgccctttcagagtcaagctgagcattaagagaggaattcaaagaatttgcgtcgtctaaagtagtagaaacccgggccaggtcgatctgaccttgggaatacttctcctcaagctcagagtactgccggtgtcgggtaccgtaattaggggtacccctaatgctccttaacctagctggaaaacatcttcagaacaaatcgcaaaaactaataagcacgattcaagtcagggcctcgtctaccaagggacgcgacctcatccgagcccagcctcggcctcgggcgggaacagtagtcctggccggattcacgcctcgcctgagggcctcctcaggcagtgggcgcaccctcggctcgcccgaagcccagctcgggcaaactttgtcgtacaagcaacctcggccggatcgccctaccaaccgaccctatcgcatgcgcatttaatgcgaggatcgcctgacaccttatcctaacacgcgtgcctcagtcggtaaggtcgaagtgaccgcagtcacttcgcccctttactgaccgctctgacaggaaaacaacgctattcaccccgttccgactactgtgccaaccaccagggtaaagctgagtcacgacctcccccgagttcagcctcgggcgcaacaaggagctccgcctcgcccgaccctaggcctcggccttagcctcggcctcggaagaaggtctccacctcgcccgacccagggcctcagcctcaacctcggcctcgggaggagtcacgacctcgcccgaccccagcctcagcctcaggagaagtctccgcctcgcccgaccccggcctcggaccgactacgctacaggggatacatcattaccctaccgctagctagccaccccttgctacgaaggaacaagactggagtcacatcaaactactctgatggtaggtaatgatggttccccgcgtgcgaccatgacgtcgacggctctcagctccttacggaaacaaggaaacatcagtagggcccatgtcgcaccgccagctatgcttctacagggctcaaggcacttctccgacggccacgttagcacatgtacagggctcaaggcacttctccaccagccacattagcacatagctacacccccattgtacagctgggccatctccttgtatctataaaaggggatgtccagggccttcctaaggcacgttcacatagagggacgcacacgcagaaacgcaaggacagggcaagcgaagagaggcaggtagagtaggagagacgcggtgaaggctaactcagacgcctcacctcagggctagactccctctctctctctgactcactctctctctctctctctctctctcgctctcgccctcgctctctcgcgacgcttgtaacccctactacgagcaccccggtgcaagataatataagcctcatttcccactcttgtgttccatcttgcatcaacccatctgggtaggggcacgcagcgataaattcactggtcggttgacggttctcgcgggtccgaaacgccgacagccgggttgagttggctcgatgttgaagatgtttctcctcgagttcagagtactgccgggtcatatctgacaaaaagcagccgaagaaggatacacggttaaaaacaaattaatcagtcagccagggaagaaacaaagatgtcgaccagcatttgacactttcaaatcagttatctgcttctggagcagcaatggattccactgcgtcatagacagagctccttctgggatagaagtgccatatgatttcaattgagcagacatcccatcaaccaaagcctgttattaaaaacaaatgagtatgaagaaaagtgatttaccaggaggaatgacagaatgaaaaaagctaatttacctgaagattagaaaagaattaaggcaatcccaagtcatgagaagttgtgttataactcgacgaaggaggatcaactagaataatctgaagagcatcgtcggggtttgattcagctccactagcagatatcagaattctggcatccggtgcgccaacctctaaggtgactccctcacttgaagctaaagaagcatgcatcgctatcactccatcagaacatggtggagacgacccgacgtggacatccatggaggtatgggaaggagagctagctcggacaccctcgggggctgggttgcagctcgcactacccatcggagccggatcactaccgacaacaccctcgggggctgggttgcagcttgcgctacccacccgagccagatcactaccggcgacaccctcgggggctgggtaatcgccagcaccacccttaggggctgggttctctgcaacagccacctctaaggctaaaggatcctcagtcacttccataggagtcagacaatcttgaccaacctcttggcaccgaagaccgccttccaaggtcgatgatgcacgagatgctgcccgggatacctctaatcccacatctggaatgtcagagcaaacacccatcatatcaccatcagtcggctctgacggcatatcctcaggaatgacatcctcaagggcctgatcaaaatctgttacagataattcttgcaggctaacaagagcaggcagagctggagaaggaataccactattccccctgctacctccataacgccggctattcttgcgaattagtggaacttcttcttcctcttcttcgtcctcgtcaaagatacggacaatagatggtgcaggaacacacccattagggtcaacttcaacagaaacacacccattggggtcaactggtgcacagtcacacccattggggtcagtttcaacaggcacaccaccaatgggattaactccagtaaaaaccactgctgatacttcttcagagacaggaacagaaggtccagcgtcctggtccaagcatgacaatcaccaaagtcatctcttcttcttctcctcctcagaaggtgcagttggacgactgacctggcgaagacgctttgggtgagtaccctaaggcttttaggtttccactgttcgatcaagctctggtataactgcaacaaccattgtttcagcaggggccgagtcagaagactctccagccaacatatcaagcatatcatttatttctgcatcacccggactcgctggcatctcaaaatgaacttgccgctcatcattggggagatcacaaagagaagcaaccaagacctcaatatcttcgagagaaggtcgcactctaagacctagaccactatcaccagcaggaggattggacacgaagttgaaaaaggacttagcaggtggcagattccaatcagagaatgcaacaggagcaccaacatttgatactttgcctctcaagatcatgtctagccggctcaccagatccttggcaggaatcctcctatcagtaaccctggtcgagtcggtgacaccactatacaagtaagctgggtatgctatgtccttcaagggctgaatattcttaaaaacaaagtcagtaaccacagcctcggcggtcagacctctctccttcagtagacagatttcagtgagcagagtcttagcttctgttacttccaaggcagtgggagactcaatccaactcggagtgtgcacatctggctgtctccccgactgagggggggggacttggcatggttttccacaataaaccactctaagcgccatcctttaatgctgtccttaagtgggatgtcaaggtattccgttttcctcccacggtgcatctccagactcgcaccacccacgagctggtgctgccccctgccatcccaagacgacagtgatacaaatatttccataaaccgaagtggggaagaattccaaggtaggcctcgcacagatgcacaaagatagaaatttacaagatggaattgggattcagatgggtcaaattcatattgtaaaaatcaaggagaccgcggaagaagcgagcaatgggaagagcatggccgcggaggaggaaggggacatagataacagattcatgggtatcctctgtcggaacagtaaccccacgacaaatccgccaagaacaaagctccttcggaggaagaactccaacatcgacaaggtggagaagatccgattctgaaacgacagacatatggttacttgtgaaaggcaactggctattggggtcgatgggaggaatgaccaccgcagcagaattttggttcttccgcttgggcgccatcgcaatctcgtcggtaggctgaacggaagcgaaatcagagggaagcagaggaatgtttggaggcagaaaggtgaaattagggctcagaacgcagaggcttgcggcgacgtgatataaatggggttttcccgggtcagacatcgtttctaaaaagtgctaagtcatcactcgggtaaaacaagacttcctggtataactcggctgttacctctaaaacgccgacgtagcccagagtaactcggctgttacctctaaaacaccgatgtggtctggcataactcggttgttacctctaaaacgccgacatggcctagcataactcggctgttacttctaaaacaccaacgtggcccagcataactcggctgttacctctaaaacgccgacgtgatctagcataactcggctgttacctctaaagacaccagcagtaactcggtcgttttttctacgtaaatgctggcagaatcaaatgcgattcagcaattaccaatcgttactcagtcgttatctctaagaacaacgacagcgctaggcatgaatacaagctgtcgattgactataaaagaacgatggaaaagtgaaatatatgctcagaacaagccaagattttcttcattatataaaagggaagttcttccacaaactcaaagaccaactcattatgagccggccttcttcccctttttcgctacattacactactacactacactacttccactaatactaatactacttcaactactatttatctatactaatatttaagccagtggcgctttgccactggccttgctgctgccactgccaccctcgccgctgccgccatcgcccttgccgccatcgccgtcgtcctcgccatcgccgtcgccgtcaccaccgtcgtcgcctccgtcgccgctgtcgccctcgtcgtcgccgtccctgccgctctcctccccggacgagtcggaggagttctcctcgtctgaggagatccccgactcatccgagcattcgagcccggagcgctcaatggcgcagatgtacgtctagacctcggtagcgatcccctatgaatcgtccaaatcatcggacgacgccgggggagaggtgtaggccggcgacccctcggactcggaggaaaactcctcctccgagtactcagagtcgccgaagtcctccgagggggactcggctcgtgcttccgcttgtcgccagaatggtgcgatgaacttccgcccttcttgctcttgcccatggttgagtagaagagaagagaaaagaggagaataagcaacaaacggtcgagagatgtgtgaagacaccagcgaagcaagcactctatttatagaggcggaaggcaaccactcatctcctaccatggtcactgaacagtcgcaaatattcaataagccattcaaatcgtctggaaacaagtcaggcggcagacgccgtttcatgtaacacgacacccattgggactgaagtcaactgcttggacgatatgattacaccccgcggtcacgtcaagttactactcaagggcagtttgctaaacgctcagcgcaccaaaccatcgcttggctacacccattgggaggacgtccaggaattttcaatagattttaccaagaagtcacatccatactgtatgcgcaatgaatgtaccaagacagaaggaagatatcgatagagatcagaggaaagccaaaaatagctgatgaagtacaagtctaatcaacagaagcattgaagtacgaagcgaagtgaagaccagccaagagccatctaccggacgtccaatctatcgtcgatcaaataaatttcaaacctaacaggacatgggaagaccgcgttgctgatctcaaaggcaagaattaaagaccacatgctgacctctaaagtataagctgatgatatgaagctgagttctaagtcatgagacgaagataaaatgatgatttctaaaggcatgaggtgaagacctttgagtggattattttcagtaattcactcaaagctcgggggctacacccaattaatcgttaacctcaaaagacagaatgctgatctctaaagcatgaactaacgacaaaatgctgatttctaaagcatgaatcgaagataaagcaaagacttctaaaaaagcatgagatgaagacctttgagtggattattttcagtaatccactcaaagctcgggggctacacccattgggtgcacctccggtgcacccaatgaatcccgaaccctgagaacagaatgctgatctccaaagcataagccagagatagagtaccgatctctgaagaataaagcgaagaccgacgaataatgtcagaagaggataacagaagatcgcttttaccgagctactcatagtttggaaacaacgactcgacacacatattttcaaagcattccttaccaaaatcaaaactgcaagctggacctagaatctttgggccgattatttctaaatcaactcaaagattgggagcttatgggggatagatatccctcgggtccactagaaggcaagaaggcctcgcgaaaggcctcgggcccattatttcgtaaggccgtcccttcgtgggccaggggaggaacttctggcagaatggatcgacacaagatcgaatcaactcgagcccatgcggctcactgaattcaaacgttatccacagcattgatccgattctcccacgcagcgccctcagacgttggaactaaataaagataagtcggcaggattataggaagataagctcagtcggttcactattacttaggcgcacgttgttatcatattcgcatgtaatgccccacggtcgagtatataaggcctagggggcaccccatcaaagacaactcactcattagtcatttacttagctctctagcatccttcatactagagaactcccttgttactcaccacataaaagatccacaccaggatgtagggtgttacgcctctcaaagcggcccgaacctgtataaaattgtccactgtctctcgtgcatctaacacgaaccatcgagctacagtcggtaacaccgtcctactccaaaaaagcacctcgaggggcaaccccaggtgcgcggtcggacataaaacatcgataagaacgcaaggctaagccgtgccttttcaataaaaactaaaatatagataatgaataaatatattaaaaataataaaaaggggaaaataaaagaaacttccttgcatggcttgctgtgagtgagcaaccgtgatcggtcggctataacgcggggacgacgggacgaatggatgttctcttcgaaaggcgcacttcttcccgcgaaaagctacacagtaacgcactcaagcgttttttcgcgcccaagccacgcacgacgtccatcgtgcgtataagtttctcccctgcagttactgtggtgcctataaataaaagggtatcgctaggttgcgagaggaggatcctggaaaagagcgccgtcaggctgtgctgttctcagttcatcgctgttgcacctagaaactgctgctgcgctgttaccaattgccgctaggctactcagtaaaaacaaaaatctactgtacatcgaagccatcaagccgctctctgttttgtgttgcaggtggtcatcccaggacaccaccacggcaggagtgc

SEQ ID NO: 1080 - DNA, 3414 bp, Zea mays
  Intron number 1 from transcript GRMZM2G147046_T01 (locus G RMZM2G147046) derived from phytozome v7.0 (chr-ID 5; pos 7 598449 to 7601862)
tctggagctccgaccacccaggaatcgacctcacggtacacaaccgatccccctttccacagccgtagtccaattctgcgcggctaaactcgatcggaggatcgtgtttcgattgggtttatggtttgttttgatggggatctggccatggggtggaattggattggggatcgggtgctttcatgactcgtgatcccctgacgcggtctcttgtttatgtaccgcaaggttggggatctaaaacaaatatttttatggctggcgtaaggatttatatagtttagcttgatgaattagagtgttcgctgcataggagttgattcagtaatgggtttggtgcaatgttcggaccctttttgcggaatttcagagaatagccactgctttggtatacgatctgctgcgggtgccttgcgagagccagccctgaatcgaagcctaggtaggcacagagtggagaaggtcctaggtaggcacagagtggagaaggtcctgaggcactctcctgacggcaagcaagtatgcaagactagctcacactgctgttcaccaaccatgcgatgctccggcctcaggcagcttcagctgatgagggaaggcatgtccagaggctactacctgctcagcgccttcaagcgccaaggccttgtgaacggaagtaggacacgatgttagcaatgggaagggaatccagaggatagcagagagggagcagaggtaggagccgagaatgggggaggaactagagacagactgtattgtttcagagtaaagttcatacatggttgttcctactccccaagccaacagcatatatgcgactacttaggaacatgcctcaccaaccggtgaccgagggacacagccccacgcgccagagacttacccccagacaggaccgcaacaacaaggctgcagttagttacacccactcaggacctgcgactcgaacattagtgtgacgcacgcgtcttccacgctcaccgggatggagttccttctatggagtatctgacaatggcggtgtaacattttttttcttgaaagcgcaggagaactgtgcgatattatattaaagaagagggacagatacaagaaaaacaactggagcccctacggcggccagtaacaggcatacagaaacccatccatgactaaagaaaactaacaagaactaccacaatgctagctaactagcagggaggcccggaatgggggcggtgagcaaagacaacttctttgcaccagccatctcccacaggtgaacctccaacccaactcttctaatagcatcagcaatactggggctcttattgtcaaaaacacagccattgcgctgcttccataaccaatggcggtgtaacattccctcctcaaaattcgacatgccctcaagtcgatgcagaatctgagcacatccaggatcctgatgcccggagtgaagcaacatgtgttccaaggtcttgaactgtaccaccggcactagttgcacagccaaacgcccaagcttttttcaagaagcttgttctgaaactttgttcccaaaatatgtatcttcaagcagttttagagtcaagaaagtctttcacagaattccctggtagcttgaaactggcaccagcattcgcaacaaacatctgatgcaacgtctttggataatagtcaactgtctcttgccaaccatcatctataatcagaaaccttggtggcacaccaccttcacgccgactttgaaggtcctcctcaatcccacatggttcaacagctttgtaaaatgcatcccatgtgcaccaccaaaaacagtccaaatttgaagggatcgtcgtgtcctgtatgtgactgaaagtctgaatttgccacggtatctgcagtatcttgtgctggcaatgtaacaattctccattagccacgcgaacctgcaatggagcaaccaccagatccacatgctggaaccatgcacgaaacttctcatgcaagaaggtatgtggactaccactatcgatcaatatcagaactgaatgattctgaagttggccttgaaatttcaaagtttgagaaacatttgtacctccccaagcagccagagatactaacataaacagctgctctgtagatgaatcttctggactctgtccttcggttttagttggatcaggcaccaagagctaatggagtgctagatcgggttattggatgtctcaatggtattttaccttggcgtgacattttggtggcattttacgatttttggcaactttccgtgcttgagaactaattttccttttcacttattgcattactgatgttttcatttgttgccctgatttttgtcttggagtgctcctatatccaatatgtcaccaacatcgaggttgagggccttggcactatgtcatctataggacatgtttgggtcggcttttggccgccaaatacttcgtttttcagtctgcttttgtgagaatcgcttctgtgaaaatcgtccaaatcaacatgaatacaaaatccactgagtcgtcacaacaggaggaattcgtcgcttccttaatcctaaatcttacggaccctttcatcttcttccgcacgcaagccccgcgatatctagattctcgtgacagatagattatccacgaatccatattcttagaatagctctttagaaaaaagatgtaccaaaccaaacaggcccatagtcaactactggtcacctcttactcccaaccaggcaacaaaccaatgatgtttgttacatttggaaatgtctgaattggtcctactgcaattacaattgttattagttttattagtgcttcaaaaattaatgtggatgtacctgcatatagttttttcagcatgctttgtttaatgtgcggggtggtaaagtatgttatacagttttttttctcgaagacgcgcgagagctacaaatctttatatattattttttcttgaacgtgcaagagaactatacatcattatattattaaggagaaaaaagaggtccagaatagacccaaacagcaaatcaaaaggcccttacggaggccaaagacaaaaatacacaaatgaatctttatatattagagagaaaagaagggaaaacctgctacgcagaaaccccgagattacacacacttagagctattacatactagttacataatttgacccaatcacaataagggcttcagctaagcctaaacttagaagatgtttgggtccagctagcacctagcatgccaactcatcgaactgcatcttgccgatggaaggataatcaccatcaaagactacccggtttcgttgcaaccataaacaccacacacctagaacacttgatatgatgctcgatattaacctttagtttttgtaaatacaggtaacgtcaccaggtggcaacactgtgtacacatt

SEQ ID NO: 1081 - DNA, 7742 bp, Zea mays
  Intron number 3 from transcript GRMZM2G034122_T01 (locus G RMZM2G034122) derived from phytozome v7.0 (chr-ID 5; pos 1 130052 to 1137793)
cctttcaaaacaatttcctgggagcacacgggttggtaagtgcaattactgaactcaacttccgtgagaccgttgtggttcctaaacatactgttcttcagattaaggtggaatttggtttagtatagataaatagaggttgatcaagaatttagctgacttgacattaaacttctgaacatatcatctagcgttggccatatttttgtaaaacatagatatgttggttaaatttagatctgcgctgtattcatatcatatcatcatgacagttgtctcatccccgaaaaatacacctggcaagtacaatcgaaggcatcaaacgaactttataggtctggatgttggtttatttgaagctaaagaagtatgcatatattctagattaatgtatcaagtaccaacacaaaattgtaactaatagttcagtagaaataacggcaattggatagttggagattcagggtgatgtgattcatctaagagcaaaatttctgaatcatctaagagcaatatctctgccgggttatgcttccatgccagtactttggccagttttcaccttttttatatattctaaactaaactcagtgaaggtgtaattgttatttttgaagttaaagtgttaaataactatacatgtactatatctatacatgtaattgcgcgtcatttcattgagagagaagatagtacaacacaggggtatgaaatccatgtctcactaaaaacagaccacactacacactcaaaccgactagggtggggagcactcaggggcgaacccatgttggtcccggtgagggcacaggccccagctcaaaatctgttaactggagttagtagacaatttttcacctgtagtaccccatctcaagcaaattagaggccctcactcatgtacatattcagctaaacttcacatatggttagaaggaaataattggatttttgccactcaccatgttgtctccttgttatttaccactgtgtctatgaattgtggatccagctgggtctatgaaatgtgggtctgatggcaattttacaaacctgtttcttgctgatggcaaatatcagaatctctcggctagaagtgtgccccagcttagtttttttgtctgggtccgcccctgggagcactcaaggtcctgcccctacacggttcctgaagccctacagctccagcagcgcaccctaacatacacccattagctatgggcagtaggatagtcccaaacgctgggctggccacattgaacacaattgtttttatgcttccagattccccaggccaccaaaatgaccagaaagttgagccttttctcttttggagcttcctttactgttttagactaccaggaggattaacttgtgctggtactctgggaaattaaataaacaagccacaactgctggaacaatctgaaccagacaatggaggaagtgctgaattgtttcctcctaatcacaaagagggcagacagcgggatgagggagcccacacattgtcaactggtcagctgtccaacaatgggttttaagggccaaccaaatgaataatctgcatctaagaggggcccagctgttctaaaacctcttccatggagcatattgaatagcccctaggaagaacccactataagccattgcacgatgttttttaagaccttatttaaaaaaaatcctacgttctgcgttacttagcctcagaggaaatcttataacaaaactaagtatatttttaaagtaccccacgtgaaggagtcaatacatatataatcagtttatgctaattcattgcataaggggtcaaataaattactgttcccttcattccgaattgtaactttataagtcatttcgtttttctagatacataggttttgatgcacacttaaatatatattacatgtagatacataataaaactatatatattaaaaaactggatgacttaaattttaaaacgagaaagtatgtggtatggagtccaatttcaaagctaatcataacacagaacatttctatggtccgacagtatctcccacacatacctatacataaatattagtgatatgtgtcttggcacaatatagagtttaatagtagtgatatgtgtcttggcacaatatagagtgtaataccaatacgaattcaaaagcatggtgattacgcaaaacgcaacaaacggtacatcccgttgcaacacacgggcttgtttgctagtagtaatgtatatttaagtgaccagaattccagaggtctgcagaagcggcgtttcaattcccagtcttcatcggaccgcgcaccggttcacgctcgcctggggccgcgcgtccaacactgctcggcggctggccgcgttttccctgctgatacggttactgctctggtgacgcctgcaatccagtcggtctcttccttaatggcagttgatgcctcgcttccgacgcggattgacccagctgatgatgcctcgtttccgacgctgagtgctccagttgatgcgccagctctccctgttacttcggttgtagggctggcggcgcctggacctgcctcgtttcctgcgatggaggggccagctaatgtgtcaatgctattggatgcttcgggtgttgtgccagcggcgtctggccctgttctcgttgctgttaatgctgcggattatccccatgaagactgttcggagtcccaagaatctgcttctgcgcctattcaagagaagtgcggccatttatgctcggcggctggcagaccagatattgtcccaattgatgttggggttaatgcgttggtggcacctgctaaatcctcggtttcttccttaatgacggtggatgactcgttttcgaggttggggggaccagttgatgcgccagctctccctgatgcttcggttgtagagctggtggcgcctgggactacctcgtttcctgctgagggattgtcagctgctgtgccaacactccctgtggcctcgggggcagggtcggatgttggtctggattctgcggattattcacgtttggattgttcggccatgatgaattgctcccgcatggggtctgctgcgccattggttcggcctgatatccttcctggaccctcttgccctcgatactgcaagcccattctggtttattctaggagggaccagagtctgcaacatgattttgattcattggctgataagtctgcccctaccagtggtaatgtcaatgtctgtgatgttgttaattccatgtcttcggaactgcattcccctggcacgctcagatcctctttcagtaacaaggtcgtgaaggcagctgcccacattttacctgctcctctggaagtcagacctgggaacccaatttctccagctgtgcctccacgtcgtagtaggcgcattgctgggattggtgttgaattccagtctgccttcagtgatagtcaattcaaatttaagaagaaaataatgagagcgctgcaggtgattgatgaaaacgaaggcatcagtcaggaggccctggataattattgtaggctttttgagcagcccctccctccatctcatgtccaggcccttgctgcccttttcggatggacaccccctggattggcggtgtgttgagcggctgttcatgcctctatcctgttggtcgggttcttcttatatttgttatcatgaatccttcaaatattgtgtgttggaatgtacgaggcctaaattctagagctcggcaagactctgttcgtaatttggtaaactcctttaatgctaatgtggtgtgtatccaagaaaccaagatggctgaaatttctatgcatacctccctgtctgctcttgggagtaattttgtgcacaaattgtgtcttccctcagttggaaatagtggtgggattcttgtggcctggaggaatgaaattggttcagccagcgcttctcgggtggatcagcacagcgtgtcaattcagtttagtccaagtgatcatcctccttggtggctgacttgcgtgtatggacctcaaggcgacagtaacaaaattcagtttatgcaagaacttcgggatgtgagatctgcgtgtcctggcccctggattcttatgggggattttaatctcatctacagagatgaagacaagagctctggcaattttaacagacagcttatggagagattcagaaggtttattaatgatctgggtttaaaagaattggctctgcatggtcggaaattcacttggtctaatcgccaagatacgcctactctcgtcaagcttgacagaatgttttgctcatcagattgggagcagctgtttcctaattgccttctgcagagtgctagcaccgatggttcggatcattgccctttgctccttgggctccaggttttaacacatggtcgcagcagatttcactttgaatctcactggacaaaattgcctgattttattacaacagtggaggctgcttggaattctgttccctcctccccttgcccttttggaaccctttccaagaagtttggagccaccgtcaggcgtctccaaagctggtcccaaaaaagggtgggtcatatctcctctcagcttgggatggcacgagaaattatgcacaagctgcagtctgctcaagatctcagacccttgtcagggctggaaaattggctgttgaagcagcttgatggtcatgttgtggccctttcaaccttgcaacgttctatggctcggagccgttctaggattacctggctggctgagggggatgctaacactgccttcttccacctccacgctaaataccgcaagggcaagaattttattggtaatctgttatccgacgatggtttaataaagtcaaggcatgaggacaaggaggaaactataagtgatttttttcacaagttgctgggctgttcgtctgatcgagctcatactattgatttggatcatctccaaattccttcccatgatctctcttcgctggacagccctttcacggaagatgaaatctggaaaacagtcctttctctaccttcaaacaaggctcctggcccggatggttttactgggaagttttataagtcgtgctggcatattattaaaggtgatattatggcggctgctatggctgtttggaatggaaatcggggaaatctggaacttctcaattcagcatacattattcttctacccaaaaaagaggatgtatgtcatgtcaaagattttcggcctataagcttggtccactcctttgctaagcttattacaaagcttttggcaaataggctggcccaacacctggataatatggtttcgcagaatcagagtgcgtttattaaaggcagatccattctggataatttcatgcttgtgcaacagacagcaaagttgtttcaccagaaaaagtgtgcaaggatcctccttaagttggatatcaccaaagcttttgattctgtctcatggcccttcctcctggaggtcttaaagcatttgggtttcgggcaaatttggtgtgatattgttagcattcttcttgcttctgcctcttcccaagtaatgcttaatggtaaaccaggtaggagaattattcatagacgtggtcttcggcaaggggaccctctttcccccatgttgttcatactggttatggatgtgctaggctatttaattaaggaggctgctaatgatggtttgatggtgcctctgttagaaagttcagttcataaccgtatctctatttatgctgatgatgtggtgattttcctccacccggtgcctcttgatttagtaatcaccatggacattatcaggatttttggggaggcagctgggctcaaagtgaatttggcaaagagcagcgttttccccatccactgtactgctgaaaatctggataccattcataatctgctgccatgcgttgttgccaacttcccctgcaaatatttgggggtgcctctatccttaaagaagctcggcagacaacactttcagccattcattgataaaattgcagatcgtcttccctgctggaaagctgacctgttgactagagctggaagactgattattgtccagactgtcctgtcttcaatgaatatctacttaatgatggccatggaccttccttcttgggttttcaaagcaattgacaagatcagaaggaatttcttgtggagagggaggaaagaagctttgggaggacattgcttggtagcttggaacaaggttacaaggccaaaagaatttggaggcttgggtatattaaatctgcgattgatgaattgggctcttagattacgctggctctggctggaaaaaaccgatactgacagaccttgggcatcctttaaaataaatgctcatccttcagtaaaggccttcttctcggtagcaatctcctcggtggtgggcaacggcagaaacactttgttttggacagataattggatcgatggacaaagtctatgtcagctggcccctcatttggtccagatggtctcttctagggctagaatgaggaatgtccacgatgccctcatctcaaggagctgggtccatgatattagaggagctatcactgtaaatgttttgtctgacttcctcaaggtttgggacctcactacagactgggtcttaacaccagatcaggaggataaacattgctggaggctttcaagctcaggattatattcggccaaatcagcatataccggtttctttcttggagcaacaacttttaaaccctggaaaaggatttggaaatcatgggctccaaataaatgcaagttcttcatgtggctcgtggcccacgatcgctgctggacagcagatcgacttgcaaaaagaggactgcctcaccctcaattttgtatactttgtgatcaagaggaagaaacgataaaccacttgctggtttcctgtgttttttctcgggctgtctggtttcagatgatgaaatctgttgggttgcagcatcttgctcctaaccctgcgtgctcctcctttgaagattggtgggaaggggttgctgcattttctgctggtccagtaaacacagggctgcacaagggcttgaactctttgatcattattggtgcttgggccatctggaatcaccgcaatagctgtgtttttaatggtgtgcagcctagtcaaagcatggtcatcaattgggtcaaggaggaggctcatctctggtatagggctggagccagggatttatctaacatccttatgctccagtaatttcagtaatttcagtgggtattctttaattttagtctccatggtcacgggagtagatgtcttttgttgttgttgatgttaattctctccttctccctatagcctagtgtttgtgggttcgtgtggagttgtacgaggtttccttgcctcaccctttcttcttaatatattgatacgcagctctcctgcgttttcgaaaaaaagtaatgtataaaggcaaagtgataagaaaaaaaaaaacaattgaattgttggagatcaatggtgatgtgatctaatgattgagttgtttaattgtagtgcacacaaaaaattaaaaataaatgtatacatctatgactcaagttccttttttttaaagttctatgtatggaagacttgacaagttgacatctgtggttctttgatgctggtatgatggttatctctctttatatgttaaaccgactgtgccctaaaatgtagcccggctagaagctcgtctgtttgaagcaaaaggt

SEQ ID NO: 1082 - DNA, 1574 bp, Zea mays
  Intron number 2 from transcript GRMZM2G127510_T02 (locus G RMZM2G127510) derived from phytozome v7.0 (chr-ID 7; pos 1 53284665 to 153286238)
caactgacggtatgtacttgtcgaacatcttcatataggtttctaaattatttttctctattatttcacacttgcttgtgtaggatcctgcaggggtactgattatgagagcatctaacttctaggtgcatcactgcatcttgaaaactaaaacccacttacatattctggtttctctttccatttttcttgctggttgatagtgttttcgtaccagttctctttctagtcattccaccgcaacagctcacatagcttctttctgtaaacagtttccttcccgctctttccgttccaagtctaagattgggataacttaacaaagtaattaaaccactgaacaaaatttgtgtttctcaaagcaggatgtcatgccatctgcatttaaggcctggaattgtcttcagatgtctatgtaaccagtgcctcggttaggtcagtgttttaatttcatgagattttggttctaaagctctttcactctcaggcatcaacttatctggacttactctccagtcttcaatgctttcagtttatttttttaaaaaatactgcccatcatgttccagtactcgtgatagctaatatgtacaattttatatgttgttgtggtatttatttttatatattccccctttttctcatctctggattggatttcttatatctgcacctaatgtcacctgtaacatgtttgttactccgcattgtactgtatagtgcaggaagcttttagtttcacctgtagcttatctggtctcctcaatgtaccatttttttagtcattccaaattctgttgcggtgcagaaaatatttttttttgttcaactttccactgttgtgcctgcacttcctctggtttattattccatgctgcagattcaattttctttttatttctcattagttttccctgaatgcactttgtagttatgcatttttgtttgttgcccacatattctgcttatctgagtttgggtttggtagttggtatggcttagcaacactgtaaagtttgatttcttatttgaaatattttatcaacagttgatgactcagaataagattaaaaaatcgaaatagttgaactaatatgttctacttcatgcccgtgttagtgcatgaggatatttccaggttgtgattaatacacgcagttgctgctacatagtttttgtcatttaaagatactgggtattgtgtagataatctgagtttatctactgacagtttgactatagtaaaatttcttctgttgcagctaagcagtacatgcagtgaacaactaattgaagcaaggatttcttgtattcttcctctgacctcattggaatgctaaccatttctttatttgttttatttacttacatcattgcaaatgctgttgactattttggatccttactagaaatatgttaagctattacttttgctggccagaatatgggtgtccagtgttccgttgctattattttgggggtctgaattcccagccaatttgccaactttgttgctgatggtttgtcttgccattgcaggagcataccagagctctaaaggaaattcttcagag

SEQ ID NO: 1083 - DNA, 19286 bp, Zea mays
  Intron number 6 from transcript GRMZM5G898684_T03 (locus G RMZM5G898684) derived from phytozome v7.0 (chr-ID 2; pos 2 09589203 to 209608488 reverse strand)
ctggggtgagtcattctgatttccacgctaatcttatttgtttttcttttacatgttacatgttttattttggatgtcgcaatgtccgtatttttcattaggtgcttagtaatattatcacttgttggttatggctgtgctaattttttctcgataatgatggttgtgctacttaagaggaatgtttcatgttgacctattatctctaattggatgaaagaaatcttgtggtgtgtgtctgtattgactgggcaactggactactggagtaaactgattgttttctttgcttccccaggtgtttatattgaagagtcttccactgcgatttttagcaacaagattggcatttaaaaaaactccaaatgaattctttgattgggtgcaagtaagcctctatggatcactttcagatttaaaaggaatgcgaaaataagataaaatcatgtcctagttgctgctctagtagttttctctaccttttggaattagggagaagcccactttctcttccaataaagtctgtctttctccaatgctgtaagaaactggcggtaacagtgtctctgttggaactacttatacaataatcatgtttttgtagatgggagcaaacagattaatccaaaatttcctgattcatgctaaaattatattgaaaataaaattattacctgccactccaattttccttttctctgtctgacatcctaattttaacagtgcaaaattattgccttaactaatctaataaattttgcaaacaggctattcaagctatttttttttttttgaaaggaagcggcaaaagctattttagtttcctgttcctctgtgtcttgagcatatgaagttaggcattttgacatgattcccctaaaatttcagattggccgtctgcattgcctacttccctggtgggaggatgctacagtagattttatgattagagggggttataatgtcataaaccaaataaaacaggttcttttctttaaagactctgcttatgaattttcactgtccaaggatgttaaagtttctatttttatagttcatccgtgaattgcttttgtgtttagaattgaagttcctttgtggcatatatttagcgtgccaaattttatatcatgtgtccttagagccatgcataatcttccaaatccatttaactagtagtactcaattcattacttttgtgtcaattatccctggacctccttgatcttttggtcttgtcatcatttcccacctggccatgtgcgacttgtgtttttgcccagccccttgcccgaaaaagtttgctcttatagagtccatcttactgtgtgtcccatcaacctgtagaagcccatggtataagttgggataccccttaaacaagtattggtaagaattaggttcccttgattttactcttcgatggtcctaacttttgctcattttactgaaaattttctgtagatgacgataagggcaagtgcacatctgataagatatatttttgttctccgtataagggctttcaactgtttccttgtcattaacaaaacctattgagtgagaactgcagtaccttgaatattccatgttctaagtgaaaacaccaataggctgttgcactgttgttcgtcatactcttgccaagattagagtgtatggaagggatgctgcatgttgcatctaggggtggtaatggatcacgatccaaatatttcttcaaaataagttagggtctttaattaattttagattaaaaatgaatagaaatagagtccaatcctaatttgatttgatccttaaattttatagtgtgaaatctagagcccattaccagccttagctgcatcatagctttacagtacactgtatattactgtcactgtatattactataaattttatagtgtgaaatctggatgctagctcccacctttctggatcaaagctaggcatgaaaaagaaatagaatgggttcagtagaacagatgcattactaatgatgttcctgtttctctttacaggtgaagcataaatgcctgatcctgtggggagaggatgatggaataataagcagcaaactagcatatgtaagttgacatgttatgctttgcggagcaccaatttgaagttgtactggcatttaaaaagcgaggaaattctagctaatgccgtgtcaacacaataacagtagcataaagtagcatcagtgtgtgccctgttagatattatattacgctcacgctagctgttactgcatcacttgcagaggttgcatcaggaactcccagacgctattctgaggcaggtccggcagtgtggccatattcctcacgtggagaagccaagggaggccgcaaaacatgttcttgaattcctcgcaagaaacacgtcagacaagtcagaccagtctccttccgagccgtcagacaagtcagaccagtctccttccgagccgtcagtagtcgtgtaagctaccatgattactatcctgctggatgcttcactgttcgtgcattcagtcgtgaacaccgttgtaccgatttaatcgctcaatttcatatgcccggaaacggtacaggaaccgctgagcagatcacagatccttgaagggtaggctgtacaaagtggaatgtttggccatggatgatggatacagtcgctaactcgctatgctcagccaagctgctgctgcggaaggctgaagctgaactcggcgatggttctcagcgacactagaagataggttgttggtcagttaggactaactgtactgtacggtagcactgcaatgcaagggacgcagtggatgggagcatgacaatttcggctgttgccagtactgtaaattatgcaatgtaaaattatttggagtttgcaagggcattgcccttttccctcgccgttgatatccagacagcgccgccatcggcacaagccaagctagcaaccgagactgttttcaccttccccttggtggagcaacggcgtcaggactcaggaaacacaggactggacttgttatgcaggcccgggtcatgactcatgacaccgcgcttctcccgcgcaggcgcagcagcacgcgtgctctgctcttgcgcgcgcgcgtcattaccactccgcgccgtaattcgcccggccccgtcaccgtcatcaggtagtagtacccgtcaatcatgctactcgccgcgcgacgccatgtgcggccgcacggaaccagcgcccccgccggccctccattggtaccatgctgcgctttgtacagccgggcagcctgtgaccgcatcattcatcgctagtcacgcacgcagctgtcggctggatccaggacgccgtcgtacgacgcccgctggccggccccgggcgtgggacctgtaggttttgcaacaactttgcgcatctacctgacgtcctgtttggttcacatgttttttttttgacccatgagcggtggttctgctctgtttgacccatgagcgcccaggcggcaccgaacaagaagcaggcgctagtgggatgcattagtttttttccccaataattcccaccctttctccatagataatcagagtactcctgaactacatacacctcccaaaagggcagcgctttctactactactagcatgcaggcagtaggttgttgtttccgaggtcatgtgaaggcgtcacgcgagcacgatggcggagaggaggagcgcgacgagggcagcgcacagcccagcctctgggaggaggagcaagccccccgccgccgccgccgctgtgtccatgcctgctggtcctaggccgccgaacccggtacccgtagtgcctgcagtccccatgccggtagtgccggctgtgcctgcgcctgtcccggcgggcgtcaaggtccctgggcctcccgctcctcccattgtgccgccggtggtcggggtcacggttcccgcggcgctgtgtaaacaaggcagtgctgttagtgttgtggctggtaatactgatacacgacacacatgctgaatgttccgcgattcttaagtacaaaaaatccgccgaacaaactgcatcccggcccaaagatctggtggcgcaacatgatgctcaacttccttgggggtgtaccagttcccaaagcgcgcaggtttgaaacatgaactacatggatcatggtgcacagttaatttaagctcgccacgtaccttgcactggtggtggggtaagagcagcccgaagagcctgaaagtttggaacacaaaggtcatataaggtactacaggtaggactctgaatgggtggtaaaaatggacagtgtcacaagactgaagagcatggaagcagcagaacacagacaccacacaccatagaagacattggaatctggctttggagtttggagtcataaaacaaaacaaaagaccgcgttacagtttactttcccttttggaaaaatcggggggaaaattggacgcactttgatgccaatgtctgcccagtagacactatgatagggttttacttttagggtcgagaataataaagcatatataccgcaaacagctttgcactttgcaaatcttattttacagttattcgctcagaaagttggtgttttttttcttcttcttcctattattagttattaggcgaggctacagtgctacaccgatagccaaaattaattaccctgtacagaacccgattccttgaagcttaacaatgctacacggcatgcatgatcgttcgttggttccacttactcgggtcgctggtggtgagggtggcggtgccggcgaagtcgcaggtggcgcccttggccttgttgttctggtagtagctgttggcggcccaggagcagtgcgccgggacggtgttggggttgtagcacgccccggtctcatggatggagttgcagtccgccccggagccgcacgcgtagtcgatggtcttctgcagcgccgtcctccgaccgtgtcgccgtccgaggctaggccggacctcgccgaaggtgtagttgacgccgagggtgctgctgctcccttcaactgtcaagatccgagcctacaggatcgggttatcttgtagtgtgcgtatgttttctgcggcggccgaggcccaaacatactgtcgtcgtgttgtaaagctgtgttccttttcctgttgtctcgagtatctggacttatttgtcggtaacagaattgcttgtccgagcgagagttacttttcgcggaaggtggcgagtgaggtatccgtatcccggaggcgtaggaatccctcggctcggtcggccttgccgcttacgtgcactcttactcgtccatagggttctgtcaccgatgtagtcgagaaggcccaaaaaatcgtttcggcagaggagttttcgagcgtgaagacttgttcggtccgcggaatcacttatccgagcgtgagttacttatcgcagaaggtgatgagtgaggtatccgtatcccggaggcgtaggagtccctcggctcggtcagccttgactacttacgtgtactccgtcgttttcaggatccactttcaaagtagttgaaaagcacgaaagacattctggcagaaaagatctttttccgaggaaaattttgacgcagagggggttccccccttttagcccccgagggagggtcgggctttgccgaggcaaggctgacccttccttgatgactagactttgtatgtgaccgaggtgtatgaacgacttgaaagcatcttaagggtagacgcgacgtagctgtcggatgttccaagcgttgttgtagacctcgccttgactgttggctaccttgtacgttccgggcttcagaaccttggcgacgacgaacggcccttcccagggaggcgtgagcttgtgctgccctcgggcgtcttgtcacagccgaagcaccaggtcgcccacctggaggtctcgggaccgaacccctcgggcgtggtagcgttgcagggactactggtaccgcgccgagtgtagtaaggccatgtcccgagcctcttccagttggtccagtgagtcttctcgattagattgattgctttggtcgccgtaggccctcgtcctcggggaaccgtattctaagtctgtgggcaagatggcctcggccccatagactagaaagaacggtgtgaagcccgtggctcggctcgacattgtcctcaaactccagaccaccgaggggagctccttcatccatcgcttgccgaacttgttgaggtcgttgtagatccgcggcttgagtccttgcaggatcatgccgttggcacgctctacttgcccattcgtcatagggtgagccacggcggcccagtccacccggatgtggtggtcctcgcagaagtccaggaactttctgccggtgaactggatgccgttgtcggtgatgatggagttcgggaccccaaagtgatggatgatgttggtgaagaacgccaccgcctgttcggacctgatgctatttaggggtcggacctcgatccacttggagaatttatcgatggcgaccaacaggtgcgtgtagcccccgggtgccttctgtaaggggtcgacgaggtctagaccccacacagcaaacgaccaggtgatgggtatggtctgcagagcctgagcgggcaggtgggtctgccttgcatagaattgacacccttgacaggtgcggacaattctagtggcgtcggccaccgcggtcggccagtagaagccttgtcggaaggcgtttccaacaagggctcgaggtgctgcgtgatggccgcaagcccccaagtgtatctcttgtaagagctcctggccttcggcgatggaaatgcatcgctggaggatgcctgaggggctgcggtggtagagctccttcccgtctcccagcaagacgaacgacttggcgcgccgcgccaaccgccgagctttggctcggtcgaggggtagctctcctcggtggagatattgcaggtacggggtctgctagtttcgattaggcatgggccagctccgctcctcctcgacgcgcagtgcctcaccctcgggggccgagggtacctcgggccgagccgagggtgccttgggctgagccgagggtgcctcgggccgagccgagggtgcctcagactgagccgagggtgcctcaggctgggccgaggccttctcgggctcgggtgtgtcgtcggtcttgacggagggttgaggcaggtctcgggagaagacgtctgggggaaccgttgttcgccccgaggctattttagccagctcgtctgcagtctcgttgtagcgtcgggcgatgtggttgagctcgagcccgtagaacttgtcttccaggcgccgaacctcatcgcagtaggcttccatcttcgggtcgcggcagtgggagttcttcatgacttggtcgatgacgagctgcgagtcaccgcgagcgtcgaggcgtcggacccctagctcgatggcgatgcgcaactcgttgaccagagcctcgtactcggccacattgttggacgccgggaaatggaggcgtagcacgtagcgtaggtgcttcccgatgggcgagatgaagagcaggcctgcgcctgctcctgtcttcatcagcgacccgtcgaaaaacatggtccagagttccggttggatcggagctgttgggagctgggtgtcgacccattcagccacaaagtccgccaagacctgggacttgatggccttccgaggggcgaacgagatcgtttcgcccatgatttccaccgcccactttgcaattctgcccgaggcctctcggcactggatgatctcccccagggggaaggatgacaccacagttaccggatgagactcaaagtagtgtcgcaacttccgctgcgttaggatcatcgcgtacaacagcttctgaatttgtgggtagcggatcttggtctcggacagtacctcactgatgaggtagactggcctctggacgggcaatgcatgcccctcttctcgtctctcaaccacaatcgcggcgctaaccacctgagtggtagcggcgacgtagatcaagagggcttctccggcagcggggggcaccaaggtgggcgcgttcgtgaggagcgccttcaggttcccgagggcttcctcggcctcaggggtccaagtgaagcactcggccttccttaagaggcggtacagaggcaggcctctttcgccgaggcgcgaaatgaaacggctcagagccgcaaggcatcccgtgaccctctgtacgcctttcaagtccttgatgggccccatgctgctgatggccgcgatcttctccaggttggcctcgatgccccgctcggagacgatgaaccccaagagcatgcctcgggggaccccgaagacacacttctcgggattgagttttacgcctttcgccttgagacatcggaatatcgctccaaggtcggaaaggaggccggaggctttcctcgtcttgactacgatgtcgtcgacgtaggcctcgaccgtttggccaatgtgttcgccgaacacgtggttcatgcacctttggtatgtcgcacccgcattcctcaaaccgaacgacatggtaatatagcagtacatgccgaaaggtgtgatgaaagaagtcgcgagttggtcggactctttcatcctgatttggtgataccctgagtaggcatcgaggaaagacagggtttcgcacccagcagtggaatccacgatttgatcgatgcgaggcagagggtagggaactttcggacatgctttgtttagactagtgtagtctacacacatccgccatttccctcctttctttctcacaagcacagggttggcaagccattcgggatggaatacctctttgatgaaccctgccgccattagcttgtggatctcctcgcctatggctctgcgcttttcttcgtcgaattggcgcagagactgcttcacgggtcaggctccagctcggatatccagcgagtgctcggcgacatccctcggtatgccggacatgtccgagggactccacgcgaagacgtcagcgtttgcgcggagaaagtcgacgagcactgcttcttatttgggatcgagctcagagtcgatccggatctgcttggaggcgtcgttgctggggtcgagagagacggatttaaccgtctccgctggctcgaagttgccggcgtggcgcttcacgtctggcgccttcttagagaggctctccaggtcggcgatgagggcctcggattcgacgagggcctcgacgtactccacgcactccacgtcgcattcgtacgcgtgtcggtacgtggggccgacgatgatgaccccgttggggcccgacatcttgagcttgaggtaggtgtagttggggacgaccatgaacttggcgtagcatggcctccccagcactgtgtggtaggttcctcgaaacccgaccacttcgaacgtgagggtctcccttcgaaagttggagggtgtcccaaagcagacgggtagatcgagttgtccgaggggttggacgcgcttcccggggatgatcccgtgaaaaggcgcagcgcctgcccggaccgaggatagatcgatctgcaggagcccgagggtctcggcgtagatgatgttgaggctgctgcctccatccatgaggaccttggtgagcttgacgttgacgatgacggggtcgacaacgagcgggtaattccccgggctcggcacacggtcggaatggtcgtcttggttgaaggtgatgggcttgtcggaccagtctaggtaggctggcgccgccacctttaccgagcagacctcccgacgctcttgcttgcggtgccgagccgaggcgttcgccactcgcccaccgtagatcatgtagcagtcgtggacctcggggaactctcctgccttgtgatcttccttcttatcgtcgtcgcgagccctgccaccctccgcgggtggcccgaccttgtgaaagtggcaccgaagcatggcgcagtcctcaagggtgtgcttgatgggcccctgatgataggggcacgactccttgagcatcttgtcaaagagattggcacctccgggaggtttccgagggttcttgtactcggcggcggcgacaaggtccacgtcggcggcgtcgcgtttcgcttgcgacttcttcttgcctttcttcttggtgccgcactgagtttacgcctcggggacatcttccggtaggcggccctggggctgcttgtccttccgaagatggcctcaaccgcctcctggccagaggcgaacttggtggcgatgtccatcagctcgctggccctggtgggggtcttgcggcccagcttgctcaccaggtcgcggcaggtggtgccagcgaggaacgcgccgatgacatccgagtcggtgacgttgggcagctcggtgcgctgcttcaagaatcgccgaatgtagtcccggagagactctcccggctgctggcggcagcttcggagatcccaggagtttccagggcgcacgtacgtgccctggaagttgccggcgaaggcttggaccaggtcgtcctagttggagatctgccccagaggcaggtgctccagccaggctcgagcggtgtcggagaggaacagggggaggttgcagatgatgaggttgtcatcgtccgttccacccaggtggcaggccagccgatagtccgcgagccacagttccggtctcgtctcccccgagtactttgtgatagtagtcggggttcggaaccgggtcgggaacggcgcccgtcgtatggcctggctgaaagcctgcggatcgggtggttcaggcgaggaactccgatcctccccgctgtcatagcgtcccccacgcctggggtggtagcctcggcgcaccttcttgtcgaggtgggctcgacggttgtggtgatgatgctcgttgccgaggcgacccggggccgcaggcgctgtgttgcgcgtgcgcccggtgtggaccgaggcttcccgcatgaatcgggaagtcgcggcgcgatgttccgaggggtacccctgccttcgggaggcagagctttcggcccgtcggaccgcggcatcctctaggagattcttgagctctccctggatacaccgcccctcggtggtagatggctccggcatcgcgcggagaagtattgccgctgcagccaggttttggctgaccccactggagaccggtggtggccttaccctgacatcgtcggcgatgcggtgctggatgccttggggtaggtgacgcacttctccgaccggaggttggcccgcccattcctgcccaatgtctcggcggaacggctcaagtgttcctgctccctcgtcgagcctggcctgcatctcgcggattttctcgagctgtgggtcatgaccccccgccgggacggggaccatagctagctcccgaaggatgtcaacgcgaggcacaggcctagggggatcaccgttctccggtataccaagatggttgccttcgccgggaccccctagatcgacgtggaaacattcacgacttgggccgcagtcctcgtcgccgaggctgcggctaccgtcggaacagtcggaaaggcagtagtcgcatgcagtcatgaagtcccgcatggcactggggttaccaagtccggagaaatcccaacagaagttgggctcgtcatcttccttggaacccgagggcctgtaggtcgagacggtcgtcagccggtcccagggtgaccacatacgataccccagagggtttggactcgcctctatgagagcgtccaccgaagcgaagtcgcttggtaggtcgagaccgaatccaaaaggcacgagatgggaatcggtcggtacctcttggtcgacgagcggtgacgaagtcacgtcaggggcagactgcaccgtcgtctcaagtacgagggtgacgcccagcaagtccttcgcgagcgtgctggcgtcgtccgtttgcttggggttggcgtgttgcggggagatggcgctcgtcttcgtctcagacgcaaggtcgatgcccgacgtgccccccgttggggcgccggcgccgtcgactcgctcgacagccgacgaggtgccgcctcctgcttggccttggttgccccgcctcctcctccgtcggcgggggaggggacgggacaagcctgaatgttgttcttccaccacgtggggaagacgtcgtcgatttcgccgccggcgggcaggttgtcggtcgccattgtcgttgtcgcgcggcgggggaaggagtatcatgtcgtagctgccgtcgagggacatgaactcaagactcccgaaacggagcaccgtcccgggatggaaaggttgctggagactgcccatctggagcttgacgggaagttgttcgtcaacacgcagcaggcccctacctggcgcgccaactgtcggcgtttcgaacccggggggtccctggaccgacgagtaaattatcgccgcgtgccccagcccagatgggtcggcgcgagacggagcgcgaaggggggaagaagccggagggagacaggcgtaaaaggggaaacccgcggccttcgtgtttgtcccgcgcccaggtcgggtgcgcttgcagtagggggttacaagcgtccacgcgggagggagcgagcggcttacgcgagcgccgtcccgtccttccccgcgcggccaaccctctgtaagagggccctgaaccttccttttataggcgtaaggaaaggatctaggtgtacaatggggggtgtagcagtgtgttaacgtgtctagcggaggagagctagtgccctaagtacatgccatcgtggcagccggagaggttttggcacccggttcgtgtggtgtcgtggccgtcggaggagcgctggagcctggcggaaggacaactgttggggctatcgagtccttgctgacgtccccttgcttccgtaagggggctgagagtcgccgtcgtcatagagcatgcggggcgccatcattacttgtttaccggggcgagccagatgagacgccggtcttgctccccgtagcctgagttagcttggggtagggtaatgatggcgcctcctgtgacgtggtcggtccgagccctgggttgggcgaggtggaggctcctccgaggttgaggtcgagtctgtcttccaaggccgaggtcgagtccgagcccctggggtcgggcgaagcggagttcgtcgtcttccggggctgagcccgagtccgagccctggggtcgggcgatgcggagttcgtcgtcttccggggctgagcccgagtccgagccctggggtcgggcgaagcggagttcgtcgtcttccggggctgagcccgagttcgagccctgggtcgggcgaggcggagcttcctatggcgctcgaggccggacttggctgctgtcagccgcactctgccgagtggcgcagcagtcggagcggcgcaggcggcactgtccttttgtcaggccggtcagaggagcggcgaagtgactgcggtcacttcggctctgttgactgaagggcgcgcgtcacgataaaggtgtcagaccacctttgcattaaatgctcctgcgattcggtcggtcggcgcggcgatcgggccaaggttgcttcttggcgaagactgggcctcgggcgagccgaaggtgtgttcgttgcttgaggggggcctcgggcgagacgaactttgtatagagatgattatactctttttccttctaacaaaatgatttgtaaacgaggtagtcattgcataactatggtaactttaatacaaatattaagtttgcttttgttcaaaattatttgtcttatcttttatttgtttgtttttttgaatttagggctctcatgtgaatttcggaccaaaaaatgaatttcggaccctaatgtgaatttcggtcttttataatttcggaccgcatgaaatgagcccgtcacgacccgaaattcaaacggatcggaccaaaccgaaattcaaacaatatgggccttttcgggcttgggcccggcccgaatgtacacctatacatgtgccgagaactcgagatgataatgcccacaggttgataggaagcaggactgatgacatagttcacacaaacttttaggccccgtttgtttcgttggaattgaattccattttaataattataatttagacaaaactaattaagttcatatatttatatatgtaatatatttgtatattatcttaaatcatatgagaaagatagttatatactacattcatgttataacgaaacaagtagaagagtgtgctataagttgtacatcggaaaaatagcatgtaaatctatagaatcaatttccatctcacaccccatgaatttgagataggcttatatgataactttggaaagtggtggaatgtcacattctaaaaaaataatctattccaatagtaagattctaattcctcaaaatgaaaggaaacaaatgggaccttaaggaaaaattctcattatgtctctacgactttgttcaatactttattctgtcttcgtaaatgttataaaatattctataccacccggatacaatttcttaacatttcatgccaccgtcaagtagtcaactactttgactctgacggactagataaaataacgaaattactatggttatgtttggttcacgaaatgtaacgtaaatgttaatgataattgtttacacttgagtaccagcggtaacaaatttgaatagtctggtatcatttttcagtgtggtatccaattacgttttgactaaaacaaacatgatttatcgttatcacttatccattacattataaatatgtgaattaaacgacacctaaatgcttttcttacagaataacaatatcttaagtactattcttacaaaattataatcccttaaatgccactcttaagtacacaattattcttttccattaaatttaacatatatgataattagtaattttaacatatccagtcattactactggcttcgtctcaatttataattcatttgacttattttttaccaagattggccggctcgtcttattaaaaaaatttatgaaaaaaaaattaaaaacaaaaaacatatttaaagtatattataagctaaaccatatcacaataaaaattaataataattatatttttttattaagatgagttgatcaaacttaatgttgaaaagtcaaatgagttgtaaattggaacagagtaataattaaaattttcagctgtttagcccacttgtaaattaaaaatttaaatcatcgtgtaacttgcttatgtctacaagagcagttattttcttaagacacctaaattatataagctgtattttggtgaaatgctagtagggtaaaatattattttgaaaatgataaataaactgaaataaactactcaatactaatttattttagcttatttacggtttcaaattaatattttacctttatactattttattataatccaaattatatataatttaagataagactgaaaccaacagaccattagtcgttatctccccatcattttccagtaccctcccaaagacccgtgtcgcatgcacaaatcaatcaatcaatggccagtcagtctattcagccattccagtgggtggaatggtcgcccccaatgacgtcagtgtctggcaagcatgcaacgacgtttcgactcacaagggtaaagtttggtccatatcaaaccagctgtttgaatatcgattcgaatatcaaatataatgtaattacaaattttattttatagatgaaggctaaataatgagaagaaatcattaagacaaataaatatattattatcaaatgtttacctagcatcacatgaggaatcaatcataatacatctattattcatttgtgtgtctatctacgagattttaccgtgttatagatgtccttgccaatcataaaacaacctccacgtgtttcttcctgacgagtctccttcgaaaggtgtttaggagtttacatggcgataaatatgatcaacatgagtttaatcgatctctagagatcagttttatcattctgctatgttcctcgctgcgtgtcaatgctgacgcactagctcttactgtctgactcttccttcgttaataagtgctgatcacatgaccattttatcgtgttgcagcattgtcaaagacaactgccgttgtcaagagcaatggaccattcacaaacaggtacggtgtttaaagaaaaagaacctgcattatttggtgtacgacatcgacaccataacccccttgctagcctcatcgaggtgggagacgtggtgatggtgttccctcatcacggtcattgcgatatgagaatagtgctgtctccggcgactcagtgagcagttcgtgctcggtgtcatcgaaggaaaccccgcgcctgatctatacctctctatggtagacatgttaagctccgttcgttttagatcaaatgtacattcattaattaacctataaatatacctataaatataatttgtatgtatgtctttatttattatcattaattgaatattgataaaaaaaagctaaaaataattatattttagtatagagggagtaatgattttaagaaataacatgctcttctaaatatcatccacatacgtggatgatatttagaagagcatggtatttcttaaaatcattactctctccgtatcgatttatattggttctacaatatttttgtccttttcaattatagtcacagtagtctaaacaattgactttaatcagaagcgaacaatttttctagctttaagaagactcgtaatccaaagccttgttcattatttttatatctaatggattaaaaaggacgaaagattttgacttaatggccctgtttggcacaacttattttcagcttcttcacaaatttaagcagaggttccgccaaacaggcagcttctgcagcagcttatcagttcagctgcttcttagaatacactaaaagcagccaacaagcagaagctgcttttcaccagcttctcagataagctgctttttcaacaagcacccgctgtgccaaacagagcaaatatactcactcaaaccctctctagagagggtgccccaagttgggtgtttctcgcattttttttgtttccgccgaatctttccttcccattctctttcgtctcgttcgtgttaaaaaatcacatctgcctagcccgtggccgtggcatggcaatgcggcaccacacgatgccacgcggcctccaccgtcctagcgccctataacacccgtgcagcggagtgggcatggcacacagctccaggccacgagaccgtccagcgcgcgggcaggcgcgccgctaaactaaacccgaccaaatgccgcctctcctcacctcctcctccgtaccggcgctgccgctggccgcgtggtccaggtaccgcctcagggttgcggcttccaacgccgcctccgccccggacggggccggcgccactgccagatgcaccagcaccggcgggttcccgtccttccttcccggggcggtggagcgcatccgcgacggcgctgccatccgcctggccaagcgaatcgagcgcgtgcccgtccaggcgagccgatttctcccgatttactgtgctgtcgtacgctcaaatgcgcaatggctgagcctgaacttatcctatcttcatcttcagaccagtttctcgggtagcgcgatatcgagcagctgtgtgaggccgctcaagcagcaacaggacggtgatccggtcgtgctgctgcatggattcgacaggtgggctccaaatttctaatgcacagcaaagttcgttgctcaactaggtcaggtttttagtgctagctggtcatcattgctcgaggagcctgtcccaatattgaaatgcggtggttctgctatctgctatcagtgtggaccattttaatgtatcgtctacagttctgttctagaatggagatacacctacccattgctcgaggaggccggattggaggcttgggctgtggacatccttgggtggggcttctctgatttgggtacgccccatcctgcacaccatgtgatctggtttggttactgtacctggtaaggttgtgatttcgtactttgtaggccccttgtaatatctttgcttgtctcgttcgtagaaacacggccgccatgtgatgttgcatccaaacgcgagcatttttaccaggtactatgaaagtactactatcgctggtgctgtaccctgtgctaatttccacgtgatgtgtccttctcctttcgtgaacttatttctgattttaatatggcaaatgctagaatgacactgatagtagctgatctgagcaacttaattaacactatagtacatgattcagcaacttagcatgagagtaactgaacaaccgtccttgtcaggcatgctataaaatatagaacttccagtttactttccacttccctatttatttctcaaacacgtcacttcgctaaggaaaaagtacgacagagtatgacaccgcacccaccgtttctccctgtacccagcagttcagccaattaagaccagacagttcttgtcgtgaactgacgccactatctaatggttacattgatctgtttttttttcttggttacagtgatgtgatccttacaacttttatgtgtagttctggaaatcttacatcaaaaggcctatggtgttagtcgggcccagccttggtgctgctgttgccattgatttttcagtcaactaccccgaagcggtacatgcttaaaatacttttgttctctatatttctttactgcagactacagagcagtacacaggtatctgtagggctttcttttatgtgaagcttggctaccgtgcgataagccttcatacaagacagatcttacaagtctgagagtttttatattccagctaatttaagcttggtttcacaggtctcgaaattgatcttcattggtgcaagtgtatactctgagggcccaaaagatatgaccaggatgcctaaatttgtttcatatgctggggtgagtcattctgatttccacgctaatcttatttgtttttcttttacatgttacatgttttattttggatgtcgcaatgtccgtatttttcattaggtgcttagtaatattatcacttgttggttatggctgtgctaattttttctcgataatgatggttgtgctacttaagaggaatgtttcatgttgacctattatctctaattggatgaaagaaatcttgtggtgtgtgtctgtattgactgggcaactggactactggagtaaactgattgttttctttgcttccccaggtgtttatattgaagagtcttccactgcgattttt

SEQ ID NO: 1084 - DNA, 9790 bp, Zea mays
  Intron number 2 from transcript GRMZM2G471355_T01 (locus G RMZM2G471355) derived from phytozome v7.0 (chr-ID 4; pos 2 8713521 to 28723310)
aacttgaccagccaagggacaccaccaaaagcaaggtgggatccaacgttactctaatcaatgtcatgcagctgcctggactcaacacgttggggatctcgttggctcgcattgactacgcacctgttggggacttgttctcaaatgctataagttaagaacaaggcaacacagagaatgttaaacgataaagtcattcgtcctttgaggcattatttccctaaggatataacgatctccggacgaaggtcatgaaggacgagccttcatcagcacagtatatattaatgaaagacgaagcatatgaaacataaaagatagcatgaataatcatataacatcattcatttaactttattatatcatcatagagaaatagagacaatatcgaattgtaaatgtaccttcggtttggaaggagatgaaaatacaagtgtgacgcagaagcaaatgccaagtcaacgtgaacagtacgggggtactgttcacctatttataggcacgaggtacaacccatacaaaattacatacatgccctttacatttggtgataattctatagcactctattgaggtctaaatggtcttttcatctttaagtcggttcccttctctgcgaacatgccgaagctttcctgcttcacagcttcggcgctgtgtcaacctttgtagctttttgctttctgatacgagtccgaagatacctgctcacacattttaagccgcttctcccttgaagaccttcggcgacgaagcatagacccaacagtagcccctttcgtggtgctagatcgtttttcgtaacaagcttgatccgtgaaaaaagtctcttaagcttcggggagccgaaggtccaaaaaacaccttccctgagctcgttgccgagaaacgatttaatttcccagcacgcagcggtcccaccttgcagagtttactgtttgtccctgcggtccaccgcgcagcgagcgcaagcgggtgcgcgcctggtgtaaaaactctggcgcttcgccttcttacctgcagcactatataaacagacgagtaggtgtgaagttaccacagcattcattgctatttgcactgttttcctgccaaaatttttaaccatcgccgaagcttgtctgttagaaacgaacgaagctccagtttgaaacctgcttcggaggaagaaaattttaaagtttcacaagttcataattgaatggccagagtccgttctaccgccagggttgagcgcaagggggaggaaactgaagcttcggagactcttcccatctccgaagccatgcaacgatcgggtctagtgacttcagaaaagatccctcatgatgatgcaaaacaagcagaacaagcaatcgctgaagcagaggaagaagatattgaggaaactgattccgaagatgattaccgcattgccatgccaagcaagccgagccacttggacttcggaaaatctactgtgtcgaagactgatctatccaagatggtaaaatcgggctttttcactgaaaatcagaagaagctgttgcgcttcggtggagaagagactaccccgaagccagagaaggatgagattgttatttttaaaagttttctaaaggctggattaaggttccccctgcatgggattattggagaggtactgaagagattcggtatctattttcatcagctgacccctaacgctatcgttaggcttattgtttatatctgggcactccgaagccaagcagtggaaccatttgcagacagcttctgccgggttcacgagctacattatcaaacaaaggctagaaaagatggattacacgataattttggttgctataactttgcctatcggaaaactacaaagttccctgtaattagctaccgaagcaagtgggcagcaggctggaaatcagagtggttctatgtcaaggttgatgacgacaaggaaaagcttgtacaaagctcgctggaattaatcttcggagaaacccgacctcgctgcaatatgacacccgaaggtccaacacaacaagcaatgagtgaattcagaattattgcagagcatatcagcacaagggacctggttcaagagtttttagcattcaaagtttttcccagtttgagagaatgggaaatgccgaagctacagggggaaaagaaagaaggtgaactcgtacgtttaccttactatttcaagtttaaaaagtactttaaagcaccttgccaagagtggctagatacgattgaagcaatgtgtaatgaaatacttggcaattattccaaaaaagaagatcaattgatgaccgcagccttcggcactcgtccgaaacgaaggctaaatcgagtgtcggacgccttgggtttcgaatacccagactacgaaaatctgaacagaggtgccagaggccaaaaaaggaaaagggtaactgaaaccttagatgaaggcgaaaaagagccagtaacgaagaaaattccgaagaaaaggaaagcttcttctccgaagcaacaaatatccgaagcagaagaaactcccgcatcaccttctgctgctgttgttgaggaaattctgaaggtaatgactgaatccttacctgcgaagctaagtccactgggtcctcaactgacaaagttttttcagaaggacaaggagcccgagaaatcgaagaaaacaatcaaggcaaggaaacaaagaatcattaccgtgacagaggtaattgacaaaacgccgccaagagcttcggcccaaaaaacacgagcaactttagagggggcagatattgaaattgcaccttcggaggccgcagccgccgaagttacctcagctgaagatttgaatttagagagcacaattgaacatattgaccaaatgctgctagacatggctgcagaagaagctgccactgctgccgaagagactgtgaccgcagcgtcacagaaaggaaaagaaattgctgatgaagcttcagagaacgaagccttcgcgttccaaaacttagttggagaacatctaacaaaagctgaaatagaagagcttaaagagtatgcccaatcctgtggatacaaacctggggcactcctcttcggaggcgttgatgacgagaaattagagtgtattcgggaccaaacaggggccaaagttatcagtactctgtccaagagtattggattcccgaagctagaagcagacatcagccgctaccgacgacaacatgtcgttggtagtttattttactccaacttcaaggtgaatgacttatcccttaacctttattgcttctaataaaaacacgtctgacgaaggttgtgtttgtgtagagtatgttattgagcaaagccgtgcaaatgcagcaagatcttgaagataaaaagcatgaaattataatcggaaatttggaaaacaaaataaaggagcaatcagatgcttttgagaaaaagaattttgagctccaggcagccgaaggcttactggcggaagctgaagcaaaaatatcagaactgaactcgaagcttctccgccagtctgagcagttcgaacgagaaaaacaagatctcaatgcaaaacttgatgccgaagctcagcaaaattcggatttgagaaaactactgacaaatcttcaagaaaaatgcctggaatttagcaacaagtgcattcaacgattaagaaagattttttactcggttggagctagcagcgaaaaatttaccccctcagctgaagatctaccaaaaaccttcgaacacattgagggggaaattgacgagctcgacgaagtcatagctgggcatggtgacttctgtgcctgggtggcttctcgagggactgctgcagccttcatgaaggctggctgtgatcatgggaaaattgtcaataggccaaattttactttgtcaccatcaatcctggatgacatcctgatctcgcccgaagcatctcgaatcgatttgtaaaaatgatatggacaaaaggtggtcgagagaaagcgggagacgaagctcgtagccaccttgatccagtaagaaatcataccttgtgcttaccttttcctgtaaacttgattctgacttccaacgaccttattcatgtaggatgacgaagccgaagctgatgatcaaaaataacgccgaagccgaagctccttggagatttagatagcagactgcagacagtacttgaaaaacttttgagataacttttgtaaatgtaaacaaaaacttgtttttaatgtatgctgttcataccttgtaatatattcttaacctttcactgatgtatgagaaatgctttggtgtggacgaaatttccttttttgagccgaaggcgaaaaaacaccttcccttcttttcgtacgcaacgaagcatagaaaacaacattttccttttttccgaagctcttcttcatagaaaacaacattttccttttctccgaagctctccttcatagaagtttttccctttcttttttctcttcttgccgaagcaaccattttatgcgatgaagatgattatcctacatatgcctagatgaatgtttatgaatgcaaatgctatgatgtaatgtgatgtgcaaatgaatggccaaacacgtatccgaagccatattcatagccattattttcttaaaaacaatcacacctcagctctgcattcccttaggaacgactttggagcttcttcgcctttacttttggcggaatcagcgttgacttttcgctgtaagctctgcattcccttaggaacgtctttggagcttcttcgcctttacttttggcggaatcagcgttgacttttcgctgtaagctctgcattcccttaggaacgtctttggagcttcttcgcctttacttttggtggaatcagcgttgacttttcgctgtaagctctgcattcccttaggaacgtctttggagcttcttttttttctttttggcactcgatggtgcattctcagcttttacatttacattctttgggggattttgttcttatagaactaaaaaagaaaattacacgtgatggccccattaaaaacctttctcccccttcggaaaggaaaagggtgccatgaaagaagaactaaaaaataaaaaatatgaaaaattacatcgaattaaacataatatcgccgaagctcatccgcattccaagatctaggaatgtcattgccgtccatatctttcaatctgtatgaaccgggtcttgacgaagatgctactaagaaaggcccgtcccatttcaactgcaatttgcccactgtttccgagttggccaccctccgaagcaccaagtgccctggcccaatattttttagccgaacctttctatcccgccatttaactgtttcagcttgatatttattgatattctccacggcttgcagtctgatcccttctaaagcatctttttctatagaataagcagcttcggagtctgattctgccgaagctactatccttattgatccggttttagcttcctctggagttattgcttcgtcaccgaataacaacttgaatggagtgaagcctgtagaccttgatgttgtcgtgttgtggctccacaccactttgattaactgatctggccattttcctctgggttgattgaagattaacttcattattcctgtcattataatgccgttggctctttcaacgagtccatttgactccgggtgcctaactgatgcaaaatggatcttcgtaccaatttggtcacagaaatccctgaaagcttcggagtcaaactgtgtcccattgtccacagtgatggcctttggcaccccgaaacgacaaacaatattctgccagaaaaacttttggacggtggccgaagttattgttgctaaaggcttcgcctcaatccatttagaaaaatattccacagctactacaacatatctcaggttcccttgggccggtggtaacggacctaacaagtcaaggccccacctttgcaatggccaagtgggttgtatgagctgtgttaaggacgaaggttgtttttgatctcttgcacatttctgacaaccttcgcacttttgaaccaattctgctgcatccgaagctgccttcggccaataaaacccttgacggaaaatttttccgagtaacggcctagatccgatgtgagatccacacaggcctgcatgtatttctttcattaactctataccttcggttctggataagcatttgagcagcggagcacaaactccatgtttgtacaactccccttctatcatgacatatggacgagctcttgcttctatcctcttgttataagcttcgtcatctgaaagaaatttaccctgaaggtaagagatgatctcggttctccaatcttcgctaaaaacaggagatatattaagaactgctctttcaagaagttccaccgaaggtgcttttattgtttcgaagaacacatccgaaggtaaaggcagcccctgtgctgctgacttggctagcagatcagcatgctcattttgtcctcgaggaatattcttgacagaaaacccttcgaaggaagcttcgactcttcgaaccatatccagatatttttcaagcttcggatccttagccttacaacttttgtcaatatgacccgaaacaacctgggaatcagttttaagtatggcccttctgactcccattgcttttaacttccgaagacctagaaccaatgcttcgtactcagcaatgttatttgtgcaattaaaatcaagttttgccgcataacaaattttgactttggaaggtgaaaccaacacagcagccgctcctgctccgaaggttccccaagatccatcacaaaacactgtccaggcttcgttgtctttattcgtttcctcctcctgagcccctggcgtccaatcagcaataaagtctgccagcgcctgtgactgaatcgaagatctatgaacatattcaatacaaaattcattgagctctgtagcccattttccaatccttccagtagcttctcgattcctcataatatccttcagaggttgcgatgaaggaacaattatgttgtaagcttggaaatagtgtcgaagcttcctggaggccatcaagacagcatacaataccttctccagttctgtataatttttctttgacaaactaagaacctcggatacaaaatatattggggcctgcctcttgacttgaccatcaagcttttcctggacaagcgctgcacttaccgctgagtgcgaagctgccacatataataacaaaggagcccctggcattggtggagtcaatgttgttagatttattaaatactgttttagctcttcaaaggccttctgttggattggtccccattgaaagacttcggctgacttcagcacttcgaagaatggtaagtttctctctgctgatctggatatgaatctattgagagatgccaatcttcctgtcaatctttgagcccccttctttgtagttggtggctccatccgaagtatagcttcaattttacttggattagcttcaatcccctttgttgaaaccaagcatccaagaaatttcaccttcttcactccgaagacgcatttttctggatttaacttcaagccagcttgcctgaaactggcgaaggtctcctgcagatcagcaatatgattctcctgcttcgtgcttttgacaatgatgtcatcaacataagttagcacgtttctgcctatttgagattggagaaccttcgcagtcattcggctgaaacttcctccagcgtttttgagcccctcaggcatccgaagatagcaatatgtgccacttggagttatgaagctagtcttcggctcatcttccttcttcatccaaatttggtgatagcctgaataacagtctaacagactcatgagctctgaagaagctgctgcatcaactaaagaatctatccttggtagtgggaattcatccttcgggcaagctttgttaagatctgtaaaatcgatgcacattcgccacttgccattggccttttttaccataacagtgttagctagccattctgggtacttcacttctctgataactcctgcactaaggagtcttttgacttcgttgcgagcgccttcggccttatcatctgacattttccgaagcctttgctttctgggtctgaaggatggatcgacattgagtgagtgctcgataacatctctattaactccgcaaagatcattggctgaccatgcaaaaacatccttgttattgaacaaaaaccttatcaaggttttctcctgctcttcggataactgagatcctaacagcaccttctgctctgctatgtcctcacataagagcataggcttcggctggtctgctgaagctgctttctcccttctgaatttgtactgttcacaagcttcagctccatcgatgttatggattgcttttgagtcagtccaattaccttcggcccttcttgcagcttcctgacttccatggatagcgatgggtccctgatccgaaggtatcttcatgcaaagataggcaggatgaaggattgcttcgaaggcattgagagtaccacgaccaataattgcattgtaagggtattccatgtcgacaatgtcaaacacaacttgctcagttctagtgttgttgatgaacccgaaggtcactgacatggtgatcttgcccaatgctacaatctgtcttcctccgaagccacagagaggatgtgtagcatcatgaatcttatcttctggctcttgcatttgtctgaaggccttagcaaatatgatgtcagctgcactgcctgtgtcaaccaagacattgtggaccagaaatcctttgataacacaagagataaccatggcatcgttgtgtgggtaatctttgagctaaaggtcctcttgggagaaggtaataggaatgtgagaccatcttgacttgatgaagggtccttgcaccccaacatgctgtacccttctctgtgcttccttcttctgtttcttgttagctggctctgaggacgagccacctgtgatcgggagtaccagcttcggatccgaagcagctccagcttggtcgttgaacgaagccatcagctcaaaaagtggaagtgagttcaccggaggtgggcgccaatgttggggacttgttctcaaatgctataagttaagaacaaggcaacacagagaatgttaaacgataaagtccttcgtcctttgaggcattatttcccttaggatataacgatctccggacgaaggtcatgaaggacgagccttcatcagcacagtatatattaatgaaagacgaagcatatgaaacataaaagatagcatgaataatcatataacatcattcatttaactttattatatcatcatagagaaatagagacaatatcgaattgtaaatgtaccttcggtttggaaggagatgaaaatacaagtgtgacgcaaaatcaaatgccaagtcaacgtgaacagtacgggggtactgttcacctatttataggcacgaggtacaatccatacaaaattacatacatgccctttacatttggtgataattctatagcactctattgaggtctaaatggtcttttcatctttaagtcggttcccttctctgcgaacatgccgaagctttcctgcttcacagcttcggcgctgtgtcaacctttgtagctttttgctttctgatacgagtccgaagatacctgctcacacattttaagccgcttctcccttgaagaccttcggcgacgaagcatagacccaacagcaccattaggtcagaatcctccacacacacacccacgtgccactgagat

SEQ ID NO: 1085 - DNA, 18852 bp, Zea mays
  Intron number 3 from transcript GRMZM2G129065_T01 (locus G RMZM2G129065) derived from phytozome v7.0 (chr-ID 8; pos 1 65211713 to 165230564)
agcttgtattttcgcaccttttgactagtgagttccttatttacattcttatatgatgtttttttataaatgttcctaactcacccaagtaaaatattttgtgactgcaaattgtcttgtctcagtagccatagaattctcttttggtgatgcctactgccatcatgattcctccacaatatcttccattcttgctcaactgattagcagatctgagcttggcaattgtgaatggtcaaaacctaatagtttgaatattagagaaattacatttttacgcataagtaatagcgcctttagaaactcatttgcggtgttattctggttgggtccaatatgaattcctactccacccaggcttatatcctcaagagttgagagcagcatgggtgctcgactactcactaatggaatttagctgggcacatgtggtactcggctggcctgggttcatgaagttagtttctgtggtgcctggatcgattcttaagcccctagaataccaatccgtactgggaaaaacctcgatgattagatctaatctgctgaggtgtaggtaaacataccttcattattgttgttcatggcggcagcgatggtggcgatgtctggaacagtagacccgcctcctcctacttcgccacctcctgcgtgttctggtgaggttggggttcgtcgtcgctggtcggcggtggatctcctcctccagcggcacctgcaggcggagggtcggatcccgtgcccgttggggtgagcatggatcccgatgccatagatcgcagctcttctagtcactacacacgcctagatgttgggacctgtgtggatgtagattagggtttgtggtcgagtgattagcattggctaaacccattggcccccttaatcttatttatatggtgtcatgtcaccggggcctgcaaccaatggttaggatagccaaccctcgatcaagagcgtggatagacgactaggattaactctaccccggttcctgttaaccgattcgtgtagagaacactccctaacacatgagtctcctagcttttgttggagcaaaggccatagccgtcctcgatcactcacccgactgtaaccaaccatgctttagcgcagggcccagaacacccgaagacttcgtttggtaccgacagcgaagactccggtcgcctccgctctacgagaagagggggctcgccgttgccagtcgacggcaggcgaagactcttcacccccacaccatgtggagtctagtccccgacgaagacaccctcggcggccgtcacgagacgaggggtccaacgggcggcgaaggcttcagaaatctttcgtggggcccaacttcggccgtttgtggcatgacctcacttgtaagccccgggggggggtagatttataggtgtgtttgagtcggtgtactttgccatgctgtaaaaacccgttgtggggaatattccaggaatgtagcaggtaacagaggcataatggtacttaggtctactgttgggggtcttcttctccgtcgaaggccctcaagacaaagacaccatcgacaaagtgattttgaagactttctttttctctgccgaaggtcttcaagacgaagatcttgtctggaagcaacgatggcaagtgtcgaagcttccaccatcttcggtttagaccaaatagaggaggaaaatactagctagtccctagtgatttgtgttacgattatgaacaaatgttaaaggttataaatgtacttttacccggactgcgtcccgtgcctataaataggtgaacagtatctccgtactgttcacgctggattgtaatcactctcgcgtcaacaccttcaaacaagtcgaaggtaccaatgaaatataaatcctgttgatgttcatatgtacattatgaaatacaaatgtgaatgaactaatgaataacattcattatttttatgtattctcattcacgtattaaatgatgaagacatatccttcatgacattcgtctgaagatcattatatccgaaagcaaataatgtttcggaggacgaaggtccttaattcttaacaattgtgttgtcttgttcttgatccacaacattcaagaacaagtgatcaacattggcgcccacctccggtgaactcaatttcacgaccgcgacaatggcttcgcaaggcaaccaaactgtggcacgttcagctacgaagctggtgctcccaatcacaggcggttcaagttctgaaccaaccgataagaagcagaaggaagtacaaagaatggtacaacatgttgggatgcagggacccttcatcaagtccaagtggtctcatataccaatcaccttctcacaggaagaccttcagctcaagtattatcatcacaatgttgcaatgattatatcttgtgttatcaaggggtttttggttcacaacgtccttgtagacacaggcagtgcaacagacattatctttgcaaaagctttcaggcagatgcaagtgcaggatgataagatacatgatgcaacacaccacctatgtggcttcagaggaagacaaatagtggcattcgggaagataacaatgccaatcacttttggttatgtttataacacaaggacaaaccaagttgtttttgatattgttttctggaatacgcaggagagctgcgcatctttgtattaatagaagaaaagaaagggggggagagaaccccaatacagcacacacaccactagagactaactacggatcaccgactaaaacatggaggaaacacgacccacaccgctgttttaagccagcaactcatcgacttggaggaaggacagggccttggcaccagtcgtggaccagagcaccgcctcttccctagccatcctaagggccgtaaccaagctgggattacaaccatcaaaaacacacctattcctatgcttccaaatggtccaagcacctaggatcactaaagaattgaaaccttttctcacaagatccgatgcccgggagctgctagacttccaccacgactcaaaggattcctcatgagctggatacagaccccgcagcgccactgaattaaggaaatcaaaccagaactgcctagcaaaaacacacttgaccatcaaatgatttatggtttcagcctcttggtcgcacaaggggcactgctctggtcggtctagccctctttttctgagcctgtcagcagtccagcacctattatgttccacaagccatataaagaacttgcacttcccaggagcccaagatttccacacacgctctgctggttcgaactgaactgaaccaaggaagagagcattataagcataactagatgtataatcacctgaagcgctgaatttccataaatgtcgatcccttattccaggctggagcacaactgcatcaagcacttcacaaagttccaggaattcagcaatgactctgactgagattgcccctttcgcatcggagatccaatggaaattagggagagcatctttgaccaaccgtttgttggcaagacgtaagggcaccaaatcaaacattgcaggagctatgtccttaatacatctcccctccaaccatctgtccttccagaaaagggtattggctccatcaccgagcttagtaataatggctgcagcaatcagatttttaaccaccttacaaacatgaatggggaagtccgcccaaggcctactggggtctgttttctgcagccatggccagcgagctctcaaagcccaacagaggttctttaactcactaatcccaagaccacccaactccttgggactggtaaccttaggccaagccaagaggcagtgaccaccacaaaactctttcctacccctccagaggaagcccttcctcagcttatcgattgctttgatggcccaaacaggaaggtcaagtgccagagctgcataaatcatcttagccgtcatgacaaactgcacatgaatagctctaccagccctggtcataagttcagctttccatcctggcaaaaggctggccactctatcaacaatggcctgaacctggtcccttgtgagtttcttgggagacaaaggcaaaccgaggtacatacagggaaaaactgaaatattacatggcagcaagtcctgtaaacaattcacctcttcttccccacagcagattggaaacacactgctcttttggacattagtctttagacctgaagctgaaccaaataaatgaagaatatccataaccatactgatatccggggcagtaggacatagaaataacactgcatcatccgcgtacagcgagatacggtgctgcatattcctagaagaaagaggctgaagaaacccttcctcagaggctcgctgcacaagcagattcaagacatccattataagaataaacaacataggcgatagaggatcaccctgcctcagtccgcgttgatgcccaatacattcccctggcagaccatttagtaaaatcttggtagaagatgaagctaacaacccgcttattatatcacccagatctgtccaaaacccagctttttcaagacctcgagaagaaaggcccacgataccgagtcaaaagcctttgaaatgtcaagcttgagaaggatacgagcctgcttctgacaatgtaagaatctggtcgtctgctggactagcatgaagttgtcaagaataaaccgttttttaataaaagcggtttgattgggggaaaccatattttgcagccggtctgctaacctgttagccaacaatttagttaccactttcgcgaaactatgaaccagacttattgggcgaaagtctctcacactagtggccccctccaccttgggcagaagagtgatgaatgctgaattcagcgaacccaagtttctgaaatttctggcccaaatgcagtgaatggccgccataaaatcagccatgattaccgaccaacaactcttgtaaaatctaccagtgaacccgtcaggacccggggatttgtccgaagggagagccttaattgtatcccagacctcctcctccgagacaggcgcatccagggcaacgaggtcaaaagatggcatccctagagcatccagatcaactgtaacatcccttacttctgcagttccaagtaacccttgataaaaattaaagaaggctgctgcatttccttcatgggcagtccagatttgcccatcctctgagtgtattgctgcaatgaaattctttttcttcctgaaccttgtttgtgcatgaaagagagaggtattggcatccccttcattgagccacccaatccgcgatttcaaccttgccacagtacgagagatagaagacagggcaagggagtgcttcttgagcatgttccggagccacaattcagcatgagataatgagcgattgtcctgcgcaacctctaattgatgaaggagctccctagccatctcaagcttctgcttaatcttcccagcttttttgtcattccagctctgcagactcctagccgttgcctttaacttcttggccaaagtgatcggtgggcacggccctgcaggaacagacgcccaagaatgagctaccacatcattaaatccctccatcttaggccagaatgcttggaagtgaaatctcccttttcctctgttgaaatcatgaaacccaagcaacaaagggcaatggtcggagtcatccgtggctgaactctggagaagagaatctgggaattgttcctcctaatctgatgtgcagaaaaccctatccaatttgaccagggtaggattagagtgaccattcgaccatgtatatttccggccaatcaacggaatttcattaagggccaaatcatttgcccatctcctgaacctgcccatcatggcacggtctaagttattattattcttctcttcctcccttaaaatcggattaaaatcccccagcacaagccatggcccattacaaagagctctaatttctctaagagattgcaaaaactgaatcttctcttggttcccttgcggaccatacacacatgtaagccaccaaggggggctggtgcttgaatgaaagttcacagagacgctatgatcattcaccctactgccagcacaaataccaatgctatttttccaagccaccaagatgccaccactagcaccaacagaaggtaggaatacaaaattgtcaaaagctggacctagcatccgcaatacaaggaaccgagaaacatccaccattttagtctcttgaagacaaaccacatcaactcgagcagaatccaccaaagtacgtacaacatcctgtctagcagacccattaaggcctcgcacgttccaaataagaatttttgaaggatccataagaattgaaaaaaagaacgactaccagggagggacccaacaaatcagcagattggtccgccctgcaacagctccataggcctagaccagtcgaataacgctgccatggccgtgacctgcacctcggaaagccctttgctgaaaactctggcatactcatcaaggtcttttggcctaatagttacagtctcttcagcattcacaataccaagttccttcaaaatatgtttcttgccctgcgtggccggtggaggagtagccagtctctccactcctgcaccagcgacccttctattgtgtcggggtaccacctcagtggctgtagccttgccctgtcgcggccttctgactggcgccctcagaatcccacctgctggtctggtcagcttatcgatgaactcttttgcacccgaagggggggacggggacgcgccaagcagcagactgggttgactatccttcttcctcctctgccgaaagtaagtaatgatggggcttctccgtgataggcgactcgacgttcgcgcatccaccaaggctgacttctgccctcccatgtcgaatgtggcccgagatggagatcccgggggtagcacctgaattgcctgctccttctcgcatccacccatagagcaacaaactgccggagctctcaagggtgaagagggggaagatggtactggcaggggggagtgagatgggcaaccaccggacagccccgacgccccagcctccaccatgcaggcctgctcatgtctcctgccgttactctccacattatcttctgacgcctcaatcatagccccaatatttaattccttgacagcagggatatgctcctctaaattagaagaaccatttaaagatgcctccttggaaacctcctgttccaacacttcctgtgaaatagccacgtggcggggacagattggcagcggtcctagtctctcatgcacggggcgccgaacggccaacgcttcgacagggcctccctgccttgccggagaagcttgttgcaggcgacgtcgacgagacctagtgtcccgatcatcattagacgccggcggcgacgggggaggggaaacatcgcccgccgacggagagatcagagacaccgaggccatcacctgataagctagaagatgcttcacagtggtctccacttcaaaactctgaaccggcttcagaatcaaaagatcaacagcaaccggaatgagctctggatgccggctccaaccaagaaccctgaaggaggagaagttcagacgagcaacagtgtcgggatgaagctccaatgccgtgcagtgcgctcgcagcaaacttctagcagtttccacactccatgcgtgcaacgggactccctcgaagctcacagacacaaaggaaggcagggaaaccgcttcagcgtgtgcaagccttgaccacttgatgaacttgaaagacccagaaggtgagttgagaacagctccgttgttgaagacacgtaacaccgcttgctcattttgcatgataataacgaaatcttcaggcaccgaacggtggactgaaaaacttgcaggatcaagctcatactccgctgcaatttctgccgccaaaagctcagctgtcaccggcggccgcgaaccaatgaccacgacgaacagagcacaatgccgaagattgttctccaccagagttaaatcccttgcacgctcaaggacgcaaaccggccgtgccgccgaacctgcattcttcaccacggccgactgatgtgagggtagccgagcggagctgtcatcatccactggtggcaagctagcagcgctcctagatcggggccttctccccctggtacgatgtcgacccttcttggtgtgattcatcgactgtccaggcccgtcctcagcagcagcatgtcgaccatgatccatgggaggggagaccctccgccaaaccagcctccgcttagagaacggaactgaaacctccactggttgactgcctaagcgctcccacacaggacggccgccggacgaggcactggccacgttcagcctacgagcgacgagtggatgcaggtcaggaccgccggacaaaaccttggtcacgtcgtgccctctatcggcgccagggcattcagcagcacggtggcccggccggcggcagcgcaagcagcaggacggatgtcggcacgcagccgcacgatgggacgtcgccaagcagttgaaacacctcccccggagatcctgcgggaccggtcgacggggaaggggagggcgggggcgctcagccaaacgacgacgacgacagggaccacctagtctccactgtaatccagccctctgcgtctgatggcggcgaggccccgtgcaggcgacggctaccatggtagttcttcaacctcacgatcgggatggaccaccccgaagagacgttggaggaggtcgccggcctagcacgagatgccggccgagcacgaaccgccggctgggagagcacagccgcacagaaggtctttgcagcggacgtcccaccagcaccaaaggagtcgccgatacgtggcctacaagccggcgagagtgggccggagtccgcccagcgttgtgccttggagcggccggctgggagagacggcacaacagcagcggacgacgaagaaataggatcaggcgcgcagggagaagatgagaaggccgccgggaaggaaacaacggccgggaaggtggtcgccgagcccggggtgggcgtcgacgagaggctgtggggagggcaaggggcggcgccggcgaaggagggggtggaagacgaggcgtgaggggagggggacgaggcggcccgggcaggagccgaggcggccatcacgcattgtctcaagttagctgtttttgatattgttgatatggaatatccatacaacacaatcattggtcgggggacattaaatgtctttgaggcaatactccatccagcatatctatgcatgcagataccatctcaccagggtctcattgttgtgcatggaagtcaagaggctgccagaagggccgatgggaactggacaaattcaaaggccatcgataacatagatgaagtcgaagctcatcagcaatataaacataaaagggataaggctgcctcagcagatcaaccaaagcctatgcttcagtgcgaagacatagtcgatcataaggtgttgctggggtcccaattgtctggtgaacaagagaaaactttgttgagattcctgttcaacaacaaatatgtctttgcttggtcaaccaatgatctttgtggggttaacagagatgtcattgagcattcactcaatgtagatccgactatcaggccaagaaagcagaagctttgaaagatgtccaatgacaaagccgaaggtgcaagaaacgaagtaaaaagactcctgagtgccggagtaattagagaggtaatatatccagagtggttagccaacactgtgatggtaaaaaaggctaatgggaagtggagaatgtgcattgattttacggatctcaacaaagggagtcactatttgtcttcctccgaagccacacagggggtgtgttgcatcatgtatcttatcatcctgctcctgcatctgcctgaaagcttttgcaaagatgatgtctgctgcactgcctgtgtctacaaggacgttgtgaaccagaaaccccttgatgacataagatataatcattgcatcattgtgatgataatccttgagctgaaggtcttcctgggagaaggtgattggtacatgagaccacttggacttgatgaagagtccctgcaccccaacatgttgtacccttctctgtgcttcttctgcttcttattggctggttcagaacttgaaccgcctgtgattgggagcaccagcttcgtagccgaaggtgccacaacttggttgccttgcgaagccattgtcgcggtcgtggaagcgagtacataccctcccagttacttgtaaatactctcgttctgtacacggataggacacacataacaagacgctacagttccctaccaaccgttttgtcgtgcacctgagccctttcgtttcccgagtgtctgggcccacctggccacgtgtcagcaggtcccaacactttaatccataaatggatctccttaagtgacatctcgtatgtttttaccgcacacgataaaactttttggttgtgccatgaacacgttttctactaactctccattgaagaatgttgtatttacatccatctgatggagttctagatcaaaataggccactaatgccataatgatccggaatgagtctttcgttgagacgggtgagaaggtttatggtagtcaatgccttctctctatggatgttgtagttaatcctttggctaattcacctcccttgttgtcctttgaagtgaccttgttgccatctccagccaggtctgctgagaagttgatcggtgtggaagtctaagacggatgaattacacaaatgaaggggtgaatctacctgaaatcgatcatttggagactcctccaattgggagtcctcaattgtccaagaagctcatagtttattcaagaaagaggttcatcaaaaagaatatctcataaaacaaggatgaagaaatgaaggggcctcgatctccaagtgcatcagtgttggggggtacaggtttgaatgtgggtctgaacgctactgaagaaaatgcagtgacaacggttcaggagactgagttcagttcagccgctagcgttgatgctattcagttagctccacaggcggctgaaacgaacattctttcatatgtgcataaacaattctttgacaaacttgccaaagaggtctccagccttcttgcaacacctgatgatccttctttgacgttgaagagtgcccaatcttctgctgttatcccacagcgcagttgtcgacttgcgggggtgggggttcaatatgacaagcaggatttatgctcaaggttcactaaaagagtcatgaaggccctgaaagtgattggggactcggagggaatcagccaacaagccatagaagactatctgaaagttttctctaaagaattgcctctttctcatgttgaagcattggcagcattctttggttgggcggtgccggatgaattaaagataggcagtagccagtagcatcaatgtcattgctgcttgttaattctcctgccctgatgtagttgatgtaaaatctgttaaatggacccaaagaaaatttttagttggaatgtaaggggccttaattctgcatctaggcagagttcagttagaacctttattgaatcctgtgctgcagatttagtattgtcctcaggaaaccaaaatgcaaagaatcaataaaggaaaggtgttggctattttgggagcagattttgatcaattcatttctttaccatctgctggggctagtggaggtattctggtatcatggagaagacatataaagttgacagagctaaattgagtggatgcttataatgtctcagtgcaatttcagaaacctaatggtcaaccctgttggttaacttgtgtctatgagcctcgaagtaatgatgaaaagatcctttttctacaagagttaaggcaaatcagaagtacatgtcttgatccatgggttgtaggaggagatttcaatctaatatacaaagtggaggacaagaataatgacaatgtgaacagagcaatgatgggccaatttaggaagtttacaaatgatgtcggtcttattgatgttcccctcattggtagcaaatagacgtggtctaaccaccaaatttcgccaacgttggtcagactagatagagctctttgcacttctgatttagaggctatgttacctaatcatcttctttagagtgctgtgtatgaggactcagatcattgcccactgattcttgggcttaacagtaagtgttctggcaagcgtagattcatgtggcttaatagtaagtttatcaaggttggagtgataaaaaggtaggtcatgtggcttcccagctggcccttgctagagaaatcctgcatcaatttgaagttgctcaagattttcggctcttgtctccaatggtagattggcttatgaggggtcttaaaaagcattcactagcccttgcttccctcaagggtaccattgcccgtttgagatcaagaatcagctggattaaggagggtgatgccaattccgaattttttcatatgcatgctagatacagaaaaaggaagaattttgtcgccaaacttgtctcgggtagtgacacatacactgatcatgatgagaaggccaaagcgatggatgggttttattgtaagcttttgggctgcagggtggacaaatccatgactgttgacctggacttcttgggtttaccctctcatgacttgactgatttggatgcatcgatctatgaaaaggaggttcttgaatctataaagaagcaaccatcatacaaggcgccaggtccagatgggttcatacttcataggaaggttttataaagtgtgttggccaattatcaaaggggatgcgatggctgttatttctgcaatttggagcaggaactttgggaaatttggtaggttaaatacaacttttgtaactcttatccctaagaaggaggggaaaggattttcgacctatcagtttagcgcacagtatctccaaggttgtcaccaaattgatggctaacagactgtcccataagctgcatgatttagtttccctaaggcacaacacttttattaaagattgtttcatccaggacaacttcatgatgatacaacaaattgccagattgcttcatcaacaaagaaagccaagggcacttctgaagctagacatcaccaaagcctttgatttcgtctcttggcctttatttcttgatgtaaggggccttaattctgcatctaggcagagttcagttagaacctttattgaatcctgtgctgcagatttagtattgtcctcagaaaatttttagttggaatgtaaggggccttaattctgcatctaggcagagttcagttagaacctttattgaatcctgtgctgcagatttagtattgtcctcaggaaaccaaaatgcaaagaatcaataaaggaaaggtgttggctattttgggagcagattttgatcaattcatttctttaccatctgctggggctagtggaggtattctggtatcatggagaagacatataaagttgacagagctaaattgagtggatgcttataatgtctcagtgcaatttcagaaacctaatggtcaaccctgttggttaacttgtgtctatgagcctcgaagtaatgatgaaaagatcctttttctacaagagttaaggcaaatcagaagtacatgtcttgatccatgggttgtaggaggagatttcaatctaatatacaaagtggaggacaagaataatgacaatgtgaacagagcaatgatgggccaatttaggaagtttacaaatgatgtcggtcttattgatgttcccctcattggtagcaaatagacgtggtctaaccaccaaatttcgccaacgttggtcagactagatagagctctttgcacttctgatttagaggctatgttacctaatcatcttctttagagtgctgtgtatgaggactcagatcattgcccactgattcttgggcttaacagtaagtgttctggcaagcgtagattcatgtggcttaatagtaagtttatcaaggttggagtgataaaaaggtaggtcatgtggcttcccagctggcccttgctagagaaatcctgcatcaatttgaagttgctcaagattttcggctcttgtctccaatggtagattggcttatgaggggtcttaaaaagcattcactagcccttgcttccctcaagggtaccattgcccgtttgagatcaagaatcagctggattaaggagggtgatgccaattccgaattttttcatatgcatgctagatacagaaaaaggaagaattttgtcgccaaacttgtctcgggtagtgacacatacactgatcatgatgagaaggccaaagcgatggatgggttttattgtaagcttttgggctgcagggtggacaaatccatgactgttgacctggacttcttgggtttaccctctcatgacttgactgatttggatgcatcgatctatgaaaaggaggttcttgaatctataaagaagcaaccatcatacaaggcgccaggtccagatgggttcatacttcataggaaggttttataaagtgtgttggccaattatcaaaggggatgcgatggctgttatttctgcaatttggagcaggaactttgggaaatttggtaggttaaatacaacttttgtaactcttatccctaaggaggggaaaggattttcgacctatcagtttagcgcacagtatctccaaggttgtcaccaaattgatggctaacagactgtcccataagctgcatgatttagtttccctaaggcacaacacttttattaaagattgtttcatccaggacaacttcatgatgatacaacaaattgccagattgcttcatcaacaaagaaagccaagggcacttctgaagctagacatcaccaaagcctttgatttcgtctcttggcctttatttcttgatgttcttcggaaacttggatttggacagatttggagagatatcttaagtgggttattggccacttcatccacacaagttctcctcaacggagttccagggatgttattaatcataagagggggttgaggcaaggggatcctctttcatctatgctttttatattggtaatggacatccttgggtgccttgttactaaagcggaagaggagggactgctgcaacctctctcctccaaacccatacaacacatgctgatgacacgtttttattttttcatccaagggagaatgaaatacatattgtgctcaatattttgaagctattcagagaagcttcaggtttgaaaactaatattcagaagagtagtttttatcccatacaatgtggtgatgaggatttgataaccctacaggatcagcttccatgtgagctcatattttctcagtaaataccttgccctgcctctatcttaaaaaaactgtccagaattcaggtgcaacccattattgacagagtggctgatccaatgtttggttggaaagcggatctaatgacaagggctacgaaaggagtgcaggtcgctaggtccaatatgtgatgataggcatgctcatttatttagccttagcagttgacatacccccaggatcactcaaggctattgacaagatcagaaaaggctttctctaccgtggaaggaaagatgttacaggaggacattgtttagtggcttggggcagagtatgtttttatttttatatatttggattttttatatttttatatagtatattttgatttaatcaatttatatagtatattttgatttaatcaaataatatatggaccaaagaaagactacttcttctggttctggatcaaaaattaataaaagaaagaaatccattttttttttcaaattttaaaataaggaataaatcatgtatatatctaaacaaccttttcgtaaatctaagcaaccctttcgtaaatccaaacaaacttttcataaatctaagcaaccttttcgtaaattcaaacaaccttttcgtaaatctaagcaaccttttcgtaaatccaaacaaccttttcgtaggcgttctcgacctcttgaaattggcgatcttggtatttctagtctcagaattgggatgggccttgagaatgagatggctatggctaggcaaaacggaaccggataaaccttggtcctcgctgcctatgcggttctctaaaaagatgaaggcctttgccactgccatgctcactaaaattgggaattgatcttcagccttattttggcaagattattgggttcatggaaagaaaattgatgacctagctcctagataggttgcagccgttccaaagaagattaagaacaacagaactgatcttgaggcgttaacaaatagaaactggttgacaggggccttgatagtaggtgtgtttgctgatctcctagatctctggggtatgcttcaaacaattcagctacaacaatatggaggacaaacatatattcaggtttgctactgatggaaactactcagcaaaagctgcctgtaagggattcttcattgggtcgacccaatctgaacattgggaatcaatttagaaaacttggtcaccacctaaatgtaaattcttcctatggctagctgatttaaggtgttggacagcagaccatctagagaaaagaggattaagtcatcctgacaaatgtcctttgtgtgactaagaacaagaaaatatataccatatattggtggggtgtctttgctaggaacttttggttccaactgcttggacaagttaatatgcaaggttttgctcctcaaccggggaagagagcactatgcagtggtggagtagaaatagtgaacaactgtaggggattgcaaaaaagggtttaattctttgaccaccctcgtgttgtggactctctggaaccatagaaatggttgtctttgacataattaaatccaacttggaggtagctatcagaagagctgaagaagatattgttttatggaagttcgttgggccaaacatcttgctcttcttacagctcccattctaggtgtcttgtaggggtctggtagagggagtttgtggtaacattaaagatgaatatgttatttggtgttgagctggtgcgtcggggctgcgtaggtgatgggctttttaggtgttctatcatggatgctttcatgtattctaagttgcggccaccatcatgtgcctttcctttgtgtatgtacttgttctatttttggatccttctttctttcttaatttaatgatacgcggctctcctatgtgtttgagacaaaatttactaaatcgaatgatacactatctgtcaccgaagtgataatgaacattctgatcatctagtctagaaactgaaatacgattctttcgcaatgaagagacatagagtacgtctttcaaaactaaatggaaaccataatctattgctatgactagatctccgacgatctctacttctgcttcctttttctttggcctttaggagcctttaggtggcaaataaaaaggaagcagaagtggaggtcctcggagatctagtaatagcattaactgatgattttcatttagttttgcgagacatactctatgagacatactctatgctcttccttgcgaaggaatttttttcagtttcaagactagatgatcaggatgttcattgtcacttcagtgacagataatgtatcattcgatttagtaataaagatgttggtctcgtcgtccgatgagatttgttttatttactttcacacagtaatgttgttaacgtcttagacaacagaaaacgttccagacaacaatggcaagaaaacaaagagaagtgatagagagacctcgtcgaaattaagggagagcttgtcatcttgaatcacatgggctacagattgcaacctagtaaataattttcgttctgaagcaggggagcatattgtagtcaataagtgcggtgatacttaattggtcattatgtgtaaccttgtcgaaggatggaatccagaaaaaaagaagtgtaaggaatatagagaacaaaggggagattgtttgggtgtgtcccctacacgagcttgttaacaggaaccggggtagagttaatcttaaccgtccattctcgtccttgattgggggggggctatcctaaccgttggttgcagccccggtcacacgtctccatataaatagattaaggggcccgacaagttagtcaatgccaatcgcttgacaacaagccctaatcgacatccatacaggtccctatcacctaggttttgtgtagtgtctagaagagctccgatctatggcgttgggctccatgatcaccccaacgtgcatgggatcttagccgcccgcacgtgctactggaggagatccatcggcgacggcgaacaacaacctcgccagaacacacatggaggtggtggagcaggagatgggtctacgatacaagacgtcggcaccatcgttggttctacttatcatcgaggtttttctagtacagattggtattataagggtttaggaattgatcataggcaccacataatctaacaactctttcttatatactacgcaataagagctacatagcaaaataaaagttgtccggagtatttcttctagaaaatgtatatttaggtaaatagaacgatcgtaccgatatcagggatccacagaattgcgatagagcttcatactgcatatcgtcttctgtttttgctagatgaaccatgatggggttcaatggttgtgatctgatgttttcgctgtctgattctgcaggttggcgagtgccggctagctgactattgac

SEQ ID NO: 1086 - DNA, 2965 bp, Zea mays
  Intron number 1 from transcript GRMZM2G144645_T04 (locus G RMZM2G144645) derived from phytozome v7.0 (chr-ID 7; pos 8 258036 to 8261000)
tcttctcgccggcgacgagcacccaccacaacaaggtattcccaccccttgtattccctccatgtgaatttcggtctgccgcggcccatggaatcgacctgccaccgctgcacgcaccagccctctcgcagccttcgctgcacgtgctgctgctccggccagccgtgccccacgcccccgcgccgaccagtcagccccagccgcgcccacctcctggcagctgcgccgctgctccagctccggtcaaccacgaccgtgcccccgcgccatgcaaccgcggccccgctccagcccgcgccggtgaccggccagccttgcccctgcccctgctagggcgggccgccacctagctccagcaggtagcagccacgtccggccagccggccacagcctggtgctcaggccactacttgaccagccagcgcctagaatcgctgcccgccagtcaacgccttagcgctcacgcctggcgagctactgatagtataacagtattcaactattgattgttgattgaacatttgaactgttgattgaaagactagaaagataaatttgcgttgttccatcttgagttattcaccatgctacttttaaatttttagtactaaataatagtttacttgaatttgaatgttagaattatatagatattttcttgaaattgtagacactgtttggttccactggctaaattttagtcaatgtcatatcggatatttggatgcttgttagaagtattaaatatagtctaattataaaattaattacattaatgaggactaaacgataagacaaacctattaaacctaattagttcataattcgcttatgtgatgctacaatgaacatttactaatcatgtgttaattaggcttataattttttctcgatgtttagtcttcagatgtataattagttttataattagaccacatttaatactcgtaatttgcatttaaatatctgatgtgacacagacttaaatttagtgagtaaaatacatttccggtactaaaacttgtctggctgtgtcaacctgattcataaacttttaaaatatatctcttaagggttggatctctgtttgggtctcaattacatcctaacaggttgttgtggcctacatgttagtcgtcaaggaaggagagagaaaggtggacgagatccaacagaccacgtcaactgacatgtgggtcacgtcaacccgttgagacgtaatagagacccgaacagagattgagcccttaagagacatagtgacatactttaaaagtttatggaccgggttaacacaaccaaacaagtttaaggaccagaaatatattttactcaaactttagttcttggaacgaaacacccccttagtctacattaaatagagattgtaggttaaatttacacgtttataacggtgctcaggctttatttccgggctggctctgccacttgtgcgaaaccgagcacccaaaccttaacttagagcaatttggctgcttgatgctgactaacttcgagccttttgcaaatacatagtactaattgtcatgtgtatgcccacacccctttactgggtccgactatgcacttgtatactgcagcagtgaggtcgaatttcacgtctccctaggattccttctaacttcattcaatatgcgaggctatattaacagtttcatgaacctcagtgcaatagagttcaaacctttacatgctacaaaaaaagttcaaatccttacaatgtcatgtcctacacctcatactggactcagtttcatgtacgagtttcaagtctctggctcagttcacccagactgttgtctgatgatattcttttgttattgttgtaaacctatagtgttgtcaggttgatacctgcatcaatttcattctgcgtttcacatgaaaagttgaggaactgtgttgatcctgtaatgattggcacacagcgaatgcagctcgctcgaccattctcatcgttatgtaatgattgtaacatgtgaaattaagggtatagcctgcagaaccaaccagataggaatgggctttcaggttaagactaaacaaaatctcataatagcagttgtaatagatgtcaatagagttcaaacctcaggaacttgtttttgatgggcagacccaacccagctaatgtgtcatcgatatagtagccttccagttaccagctctagcctccaggaggactaaatcagaacttgtttgatgtatgttatgtttaataagatattgtattgtttttaatactttattgtgtatttgattatacagaattgcatatggtagaattggctagggtcataatggttcaacttctgggtccgccactcatactggatagtagtcttacagtgatttagatggatgtatcttgttttccaatctgaattcattgattcaagattcaatatatggatccctaggtttatactcgatgcataaacatgacaatatgacactgttgaagtgtataagtggattgtctaccttctcccattagcttaaacttttggtttgaactggttagtatgtctactttaacaagtttgaattctgccagagactttatttgtgcctccacccatttatttccaattttgtgcctttctctctggctgcacgtgagtaggggtgttgaagtgtataagtggattgactattttcttccattagcttaagtttttgggttgaactggttagtacgtttactctaacagacactacttttagaaccctagtagaatagtatattctcttcctagtcaaatttgtagatcagatcaatgttaggaattcagtagcaatacataaacttctgcttggttatatcttgttttattcttcttgttatagatgttcttctcttgtgcctctttaatttggggaatgtggttcctgagttacgttcttgattttttctccagtctttcacccacagaaggcaaag

SEQ ID NO: 1087 - DNA, 1133 bp, Zea mays
  Intron number 3 from transcript GRMZM2G430616_T01 (locus G RMZM2G430616) derived from phytozome v7.0 (chr-ID 4; pos 1 18539713 to 118540845 reverse strand)
tcgagaggagaggtagtggttggcggacacagtacaacaaaaggctataggactaactgtattgtatgtgatattctgtgaacttatatatttggacttgtgtgaatttgtgatatgaacatatatcaatgtgtttgaaatctgtattgtatgtgatattatgtgttgcatgtgatattatgtgtgtctaatttttcatttctgtattttttattttttctggaaaagggttaagaacgtgggtacccaagttcttaatgttaagaacttgagtaccgtcgaacttaatgtgcagtcctcgcagacccacgcaggacacataagttcgacggccacggggccccgtcgaacttaaccgtaagaacgtgggtacccacgaacttatgggaaaaaattcgacggccccatcgaacttaaaaacgcatgttcttaatgttaagttcgacggtacccacgttcttaatgttaagttcgacggtacccacgtttcttaatgtttaagttcgacggggccgtcgaacttacttctctaagttcatccaaaaatcgccgtcagctatatttgtcggtaaacccacgttcttacggtaagttcgacggcttattacattaagttcgacggtttgtcacccacgttctttaaccagtttcctgtagtgagagttgtgaaactaatgtttttacctaagtgatctatgtagtttcacaacatgagaatgagttactcaaatggactatgcaattaaacgtataaagaagaacaataaaaaactatgtgatgtattatctcttgtacatttggatttatttcttctacattaaatactcaccatgtgaaaagacattccgcgtgttcaaattggttactcctcaccaaaaagtcagaaaagaattgctagaggcaaagtggtacttaattggaacaatcaaaagattgatcgagaaagagagcaagcaacacattcaaaggcaaatcaagcaaatatgattgatgtttcaaacatgaattgattttaagtattttccaagtatttttggtttgacatcaattcatgatcgcttatactcaaatcatgtacattcatgcaaattacttatatatggttgaatactaatgcttggtgcagtcataa

SEQ ID NO: 1088 - DNA, 11103 bp, Zea mays
  Intron number 8 from transcript GRMZM2G448258_T02 (locus G RMZM2G448258) derived from phytozome v7.0 (chr-ID 1; pos 2 08808658 to 208819760)
tacttaagaaaccattatttcctggcagaactgaggtatgatgcatacacttctcatttgtgctcttgctcccagcgctatttttcctataataagtgaactattatttacatgagatttggttttgtgaacattgaacatgatgagtattttatgttgtacacacaagattagattgattgattgccatgtacatgatacatgtgtatatactataggttttgtcaaagctagaggccgtagtaaccctagggtcatccggtcatgggccttaggccaaccatgctgtaaacctaaccagcccactaacagcctgtcacatgcatgatgcacaaatacaaaaaatgtgcgtatttatctatttttttactattatatgatccctattgtactttgttctattatgcattttttgttacactgatatcatagtttttaaggcgataagacgaggtaaggcgactaacccgagaagaggtttaaagagatagctctgctagcctgctcaccaaccagcccagtccagcccattgaccaagcagcccagctcactgcacttaatttttaggtctaggtaggcctctcgacgacccatggccagcttggcatcatcccctgcgcccttatcgcctcccctcccatcttctttgttttttttcttctacctctgtccaggcaccacacaaggagcagctccattcatggccgcatccccgccacttccctcaatcaattccaaatccctctcacccataggtcctacaccttcctagttccctcccaaactagttctaccccagcctcaaactacatcgtattgggaatttcagatctcgtggacgcggtttgtcgccgccaccgagcttgagctcaccgccggcgacccccttttgacctgtgtattctccatacaacacattgtattgcttgctggtgagttcctattgctcatgcccatcctatctcttgacgttcattgagtttccagtttccacgatcgccttactcaaatttctaaggctaggcggcaccttaccattctagttggccttaccgcttaagcaacacttcaaggacgccttaaaaaccgtgactgatatttgttagatgaacatatctatgttatgtattttttcactattataattggtttagtgcatattgtaagaaccttgttttccgctttggggactggcggactgcaatacagtgtgattttgcatttcctaacatggtaataaagctaggtttaggttcgagatccatttacctggttaccaccattggtgagccgtcagtgaggtggttgtgcaactctccctctcccccttcctgtggctccatctcacgctttcgttttgtgtgggtccgtgccgtgcactttcactccatggcacagatcttcgttgaggtatattctatagaggtagccaaattagatcagtgatcgatttctaggcttcattgtaaatctaaattgttacttttaattatgtaaattaatatttcaaagtgcattcaaaggtagggcatttcccattgatataggaacttccgtaccaggaataatagtatctccaattatagccgaatgtaaaatatatctcttttcactatcctcatagtgcatgagacaaaagtatgcatttctattagggtcatattctatggttacgattctaccagatatctttttgattctgtcaaaaattgattttatggtataggcgcttatgaccttgccctctatgccttgcggtagtgatttctctggcattacgacctttaccacaatggtgccatccacgaaacgtgatgtcgtggctcaggtgttggccccacacttgcttgttgcaaccgcctctgccctctacctcgcaacccctgtcttgtggcttgcatgttggcgctgtcgcatgccgacgcttgcttaagcctgctctgtcgagtcccttcgcactccgattttggccccgacctgctccgtctggctcccttgcttcggcatagttgtgccaataagcgaccaacctgtccttgtgctatgctatgagccctttgctttgctctatgtacaccaaaaaaaagaagagaatgagcacaaccagtggacctcatggcatcatccactcgtcccaacgtcgttctagttccccggtgactagttatcttcgatggcatcaaatgggggctgaatttttcttcaacatggaggttcacatgggtggtcaacaactctgggggtatctcattagtgagtgggcatgtccatcttgtcgtgctcttccgatgcttcctagttcccacatccgtcggatgttgccgatgatgctaagagcactttgcttgaggtgttcgatgttgccatggaggactaccagtatagacgatggagaagttccagttcggtgaagacgatggtgacttcaaagaggacgcatggcaacaatggtggccacaccgaccgtgactgtgatgttttccacgaccatggtgattttcacgatcgtgactacatgaacctgacacctacttcacctgcgtgaccatgatggctaatcataccatgatcgacatctcgattggtatgttcaccacagctaccctggcttcgatgaccacgatgaacgccgcgataggcctcgcccttcgaagatcaacttctcttgcttcaacgacatgtccgatctgctcatgtggctgaacaagtgtgacaactacttctgcgaccattgcaccatggagaaggtctggctggcatccttgcatttagatggcattgcagcggactggtttactagacggagcgcaacttgggcctcggttcatggccgtgcttcgttgagtttgtcaacttgcacttgggattgccaattcgctccaacttccttggtgaactcaaggccttacatcgcatgagcatcttggagtatcaggggcactttgtggcgctgttgtctcaccgtgaggagctcacaacatagcacaagatcgacctctttattgttagcctggtcaaccactggccttcgatgtcgagctccaacacccttccaatctacagtcagcgatgcgtctggcctaaggcatatgagcaccgccaggtcaaggcctcctctgccaccacccacaacaatacctaagtcattgagatgttatctgggagtcaacatcatcattcttctcctcggtgcttcttgttcacaagcatgatgatagttggtgttgttgcttcgactattgtgccctcaatgattgtactgtcaaagatagtgtcctcatcttggtgatggtcgagctcctcgatgagttgaaggacgcctgtctcccaccaatattgacctccggagaggtctaaggactaatatccagaagagcagtgtgttcccaatctgctgtggggaagaagatttgaattgtttacaagacttgctgccatgtaatatttcagattttccatgtaagtaccttggtctgcctttgtctcccaagaaactcacaagggaccaggttcaggccatcgttgattgagttgctagccttctgccaggatggaaagctgaacttatgaccagggctggtagagctattcatgtgcagtttgtcatgacggcaaagatgatttatgcagctttggcacttgaccttcttgtttgggccatcaaagcaattgttaagttgaggaagggcttcctttggaggggcaggaaagagttccgtggtggtcattgcctcttggcttggcctaaggttacccgtcccaaggagctgggtggtcttgggattagtgagctaaagaacctatgttgggctctgagagctcgttggccatggctgcagaaaacagaccccagtaggccttggacggacttccccactcgtgtatgtaaggtggttaaaaatttgatcgctgcagccattattactaagctcggtgatggagccaataccctcttctggaaggatagatggttggatgggaaatgtattaaggacatagctcctgcagtgtttgatttggtgcccccgcgtcttgccaacagacggttggtcaaagatgcgctccctaattttcagtggatctccgatgtgaatggggcaatttcagttagagtcattgctgaattcttggaactttgtgaagttgtgctccagcctggaataagggatcgccacttatggaaattcagcgcttcaggggagtatacaactagttctgcttataaagctctcttccttggttcggttcagttcgaaccagcagaacgtgtgtggaaatcttgggctcctggaaagtgcaagttctttatatggcttgtggaacataataggtgctggactgctgacaggcttataaaaagaggactagaccgacctgagcagtgccccctgtgcgaccaagaggctgaaaccataaatcatttgctggtcaaatgtgtttttgccatacagttctggtttcatttccttagttcagtggggctgcaggaactgtgtccagctcatgaggattcttttgagtcgtggtggaagtctagcagctctcgggcatctgattttttgagaaaaggttttaattccttagtgatcctaggtgcttggaccatttggaagcataggaatagatgtgtctttgatggttgtaatcccagcctggtcacaacccttagagtggctaggaaagaggcggtgctatggtccttgactggagccaaggccctgtccttcctccaagttgatgagttgctagcttagatcagcgttgtgggtcgtgtttcctccatgatagtcggtgatccttagttagtctctaagtggtgtgtgtgttctgtaccggggttctctccccctttcctattcttctattaatgcaatgatgcgcaactctcctgcgtattccagaaaaaaaaagttcctcgtgggttgaacacttacaacatgtcaacattgtgctgcaacagatgcacgctcatcacctcttcaccaagtgttccaagtgcttctttggcgaaccatcggtggcgtcggcggtggaggcatgactgcagcctcggatgtctcgtgctctgcatgtgcttagcgaccgggacacgatcttcaccagcagcttctgggagtcgttcaagctagcaggtgccaagctcctgcacaactccgccttccatccgcatacagatggccagtccaaggtgtagttgcatcatcgtcatgcaggctacctgcattggtgtcctacatccgcatacagatggtcagccaatagctctggcaccatgacaccttcatggcattaatttgcaagtgtctcttgctagcccaggacgtcatgaaggaacatcaggacaagaagcggtgcctagtggagtactcggtcggcgactgtgtttggctccgtctgcatcagcatacaactgtcgacaccacgacaacttcctccaagctggggcctcactactttgggccctactagatcaccgagcagattgatgccgtcacataccgtctatgtctccctcctaatacctgcatattagattgaaaccctaaccataaatcagggtaggcatgtgtatatatattgatagagtatgggctgagcgaaaggccctcctgcatcctcgggtatggtgccccagctcccacccctagttcgtgactaccacctcgtctacggtcgtcattctcccgactctggcgtgccctcgactgcctgcatctctccctcgttggcttcccttcccagttcggctccgacatcagcgtcgacccctccaccagagccacgacttttgtcaccagcgttggcccctccatcggagccacatcgtcctgtaactcgctctgcgactggcaccatcccagggtgcagtacaggaacctcaacaccattgctgcatcgccagcacctccatcgatcccggctaactaccgcagtggcctggccgatgccaactcgcgtgtagtcatgaccgatgaattcaaggctcttgtcgacaaccacacatggcgccccgtccctcggtcccttggcgccaatgttgtgacatgcaagtggatcttcaagcataagttccactccgacgacactctttctcgtcacatggcacattgggtggtctgcggcttctcccagcgccatgacatcgactacggcgagacgttcaacccggttgtcaaaccggcaaccattcggatggttctcagtgtcgccacctctagcgcctggtcgaccaaccaactacatgtgaagaacgcctttcttcatggctaggggtgtaaacggtacggatattatccgaccatccgaccgtccgaagaggctaattattcggttggataatttttttcggatatccgcagaattttcggatttcggattcgaattcggataatacagttcggatatcggatacggatatgatatgcctgatatccgtcggatttcggatatccggatatcttctcggataactgtccggatttcatatttcggatatccggatatctacccagatatcttaccagatttcagatttcagatattcggatagttacatgtgaaatcgccctaaatatccaagtttcaacataatcaatacttcactttatcattttcatatgggaatttgaggttatgttcttatgtaatgtttattgttcctggtaacatatttgcaattttcggtcgatagtggaatattttatgaatttaaatgcattttgataattttctatagaaaaaattataatattacacaaatagtctcaaaaaatcatgaaatttgatggaggagcaatatatgcccatatagcatcctaaaaaatgtttgggccataaaatctaaagattgccaacatttctttcaaatcactttcacttgttacatgagttacatgtgatatcaccttaactatccaaattttaacataatcaatacttcactttatcattttcacataggtacttcatattatctttaatagaatgtttattggttctggtaacttttttgaagtttttggtagacactagattattttatgattttaattacattttgatgattttttgtagaaagaaattaataatacacaaatagtcttagaaattcgtaaaatttgacggagggttaacatttgtctacataaaattctaaaaaatgtttgggccataaagtccataagatgtcagtgattcttttcattttcttacacttgttgtgtgagttacacgtgaaatcagcttaagtatccaagtttcaacataacctttacttcactttctcattttcatgtagggacttgaggttatcttcttatggaatgtttattagtcttgataacttatttgtaatttttggtcgatactataatactttatggatttaaatgcattttgatgattttctgtaaaaagaaattaataatatacaaatagtctcagaaatttacgaaatttggtgtatgagtaacatatgtccatatagcatcctcaaaaatgtttgaaccataaaaccacaagatgtcatcaattatttcattttatttctacttatttgtgaaacccgtaatgattacatgtgaaaccaccataataataagtgaaaccacatatcataataacacgtgaaaccacatatcatagttatcaatattttatgaatttaattgcattttaatgattttctacataaagaaattaacaatactcaaaatagccttagaaattcatggatttttatggaggtgtagcatatgtgcacatataatcctcaaaaatatttggactaaaggagaggctaaatgattacaactatgatatgtctggaatggtgtcttacacaatatccgacaaaaatattcgttaccgacgctatccgtgtccgattagctccgtattcgatccacgattatccgtatttgtattcgagaacatccgtatttgtattcgtattcgaagctatccgtattcgaattcgaatccgactaaaaatatgaaaacaaatatgatttcattgatatccgtccgtattcgatccgattacacccctattcatggccacctcaacgagacagtttattgccagcagccccctggtttcatcgaccccaccacccccgatcacgtctaccttctgcaaaagtccctgtacggacttaagtaggctcctcgagcctagtactagtggtttgcttcgttcattcgacagcttggcttcgtcacatcgacatccgacacctctctctttgttcacaaagagggtgtgcagatcgcctacttgctgctctcatcgacgacatcatcctcagcgcctcgtcctcgactctcatatagcatgtgatgaccaaactcacctctgaattcaccatgagtgatcttgacgacctataccacttcctcgacatctccgtcacccgctctgtagatggcctatttctgtctcagcgacaatatgctgtggaccttctccaggacgccagcatggctgagtgtcactctacagcgactcccgttgacactcatgccaagactctacacttctgccagcctcgactataggagccttgtgggtgctcttcaatatctcactctgacccgacctagcatacacggtccagcaggtgtgcctattcatgcacgatccccacgagcctcaccttgcgctggtcaagcgcatctttcgctacgtaaagggcacactcggctccggactccacattggtactggctccattcagtccctcatcgctaggggatgggtaagtttaacaggtccccgcggggaacggggatggggaatgccctgtccccgtttaccccgtcgggggaggacttttccccgtttacatccccgtgggggagaaccttccccatccccatcccctaatgggaggaattccccgcggggaatcggggatcggggccccattgctatctctactcaccgcttactctaatgcggattggactgcctgttcggacttttgacactctaccttcggcttctgcgtcttcctcgatggcaacttggtttcctagtcttccaagtgtcagaccacggtgtctaggtccactgctgaagtcgtcgagtgttgttggcttcgccaacttttgacactctttccatgttctttgagatattctagggatattctagattgatagctttccatgtaattggatatattccatgtactgcaagtcatattgactatatattaaaggtcacccccctccatcagggtgtgtggtgtttcccattgggcgccagtataggcgacacccacgacgtccacgaagcctggcccgtggctagtctagccaagcgtgggaccggtttattggatcaggaaggaagtaattaggaggattagtagaagtgctccaaagtacaaggggcacttgatttgctgtaatcatcattgaagaaggaataaacctcccaggcgggtgggtttcttttcgactatggcgactggcgattcagccgcagccgccgtcgacgaaaccaccgcgccacttcctcgctatcctcagcgccccagttcttgatcccaattgctcttccgatctccactatgcactcctcactgccacgcagcatcacaattcacacacacattactgtgcttccaaatatccaaggccactagggtaatgagtgaattaagcccttttttcatctccttaggcacatccttgattgccggttccaccagcttgaaaatttgctagcagaaaccggactgagatggggctcaacccaatttctgaagaataacaaaccatacctgtctagcgaagatgcaagagatcaacaagtgctggatggaatctcttgtgtgatcacaaagaggacaggtcgctggatgaggaaatctctttgctagatgatcaccagtcgaacatatagttgattgcagggcaaatgaaggacttgcaattttgtgaagcccagctcttccaaattctgctcgatggagcaaagtgaatggagccaagaaagtaagcattgtaggctcatttgctagaataagtactagacctgctgagcttccatcggtgctgatcttcaatcccctcgcaacatattatcaaccaaatcccatagcaagaggttccctctcaggaccaggacagaccgacagagagtgtgtacctttaatatctgagaccctatggggggtctccaaagcctgcagaaccgggtgctgttttatgacttaggaattgttttgaaaagattataggtgccagttgcccaactcagaaactgtatttgctcgcagccacctattggaccagaacgggatgccttccccattaccaactatgaattccacagcaaccttgaaaataacctgagcattttgagtgatttgaaattttgaataggtaatcctgcccaaggcgagaactgtctgtcttgtcaagacaaagccacctaacgcggagaggccatcctaaatacaccagatcatgaatatcaatccctccatattgtagtggcattttgactagattccaggaaaccagacagtttccatcattcgcttttgcttgaacaagtcgattttcttttgattactcaagtccatagatgcatctattcatatcttatggaaagatgatttccatcaaatagcacatctttggaagagggattttatttctttagaccatcagaattcagtacttttttaagaccacctttaaacaaatgtggatgttagcattatggtttcatgcgttttttttttgtcaattagtaccttggacttattgaattgaagtgttgtatatatttgtttttacttttctcagtttgtccagtgatttctgtttgtgttggatatcctagtaataaaacacgttaatggctattttcatgttttcacttatagtcagctcctttaactctttactcgtgagcatgccaacacatttctttacaatatttcctcgaatatggatgagtagtttcagattattgatatcattcaatttttttcctattttgttatgtttatgcttgaaaccatgacagaagcttgtgttttgttttagcaagagcagttatcaaaaatatttgaactgtgtgg

SEQ ID NO: 1089 - DNA, 5543 bp, Zea mays
  Intron number 1 from transcript GRMZM2G353548_T04 (locus G RMZM2G353548) derived from phytozome v7.0 (chr-ID 2; pos 8 9696247 to 89701789)
ctggagcctcagcgacagagatcgaatccattcaggtacccttcactcacgttcttctatccctgtctccttgtattttttgttctttattttttcttctagcgcatcgatagatccatgtcgatcttctgctagttcattcagacccgttgaggttactaacctcctcgttttgcccttgggggtagagatgctttctttgcttcttgcgtcctgtacctagatgtgtgatacagctggctgtcacatatttcaggtttgaatgcgagactggatttcgtaggtgctttcatcattttactagatttctgcacattccaattacttgctcaaagaaatctcgataactgagcatctgaaaggaaatcttgaatggctgctgatgagtgttcatcaagctgcaggttactttgcttctacagagagggacatccagggctaattactcctatcaacatatatacatgcatgtgatgccatctattgccctctttaattttccaaactgaatacattggctcaggccattgaaagtggctgcattcttcaattcctagctagccagcagattttttttcttttaaaaaggccgatctagctcagctaatttctctgttttgggttgatgactgttgtgtgctgtgtcaagtagctggcaaaccatttgtaataaccctctctagctagagtgagactgcttatatatactagttagtcgcacgtgcattgtattttttattttcaaattattagtatatatgtatttacaacatatcccattcacataacacaaacagccctcagctgtagtggtggaaccgcttagttctttaccctgcccgggttcgagccccccgtcatgcccattttttgcagctgagcatgctgggcgcacacacggttcttgctggcgcgtgacgggcgcggacgacgcacgaataaacttgtgcttaaaggtgtagtgatagtgatgtttgtatataacttgctatcattagccacatatatatcttgtcttttttaaagaagcagttgacaaaatggtgatatcaaatataatgtcttgacaatccaattggtctctaaaaagtaaaaactcgatttgttcctctccgtctgtgtagccttaagcccgtaaacatgaaatttaaagatcaaatcaacatcctcttcagataagacatgtcgtgcttctcgtctcttattgtagcttggcacaagcaaggcattgagccttagtaaccaggaactgggaacgtggccacgttccgggaacgtgggaacaatcttgttccagtagtgttaaaacctagttttagtagcgtaccatgtaccacgttcccgttcctcgatcccatcgatccgggaacctggttactaagcattgagcaccctgcaatgcctgggatctttagtactgttggctgatattagtttttctaaaaacctctcctgcataccgtaactaaacatatgttgtttaacaatgtggtgtttggtttgaaaagttaatccgttctagataaggtggtgcatcatgagtccattctccattccacaaattttggtgaaatgaattaatttctcattattattactaatcattagcctatgaggaatgaaatgttgatggataaattcattccattccacaaaccaaacaaaaaggtgaggagtgagaagatgatggactacctcattcctcaaaccaaacaaggtacaagtgtctggcatttaggagctcctgaataatacatgttttgagcacaagcgccgttttttatatcaggatattatgtgctttatttcattatactggatctgtccaaattcaaatacattaaaatgatgatactactctgtattgcgtctcaactatatatgttaaccatctccatatcctataagtgtagtccgtgcataaatgctttgagaagaaggataacatgcataaatcaatttcagagctcatcttttatgtagaacagttaccagttaaattagtccatccagtcacaagaagcagtacttcggacaatggacatagacactgagccgtgcagttttagagagcttttatgtgtgtatatggtttatgttcagaatagatagtccttacgtaaagatccttgcttttagagttttttaaggatgacctgaacagagagactacttctaggctatgaaacaagattttatgctttatggcactaaagaagtgaataagcttggaacacaatcaaacacaagtaagtttgcttatttgtttacaatttttaacaatgctgacactcatatttgtaaccctgtgctgcaggtcgttggctgcaaaagatatgaagatgccttttatccaaacaacagtttctaaacgtaaaatagaacaatagcattcttatgcagaacaatttacagacggaaatgatttgtactatttctcaggtgcaaaccaaccatttctcaggtgcaaaccatttcgatctgtaagttgttgtgcacaagaatactactgttttattttatattttggaaactgctgtttggataaaaggcattcacttgcatctgctagctactgcttgctctgccatgcatgctcccatatgctttactttgctgcgcaacacatatatctatactatacttaaagtaccagtttcaacggtcgtcccgcgtcatatttttacaaataacccctcacagttatttcaaattaatccgctgcatgcctatagatggccaaacggcgcccggcacgggccacaactatggcccaggcatgtcatgccggcctgttgactgtgtcgggccagctcgttagctcgtcggtccatttaattaaatcagcgtaaaatgttaaaaaatgatgcaagagatgtggtttgaacccatgccctgatgaaagaacatcatgccagtagaacatcatgctcagatgtatttaatattgaatataaattgtatatatgtatatacatttttttgtaaaataaaaaaatcgtgtcgggccgggccagcactacgggccgaggctacagcccaagcacggtacaacgttcttggctcttgcaagcattaggttgtttctgagatcacattgacgcaatggactacatgatgtttgaggttgctgaattggatggagcaacaatgatttgtcacactaacagtaaaatgaaaggttatttgttaattttaaacgttagtaattgctacgaagtagcataatttatatggagcgcattcagtttttattgatgcctgactttagcaatcactcaatattttgatctatttttttataagtttgactttatgtgacttattttagaaacttgaactcacaaactttctcttatttggtctatgtatggtggaattatgttattttataatctctgttcgttcagtcagtcgttgcgaactctcttctaattgctcactttattggtcgtgttgtaccaaaatatattgcatggagtaaacaataacatcagttagcctaataaaaaaaatattatacagagagcggagacaatcaataaaaaatcttgaattttttttgatggatagtttacatgggtattgttgtaagccgttgcaacgcacgggcaaccgactagttgtgcttgtatatcccggtatacaacatgatgcatgcattaattaataagtatgttttgtgatggtaggcaagtaactgctgtgacctatcataattctggaaaaagttatactatgttaccatcacagttataaaaaacgttgttcatcttttgcagctacaaacctgcagcaaaaagttataaatatgaatgtagcattgttaaaaatcacaaaaaagcaacttgtgtttgattgtgtttcaacttcaaagcttttttcacttctttagttagccataaagcacacgtcttgtttcatagcttagaaatatctttctgttcagtgcatccttaaaaaccttggaagcaaggacctttacataagaacttcctattctgaacctaaaccttatatacacacaaaagctttctaaaactgacaactcaatgtctatgtccattgtctgaagcaatgttatcaagttgtccgactacttgtgattaatgatgactactttccctaatcggtagtccgaacttgactagggggtacgactcgatttaggtgactagttttttggttgtctgattagttgtcgactaatcatggttagtcaggtgcttgatgaccagacactgaattgaattactaggaaactgagacatgggctgtatctggaatagctagggtatagaacaacacatgtgtggcctcctagctgcctttgctagagtcagggctatttctagtgcttaatgctgtgaaagttggagttaagaatatgattttttctggttgtttcctatgtctttttgtgcctgttatggtattgtactgtgatccacttcggacctttctctctttcaatataatgatgcgcagttctcctgcgcgttcgagaaaaaacacatgtgtgtctatatatattctgcatttttcactcctggagtagatactcccatcttcaataaaccatattgcatatgtgtgcatactctaaatcttactacattatttttccccaaaagagctcatattttactatgttattataatacattatattagtatataaaataaatatgaccatatactctgtatacttgcatacatgacatacatactaccatgtcctagtatgatcgtatactctgtttacatacacttagtcaggccgtacaccataaatctagagatacatactgtaactactccttgggattagaaaataattttttacccccccacacactagtatattatatgttctagactggagtacaaatcaagcatgaagactactacagattggtcagttggttgaagaacataagccacagcggcccaaactattccagatacaacccatgaaactattcgtcttaatcgagttgtagcccctagtcaagttcggactactagctacgagtagtcggatgacttgatagcactgtctctcttaacgaaatgatgcacaattctcttgcacttttgagaaaaaatagttaattaatatgagtagctgtgcgaaagggcctctagcgtaatggttaaggctttcgagtagcacctccagctcccgggtttaatccccctcgggagcgaatttcgggcttggttaaaaaattccctcgctgtgtcccacccgctctcggggatcgatatcctgcgcgccgtcctccggctgggccgttgcagagtgggcagttgatcgacccgttagtgatgtgggctagggttcaggggtcttcttggtcgggaccatgtttcagtctcttcttaatataataccgggagggcggtctttccctccccggccgagttaacatgaataactgtattgttttaaatatgtccatttgttaaaattaattaactgctgcctttttctggcttgatcaggaacatctttcatctattaactcaacgagaggtct

SEQ ID NO: 1090 - DNA, 2147 bp, Zea mays
  Intron number 1 from transcript GRMZM5G851468_T01 (locus G RMZM5G851468) derived from phytozome v7.0 (chr-ID 2; pos 8 432976 to 8435122)
gccctgacatccagagctaacagaaagagcactgcctattgcaaaccaattgccattagttttagttttggtgtgactacccacaatacgacctatacttggcaagcgacagctaaaaaatcctttgtaaggcaatacaaaattaaggtgtcaaggatattgctcctctcattgctgttgcagtaccaaataagtataaagatgaaaatactgttcaacagaataaatttcttttgcgttaaatgaaaaggagggattgcccttgagcaaaggtcagtctaggagacagaagcataaaccattttttctctctaagaaacacaaatgatttcgacggggaaataatgtgatgatttgggatcttcagttgagtctcacacatctgagttcaactgaacatttgacgccagatttcgtagatacaaataaatagaataagtttcttttgcgttaaatgaaaaggagggatttcccttgagcaaagggcagtctaggagacagatctaaaacagccaacctggtggttgcgcttcgcctcagttaagcagaaaactccaaaatcagagtaaaacatggcacaaatctgttgtagtttccctacaatattcttggagacatgtgcatagtcaaataatcatatgagttgtagggtagcaaattctagaatactgcaagttaaataatcatatcagttgtagtataaaatatatatggtacgacaaataatactattatatgcaaaatttgttggacaaaatgcgccataatattattataaatatgccaatctaaatagacttaattgatgtcgaacaaacattatcaatatcgcacaaattatttctaaagaatcaatatagactcttttgacgaccgtacactaatctattcttttttagcgatattgattagtctctagtgtatgtttgcacaacatcaggtaatatcctcatgagaaattgagataatgaaaggttgggtttagaaaattgagtcagccaaaactgagaagaaacagctaaggttgacctcagttagtaggtagcagtggcttagcaatagcagtttttagttaccagtggcttcagctagcaaatagcagtttaacaagtttgaacaagttctaattagcaagtagtagtggcttagcagtatcagttaagcaagttgcttagtagtagcatgtttcagtttagcagtagcatgttttcgagactgatcagggcaaagcaactgattctagccaataggaggttttaaggttgcaagggaaaaggggtattaccggtgatggtaagattctgtcaagtcaaactgaggtggatgggaaggctggtaatggtaggattccaataaagaggtgttttaaagctcctgccgaagaacaatggcgttgtgatggagagtaatgattgcaaggtggatgaagacactggggacgataggatttcaatgaagaacactaaggtggttgatctgcaagccacatctggccatgtgctcaacaaggttgaaatgaagaagccaaggggaggacccctgaacaaacataagtaggatctcagtaacaagataaaacatttgcttttagatattgggtgaaaattgacataaggcagaggaaaaacaaagattatgaagactcggtctatgttttctcctaacgagactggctattggtgcagttttccaagaatagtttcaaaatatgggtcactcatctaaacttaataatactaaaccaggtgcttcattagctctatattgaaggatgatctagcattgctaaaaaagaatatagtgaagaagactaataagaaaatttgtggtgctgaaaagaaacctggggttagcagaaacatagtctcaaaagatatccttgcaaatagagattctagaaacaagcaccagaacaaggaggagaatagacaattcagtttagtagtattttcactgaaaactgaatcactgaaaatcgaatgagactctgtcgtaacctcctagactgaaataaaatagcacatagcattatagcacagatcaaacataccagtatgaacaaaattgagctaagtattaagagagaaaaagagaaagcatgaagcaactaaccaaatcttggaggacttatcaaaaactaaattgca

SEQ ID NO: 1091 - DNA, 29043 bp, Zea mays
  Intron number 2 from transcript GRMZM2G558768_T01 (locus G RMZM2G558768) derived from phytozome v7.0 (chr-ID 1; pos 8 1975772 to 82004814)
aaagaaaatctacaactatatgtgagcttttttaccatgtaacatattctaatactaaaactattaaatatcgtcagtacatgtggcaccatccaacctaaaaaatttgtaggaagttgtgtgtcacacccggttccagggggtagaaccaagtgcatagcatatgtgtgccaggatccatttccacacatatattgacgtcacaagtgtaatatatcaaaagacaatgcaataaaggcgtaaagagagtagaatactttattacatcatctgaaacattgtatctttaacaagtatcacatcaaagtaaagcggaatttaaataacaggggcaatctcccacaggaagatgatcgacgcatcgttagatttagaattcctcttcgtcaaaatccccatcaaagtttccagcatcaccctctgatcaaaatgttagcaagggtgagctcacttatggtcggggctcagcaagtgggagaaaaattaatgcaggtataacaatgtgaggctaaggttgagcagtaggcattttagttggtcaacattttattaacaacacatgtcttactaatcagtgtgaatcccaaatgtcccatttaaacaaaggagtatgaatgtaacaaaaacacttaagtgaaaccacttaagcaaatcattggcagatcatcggatctcaatttatttccatcttcaagttcaattatcatgtgaggagtctaggtcgctcataactgggagcacggttgatatatcagttttacactctggagaggtggtacaactttacccacaagccatgtatcccatctagcccgggttgatcggacccttaaacactgtcgaggtgaatggatagggatccattatgaggctttcacaaaatacacttaatacgaagcaacccgctaaggtttctaaagacgatggtggtggccccctgggtgaggtaccttagccaagaatacgtccccatgttaacgtgggctgccaacacctaccgctccccctcttgcccatattttaggtaaggttgctaggcactaagcatataaagctaattaccaaagccagagccatgatagcactcgtggttgcactgttatcctgggtggtcactctatgttccaattaatttgaaataatgttgcgttaaccatcaggttaatgtcataattgtcaataccaattttggaacactatttgaaatagctcatcatatacacaggagatcaatcattcaatttacacgtgattcgaactctgaaatttacaaatttaaaacaacaaatcgctgcagggggtagaatacaatacgcttgtcttctaccttctcttcctctctgtttctctgcgcagggcgacgtcgagctagggaggccgggtgagttctacggcggactgcattcttgggcaagggttcgacggagggggagcaggggaactccggggtgtgctcgccagcggctggaacgtcgtggaaagctcctacggcggcaacagcaacggtcgacgcggctatgctgcagtgtgcgagcagaagaggagagagacgtgtgtgtacgagagatgggcgaacaggggaaggaggaaactcgccgctaatttatagccagggaaaggagctcgagcggtgtcaaaatttgaatggacaaccacgccatcaatggcaaattcacgcgtgacatgaatgggaagggaaacggaagaattgaagctccataacgcgggagacgaaacggtcgtgcggcgttggtcgtgtcttggcgcgggtggcgcggttgcgggatgtagaggcgtgggacgctggcttcgcgggtcggcctggtcgcggttgagcaggagcgcgcggggggagtcggccggatggctccctgtcgcgtcggtgctggacgcggcgcggtcgggggagggcggctcggccgcggggctcggctggctggcttgcatgagcgcagggaggagcgaggggagagagaagtgagagaataggggagggagagggacacaggggcggcggcggcttgggggaggaggcagcaggggagcggcggttgtggggattagatgggcctctagtgggcctagggttagggttaggtcttttgtttttttaatttcgaaatgcatttttaaagagctcaaaaattcataaaaaatcaccaaaactatttataaataaaatatttatttttagactaataattcttatattatttaattattatgttatttactagaatttttcctataagaagaaatgatattaaacatccgataatcaatcatgcgtaaataaaaaaaatgattcaaaatgcatataaataacaatcactttaaatgaaaatttaataccctatttatcataataactaaatcattatttttttagttgatggcttttatggtgttacaaacctacccctcttaaaagaatctcgtcctctagattaagaaacttccgagaataactgggggaattctgctctgagttcatcttctctttcccaagtggtctcatcttccgaatgatgactccactgaaccttacacatgttaatgactttactccgtgtaattctgcgagatgtttccagaattttgacagggtactccaaataagtcaaatcctcattaacattcaattcttccatgggtaactgttcttctggtactcttaagcatttattaagttgtgacacgtgaaatacgtcatgcacatccgataaactatcgggtaactctaactggtaggctacttcaccttttctttccaaaatcttgaatgggccaatatagcgaggagataattttcccttaaccttaaaccttttcattcctctcatcggtgaaactttaaggtagacaaagtctcctacttcgaacatcaactctcttattctattatcagcatagcttttctgtcttgactgtgttgtcttcaaattttctctaataatctacacttgattttccgcttcttggagattttctggaccaaatacttgactttctccggtctgattccaataaagcagtgttctacactttcgtccataaagtgcctcaaatggtgccatttttagacttgcctgataactgttgttatacgaaaattctgcataaggcagacccttatcccagcttctaccatgctttagagcgcaagctcttagcatatcctcctacacttggtttgtcctttctgtttgcggatgataatctaaactaaagtttagcttggtatccatggactcatgtagtcttttccaaaagcgcgaggtaaactgggttcctcgatctgatacgatcttcttcggtactccatacagacaaacaatccttgacatatataactctactaactgggctccagagtaagttgtctttacaggtataaagtgtgccactttagtcaacatgtctactatgacccatattgaatcatagccatctcgagtacggggtagtccaactatgaaatccataccgatttcttcccatttccattcaggtaccttgagatgttgtagcaatcctgctggtctttggtgttcagccttaactcgctgacacacgtcacataatgcaacatgagtagcaacatctcttttcaatccgtaccaccaatacttttccttaagatcttggtacatctttgtactaccagggtgaatagagtaagctgaatcatgagcttctctcaaaataagttggcgcaggtgttcgatttctggtacgcagattctcttcttaaaccataatgtgccttgatcatcttccgtgaaatctgggctttacccatcccaatcaaagttttaatttccttgattttctcatcggaatcttgtcctttacgaatctcttcttccaaagtagattcaacttccataaccgttgcttctacattattgagcataccaaggttgagttgttccatttcccagcacaattcctgtgacatcaaatgagtagtgatgttgttcacttgacccttacggctcaaagcatcagccactacatttgcttttcttgggtaatattgtatttccaaatcatagtccttgatcaactcaagccatcttctctgtcgtaggttgagttccttctgagtgaatatatatttcaagcttttgtgatccgtgaagattttgcacttgtttccaatcatatagtgcctcaaaatcttcaaagcatgcactacggcagctagttccaaatcatgcgtaggataattcttctcatgctttctcaactgccttgaggcataagctattacttttccttcttgcattagcacacatccaagtccaaggtgtgatgcatcgcaatacacatcaaatcccttgtggatgtctggcattaccaatattggtgcagtggttaaccttttcttgagttcttcaaaacaattctggcatgcttcatcccacttgaactctttacctttctcgagtagagaggtaagaggtttcactaacttggaaaaaccttcaataaatcttctatagtatcctgccaatccaagaaaacttctgatcttggacgcatcctttggttgcttccaatttagtatctcacttatctttcctaggtccactttaattccaccatcggtaacgatatgccctaagaaagcaacttccttcaaccaaaaatcacacttcgagaacttcgcatatagctggttatcacaaagcttttgtaggactagccttaggtgatcttcatgtgtttcttcatttggagagtatatcagtatgtcgtcaatgaatacgaccacaaactaatccagatattccataaatactttattcatcaagttcataaaatatgctggtgcattagtcagtccaaacgacatgaccaaaaactcatataatccatatcttgtcgtgaaggctgtcttcggtacatcttctgctcgaatctttaactgatgatatcccgatctcagatctatcttcgagaatatcttagctcccttcatctgatcaaataaatcttcaatccgaggtaatgggtatttattcttgatggttacttcattcaaacttctataatcaacacatattctcctcgaaccatccttcttgttcacaaatagaactggtgctccccaaggggatgaacttgggcgaatgaaacctttttctagtaattcttctatttgtttcttcagttctactaaatccttgacatccattctataaggtcttttcgagataggtgcggttctgggtaataattcaatagaaaactctatatcacggtcaggtggcatacctagtaattcctccggaaatacgtctgggtactcacacactaccttgatattttccaagggcttttcttccaagtgattgatcattgtcttcccttttgcatctgttgacttgtctatgctaacttggattctttcaccttgaggacttgtcaacataattgttccattggcacactatatcactccatcacaacttttcaaccagttgcatccaagaatcacatcaatactgttggatcctaggaccactgggttgactgaaaaatctattccttgaatcttgagattaacatgggggcatgagtgtgtggccttcatgtcacctcccggtgaactaatgtgtaacatcttcttaagggggtacttaggtatgttgtgcttttccacaaattactcagttataaatgaatgcgatgctccagagccaaataaaactgatgcaggtatggagttaacaaggaacataccatacactatgtcagcatcctcaagcactgattctgctgtgacatgattgacccttcatctactctggttctgcggagtcttgttctgtgcagatccacgagcgggggtgttttggtcatttctctgattattgcttttctgaggtgtctgctggttgcgccttgggcagttgttagcatagtggtcaagctcaccgcacttgaaacagccattgggttgaactggtgcgttgttgcttctgtcctgcgtgttcacggcgccaccttgacgattctatgaactcccaccagacctctggttggtctgagagttgctcctttgttggttctgactttgattatttctctggccttgttgtccagagcgttgcatctgataattgtttccgccttgaattctagagcggaactgcgaaccttgagcgttgttcgggcgggtgttcctgctagaccgaccttgaaattttcttttgtggtcagataattcccttcttttactttcaaggccaattgccttgttcagcagtgtctggaaattggggaaggtatgactctgaagttggtagttcagaggtccaatcagtccttcaaggaaacgctcttggtgcttctcatctgtgtccacttcttccggtgcgtagcgtgagagctgagtaaagcgatcacgatactcactgaccgtcatattcccttgagtaagggaaaggaattccttcttcttcaacttcataattcccgagggaatacggtgagcgcggaagttcgtttggaactcctgccaagttattgtatccgcgttggggtgtgccgctgtgaaggcatcccaccaatcgggcgcggctccctcgagtcttcccgaggcgtacaagaccttttcccggtcgttgcactgggtgatgttcaacttctttccaataacctttagccagtcatcgacatctaaaggatcaaccgcatgagagaacgtgggcgggtgatgactcataaaatcccggtgcttgtctctggccgggggtgcattctgctgttgctgctgatgctgttgattcagttggttctgctgaatctgttgaacagccacagtgagtccttgtagtaactgcatctgggcggcgatgaactgctccatgttgggattcgatggtggtggtggtatctgttgaccacgttggttcctgttgttgttgggtccttgacgagcgttcaccatctgattggttatgaagtgaaatccttaaaaaagtgaggagtagaaaagattctagaggggaatttcttaagtttatgttttttatgctcttatggccatcataccattgcactcaaacaaaaatccaactcaaacatatcaaacatcaccatcacattgttgttattattatagtataacactattttatcgtctactgcgtctagcttatttcaataaactatcctatcaacctaaaggagtatggtgatagactcaggggttccataacaaagccttccaaaagatgaccggcgcatcgttagacttagaattccttgtcgtcaaaatctccatcaaagtttccatcatcaccctctgatcaaaatattagcaagggtgagctcacttatggtcggggctcagcaagtgggggaaaaattaatgcaggtataacaaggtgaggctaaagttgagcagtaggcattttagttggtcaacattttattaacaacacatgtcttactaatcagtgtgaatcccaaatgtcccatttaaacaaaggagtatgaatataacaaaaacacttaagtgaaaccacttaagcaaatctgaaagtagcctagaggggggtgaataggctacacctgtaaattttcactaaaaaacttcgagataggttaaattaaagttgcactggtgcaaaccagttcagttgattttaattacaactgaacaagtttgaacctgctcaacttagattagataatctgttaaacaaatacgaagtagtgaagaatatagctaaagacttgccctacacaaaatctactcgaatggataatatgaaccaaccaacgaatttaaagctcttaacaacaacacacaagaacacgcaatataacccgaggttcggcaaccaccacaaaggtgtcctactcctcgttgaggagcccacaaagggtcgggtcttttccaaccctaatcctccacaagccgaccacaaaggtcaaggcaatctcttctcaaataagctcaaagagcgggtgatacaaacttcttggggtcgtccacaaatttggagactcccaagcaacctctaaccgtcaaggaacacgaggttccaagagtaacaaatccgcacaaggttaagtttgcaacgagctcaagaacaaagagagtaggagaatcgagatgaaattaatagcgtgttcgatcgagttcacctcacaccaagggtccttcaaatgattgaaggagatgcgattgcgggtgtgaaaggtgaaatgaatgcgcttgttgggagtttggtcagccaagatttcgtgggagagatagaagtgaatgagagagagtgtgtgagggggtatataaaggatcccccaaaagctggcagtcgttgggagaaaaggagtaaaaaccggttgaaccggttttcagaccggttgaaccggtttctaccagggagatctcggttcacatacctactcagccggagactcgaccggtttcaaaaccggttgagtagaggaaaaatctggttgaaccggttttccaaaaagatctacagcgacttttctgacagctctgactgtcagacaggtcagagcagggatggcagaggagcagtcccaaaaccaggtgaaccggttttaggaccggttgaaccggtttctagggctgaaaccaaattttgagtaattttgaagagaacaaacatggagtatttgtgggaagtgaaatttgtttttctcaagggcattcatgatctggaaaaatgttctcgaagatgttttcaaaggattttgaacttggctcattgcacaacttacttaaccatcacggatccctcttaattgcacggcgattcctatgactcaagaattataaatttagcaccgccgatgtttctaagcacttgaagcacgccatttgatgtggaattttaaatccgctgtgctttctatttttatgctcgtaagatctgtgcttctcctgtctgtagaattactgtgtacatgctaggaccaaacttgttagaatctcagtttgttttgtcatttaatcaccaaaaccctcaattagggttgattgcacttacaatctctccctttttggtgattgatgccaaaacaaactggagtagagataaaaattaaaagttacgagtacttgcgaaataaaagcctttgtgtatgtgtagctccccctaaatatgtgcatgagttttgcgatattaacattgacttgatatgtcaatttgcaacatatttagagagagagaacaatcaacaccatacacaaaacaatgagggatgaaacataattatagagagtgatgatagaaagagtaaaattacacatacaagctcattattgcatagcatatgatatgaaaagttactactgctattacaataatgatatcacatctcatcacatcattaaaaaagtatatggcttcagagccatgcatgcatcatacaatagaccaataattattacaaaccgatgttcgttacataaatagaaggtactgccaggctaagaaaccttctccccctttttggcaacaagaaccaaaaagagagagagccgccaatccaaagatcaccagttaggaggaggctgataaggagcaaagaagtggtgcgccaggtgagaggcaaagtgttcttccccagactgatccgagggaggagcactgccagaaggatcctgggcggagggtgagaggatgattgacccggatccccgtgatagggaggcggggcaaactgctcgcgatcatcaaaataggcttcttcttcttcgtcgtctgctgacataaatggcaccccgtaggcctgctggtgccactcgttgatctccgggggaggaggatggagaggcacgtcaggcgagcgaggggcgaaggggatacccatagtggaagcttgacgacgaaggttgtcgtcagtctcccgctgatgccttgccacctcatgtacatcagcagaaatgttccggcacgtagagaaaaatgccgcaaacccgtgggccaagcgggcacccatccttcggccacgacctcgaccacgaccacgaccatgtggcgtgggagatccgtggccaggggagggacacgaggcaccggcagcagcagcaggaccagcagacggacccgcagaggtatgtgcacgggagctggaaggggctttccttaagcaccctgctggattgttgggatcaatccagaaaggggtataggattgatgtcttgtacctttatcatatcgaaactgggtcacaacttcaatcatcttcatgataaaaggtgcatgaagacatcccttcagtggaaagcaggcaacatggatgatttcctgccagatcatatcaaagacattgatactctctgagttgctgggcttcatgaatgagagcaaaaccttgctctctccaagaatattcatctgattacctcctttaggaatgagggtcatcctgctgagggagttgatgtatctataatacttgtgcatgttggtggactcccaatatttcccagactcagagagatgaagatctctggcttcatctctggtaggttggcggaaatcatggatcttgatcttatcaccagaaatatcattgttagtgaatccaagaatgtgagcaaaccgacggtagctcaccttgtaccaattgccttcaatgtagaagttcagataaggatagttgtatggactttcctcgtcagctggcttgatccacagagttgagtaaaactgggcaatgacttcatcattccaatcatattggaatgtcattatactcttcaacttctttctttcacatgccctcaatgtctgtgtcatctctgggtccccaatggcctcacatccttcccagttgatatagcgttgaagcagtatgggttgatgtttcttggggaggatcacagaattgtaaaaatccacatgatgaagcgtccaaaaacggttcccatcaatcctggcatcacgaatgcgcaatgcaggattctggaaacggagatcctaaaggagagcagaacctccactggcagtgaaatcagttactggctcattgccagcacgccgagcctccgcccggtggaggaccaaccctcgaataacaggggcgtgggcagggggcagatcaatttcatcatctttcccgccttcatcatcacttgtagcttcccacgcctgcggatttgtcgcgggtcgggaccgaccggagggattccgggttgtctgaccgcgagctccttgagacccggaggcctcaccaccttgcatggcgttgccacttcctcgcccacgcttggatctagagcgtgggggagtatctccatgaatttcttggtcgtcagaggagtcggattcaaccacagaaggattcctccgacgcaccatccaaaaaaaatagaacctatgatgagcaaggatcaaacacgtttgagtagagacgcgtatgatattgagcatgcacttcaaccattcatatgagcggttcaactacaatgaacaatatcaaaccgctaaactctaacaatgttcatgacaaatgaagataatctaagtgttgcaagcacctaaactaaaatgtacccaaagaatgatacactagataatcaagaacgagtgggatcgagtaaaaagaaatgaaatagggcaatacctcgatccggagtttgaatcaagaaatcccaacaagatcgagggagatgatggagaacgccgggatgaacggatctccaacaaatcttccaaagatgagagggcacaagtgggtttttggagtggagaaagtgtgaaggagggaggaaaaagagtgggcggcgacggctggaaagagaaactgagaagaagagaagagaggagggggagagaaataggggaggcgtcggccggtcaaaagacagaaaaccggttcaaccggttataaaaccagttcaaccggtttctggtcagactgcgcagtaaaagcgcgcagaaaaaggcattgactacgcggaatttctggcagactgacagcgcagactacaaaactgacagcgcagactgcggcacagactgacagcacggacgcggaggtggtcaaaaccggttcaaccggtttttataccggttcaaccggtttccaccaggggaaaaccggttgagtgacctactcagccgattcactcaacctgtttccagatattgcccggaagggctataatagcacttagcaaatatgacatgagtgattttaatgataaaaatagtatttctcatgacatattgcacaaacaatcaatttacatccatcaaacttgatcaaaattttagttattaagacacgtttcgagaatccaagatatttagctcactcctaagaaagcaaaacctagtctcatcgagggattttgtgaagatatcggctagttgattttcggtgctcacatgaaacaattcgatatctcctttggcttcgtggtctctcaagaaatggtgtctgatgtcaatatgtttagttctagagtgttgcaccagattgtttgcaagttttatggcactctcattgtcacacaaaagtggaattttgttaaactcacaaccaaaatctctaagggtttgcttcatccataacaactgtgcacaacatgccctagctgctatgtactcagcttctgcagtggaaagtgcaacacaattttgtttcttggaactccatgacactaaggactgcccaaggaattggcaagtcccagtagtgctttttcgatctactttgcaaccagcataatctgagtcagagtagccaagtaaatcaaaaagggagcctttgggataccataatcctaggttttgggtgtggactaagtatcttagaattctcttaacggctacaagatggcaatctttagggttcgcttgaaagcgtgcacacatgcaaacactcaacattatatcaggtctagatgcacataagtaaagtagtgaccctatcattgatctatataatttttgatctacaggtttaccttcctcatttaggtcgagatgtccatttgatgacatttgagtcttggcgtgttttgccttttccatgccaaacttcttgagcatatcttgtgtatatttggtttggcatagaaaagtaccttccttgagctgtttgacttgaaatcccaggaagtatttaagctcgcccatcatagacatctcaaacctattcgtcattactttgctaaactcttcacaaaatttttcattagtactaccaaatataatgtcatcaacatatatttggcacacaaataattcattgtcaactttgcgagtaaataatgtagagtcagcttttcctattgtaaacccattcttaattaaaaaatctttaaggcagtcataccaagctctaggggcttgtttaagctcatagagtgccttgtgaagtagataaacatggtttggcttctttggatcttcaaagcccggtggttgctccacatagaccctctcttgtagtggtccatttagaaatgcgctcttgacatccatttgatatagtttgaaatcatggttagtagcataggcaattaatattctaattgactctaaccttgctactggcgcatatgtttcaccaaaatcaagtccttccacttgagtgtagccttgggcaaccaaccgtgctttgtgaaagggaaatgtgcccttgggccatttctaagtattttggtgatttagtgtccaacacaagtgcctaagtgttaaatggtggacaaagtacaaatcaagtataaaggtatgtttctcagacttagtacattgttttagagactaatgtattgtgtctaagtgctggaaacaagaaaaatcaagttgaaattaaagatggctttattcagccaaagtcagctctgtctgggtgcaccggactgtccggtggtgcaccggacagtgtccggtggtgcaggctggctcaggcgaacttgctgctctcgggaagtgattaacggcgtacggctataattcaccggactgtccggtgtgcaccggactgtccggtgagccaacggtcggccgggccaacggtcggccgggccaacggtcggccgggccaacggccggtcgcgcgattcgcgcgagacacgtggccgagccaacggtcggaagggggcaccagactgtccggtgtgcaccggacagtgtccagtgcgccaacggctccaaagcgccaacggtcggcttcgccaaataaggaaggagatccgcaccggacagtgtccggtgcgccaggcgacagaaggcaagaattgccttcctggaatgcactcaacggctcctagctgccttggggctataaaagggacccctaggcgcatcgaggagtacaccaagcattctctaagcattcctaagcaccaagacttcgattccgcgcatttgattctttgcgatagcaattagagctccatttgagttgtgaactcgctgagttatgttgtgagctcttgttgcgacttgtgtgcgtgttggtactcttatttcatgtcttgtgtgagttgctcatccctcccttactctgtgcttctttgtgaacatcaaagtgtaagggcgagaggctccaagttgtggagattcctcgcaagtgggatatagtaaagtgaaagcaaaactctgtggtattcaagtgggtctttggaccgcttgaaaggggttgattgcaaccctcgtccgttgggacgccacaacgtggagtaggcaagtgttggacttggccgaaccacgggataaaccactgtgccatctctgtgttgatatctttgtggttatcgtgttgtgcaagctctcctctctagccacttggcttaattgtgctaactcctaatcaagttttagggattaagtttcaagtttttacaggatcacctattcaacccccccccctctaggtgctctcaattggtatcagagtcgttctcttcaagaaagggactaatcgcccgaagagatggatcctaagggcaaggggattatgatcaatgataaggagaaggagtcctttgtcaacgagcctaaagatgacaagcctactgactcgggctcgggccacaaacgaagagatgggaagaagaagaagacgaggcgcatcaaggagatcgtctactacgacgacagcgacgagtcctcttcttcccaaaaggacgacgacaacgactatgagaaaaagaagacggttaattcaaacttctcttttgattattctcgtattcctcaaagtaccaatgctcatttactctccattccacttggtaaacctcctcattttgatggagaggactacagattttggagtcacaaaatgcgtagtcacttgttctctctccatcctagtatatgggagatagtagagagtggaatgaaatttgatagctcggatagtcctttgtttatcaatgaacagattcataaaaatgcacaagctactactgtgttgttagcctcattatgcagggacgagtatcataaggtgagcggcttggacaatgccaagcagatctgggacaccctcaaaatctcacatgaggggaacgacgtcaccatgctcaccaagatggagttggtggaaggcgaactcgggagattcacgatgataagaggggaggagccaacccagacgtacaacaggctaaagaccctcgtcaacaagataaggagctatggaagcacgcgatggacggaccacgacgtcgtccgcctaatgctaaggtcctttactgtacttgatccatatctggtaaacaatattcgtgaaaatcctaggtacaccaagatgtcgcccgaagaaattcttgggaaatttgtaagcgggcggatgatgatcaaggaggcgagatacatggatgatgcattgaatggcccaatccacgagcctcaaaccgttgctctcaaagcgacaaggagcaaggaggcactacctagcaaggtggcgcaaattgaagcggccgggcttaatgaggaagaaatggcccttatcatcaagcggttcaagacggcgctaaagggtcgcaaggagcaccacaacaagaacaagacgaaggggaagcgctcctgcttcaaatgtggtaagattggtcattttatcgctaattgtcccgataatgatagtgaccaggaaaagaagagtggaaagtgggaaaagaagaagaactacaagaaggcaaagggcgaggcacatcttggaaaggagtgggattcggattgctcctcgtccgactccaacaacgaaggactcgccgccaccgccttcaacaagtcatccctcttccccaacgagcatcacacatgcctcatggcaaaggagaagaaggtatgtactcgaaacaatactacttatgcttcttcaagcgaggatgagtctagtgatgatgatgaaatagactattcatgcttattcaagggcttagatagaactaagatagataagattaatgaattgattgatgctttgaatgataagaatagattactagaaaaacaagaagaccttttatatgaagagcatgataaatttgttagtgcacaaaattctcttgctctagaagttaaaaggaatgaaatgctctcttgtgaactatctacttgtcatgaaaccatttctactttaaaaagtgtaaatgatgatttaaaagtagcaagtaaatctaactcttgtgtagaacatgttatgatttgcaataggtgcaaggattttaatgttgatgcttgtagtgaacacctagtttgcatttctaaattaaatgatgaagtggctagtcttaatgcccaacttaataagactagcaagagtgaatttgacaagctaaaatttgcaagggatgcctacacgattggtagacacccctcaattaaggatggtcttggcttcaagagggaagtcaagaacttaacaagccataaggcttccatctccgccaaggacaaagggaagcctcctatggctagtagtgctcaaaagaaccatgccttcatgtatcatgataggagacagtctagaaatggttatagaagttatgatgcttttgattcttatgccatggttgcttctagttcttctattatgcatgatagaaatttagctaggagaaatgttattaatcacatgcctagaagaaatgttgttcatgtgcctaggaaaacaaatagtgaaccttctacaatttattatgctttaaatgcttcctttgctatttgtagaaaggataggaagatagttgctagaaaattaggggcaaaatgcaagggagataaaacttgcatttgggtctctaaggctatttgtactaaccttgtaggacccaacatgagttgggtacctaagacccaagcctaaatttgccttgcaggtttatgcatccgggggctctagctggattatcgacagcggatgcacaaaccacatgacgggggaaaagaggatgttctcttcctatgtcaagaacaaggatccccaagattcaatcatattcggtgatgggaaccaaggcaaggttaaaggcttaggcaagattgcaatctcaaatgagcactctatttctaatgtattcttagttgagtcgcttggatataatttgttatccgtaagtcaattatgtaatatgggatataattgtctattcacaaatgtagatgtgtctgtctttagaagaagtgatggttcattagcttttaagggtgtattagacggcaaactctatttagttgattttgcaaaagaggaggccggtctagatgcatgcttaattgctaagactagcatgggttggttgtggcatcgccgcttagcacatgtggggatgaagaaccttcacaagcttctaaagggagaacacgtgataggtctaactaatgttactttcgaaaaggatagaccttgtgcagcgtgtcaagcaggtaaacaggtgggaagctctcatcatgccaagaatgtgatgacaacatcaagacccctggagttacttcatatggacctcttcggacccgtcgcctatctaagcataggaggaagtaagtatggtcttgttatagttgatgatttttcccgcttcacttgggtattctttttgcaggataaatctaaaacccaagggaccctcaagcgcttcctaaggagagctcaaaacgagtttgagctcaaggtgaagaagataaggagcgacaatgggtccaagttcaagaaccttcaagtggaggagtatcttgaggaagaaggaatcaagcacgagttctccgctccctacacaccacagcaaaatggtgtggtagagaggaagaacaggacgcttatagacatggcgaggacgatgcttggagagttcaagacccccgagcgcttttggtcggaagccatgaacacggcttgccacgccatcaaccgggtctaccttcatcgcctcctcaagaagacttcgtatgagctactaaccggtaacaaacccaatgtttcgtattttcgagtttttgggagtaaatgctacattctagtgaagaagggtaagaattccaaatttgctcccaaagcggtagaagggtttttgttaggttatgactcaaatacaaaggcgtatagggtcttcaacaaatcatcgggtttggttgaagtctctagcgacgttgtatttgatgagactaatggctctccaagagagcaagttgttgatcttgatgatgtagatgaagaagacgttccaacggccgcaatacgcaccatggcgattggagatgtgcggccacaggaacaaaatgagcaagatcaaccttcttcctcaacaatggtgcatcccccaactcaagatgatgaacaggttcatcaagaggagacgtgtgatcaagggggagcacaaaatgatcatgtaatagaggaagaagcacaacaggcacctcaaactcaagtccaagcgatgattcaaagggatcatcccgtcgaccagattttgggtgacattagcaagggagtaactactcggtctcgattagttaatttttgtgagcattactcctttgtctcttctattgagcctttcagggtagaggaggccttgctagatccggactgggtgttggccatgcaggaggagctcaacaacttcaaaagaaatgaaatttggacactggtgcctcgtcccaagcaaaatgtcgtgggaaccaagtgggtgttccgcaacaaacaagacgagcatggggtggtgacaaggaacaaggcacgacttgtggcaaaaggttatgcccaagtcgcaggtttggactttgaggagacttttgctcctgtggctaggctagagtccattcgtattttgctagcatatgccgctcaccattctttcaggttgttccaaatggatgtgaagagcattttcctcaacgggccaatcaaggaggaggtgtacgtagagcaaccccctggcttcgaggacgaacggtaccccgaccacgtgtgtaagctctctaaggcactctatggacttaagcaagccccaagagcatggtatgaatgccttagagactttttaattgctaatgctttcaaggttgggaaagccgatccaactctttttactaagacttgtgatggtgatctttttgtgtgccaaatttatattgatgacataatatttggttctactaatcaaaagtcttgtgaagagtttagcagggtgatgactcaaaagtttgagatgtcgatgatgggcgagttaagctatttccttgggttccaagtgaggcaactcaaggatggcaccttcatctcccaaacgaagtacacacaagacttgatcaagcggtttgggatgaaggacgccaagcccgcaaagactccaatgggaaccgacggacacaccgacctcaacaaaggaggtaagtccgttgatcaaaaagcataccggtctatgatagggtctttactttatttatgtgctagtagaccggatattatgcttagcgtatgcatgtgtgctagatttcaatccgatccaagggaatgtcacttagtggcggtgaagcgaattcttagatatttagtcgctacgccttgcttcgggatctggtatccaaaggggtctacctttgacttgattggatattcagactccgactatgctggatgtaaggtcgataggaagagtacatcggggacgtgccaattcttaggaaggtccctggtgtcatggagttctaagaaacaaactttcgttgccctatccaccgctgaggccgagtatgttgccgcaggacagtgttgcgcgcgactactttggatgaggctaaccctcagtgactttggctacaatttgagcaaagtcccacttctatgtgataatgagagtgccatccgcatggcggataatcctgttgaatacagccgcacaaagcacatagacatctggcatcactttttgagagaccaccagcaaaagggagatatcgaagtgtttcatgttagctccgagaaccagctagcggatatctttaccaagcctttagatgagcagaccttttgcaagttgcgtagtgagctaaatgtcttagattcgcgaaacttggattgatttatagcatacatgtggttatgcctttgatcatgttccttatgcattttgttgtttatttatggtgctcaagttgtacaagcactccccggacctcacaagtccatttgcaagtgatgcacatatttagggggagatgtgctacaacttgaccctttgagactaattgtgtgcttgagtttgcttaatttagtctcaaaggaggtttgaaagggaaaagatggacttggaccatgcaagacttccactgcactccgatgaaagagtagcttattccaagttcatctttgtactcttattgccttttttactcttagttgaagattttggtgaggcaatggggttaaagggccaaaattgatcccgttttggtgtttgatgccaaagggggagaaaataaggccaaagaaataaatggatcagctaccagttgtgaattttgaaaatagtagagttagagtttttatttgtcaaaatacttttgtttgcctcttattgtcaaaagttggtctcttgtggggagaaggcttaattatgggaaaagggggagttttttgaactctttgatcaattgctctggaaatatctctctttatgtttcaacaagtgtgtttgacttagagataggaaattgagtttgatttgcaaaaacaaaccaagtggtgcaaagaatgatccatatatgtcaaatttgaatcaaaacattttgagttcttatttgaagtgattttgcacttgttctacttgctttatgttgtgttggcataaatcaccaaaaaagggggagattgaaagggaaatgtgcccttgggccatttctaagtattttggtgatttagtgtccaacacaagtgcctaagtgttaaatgatggacaaagtacaaatcaagtataaaggtatgtttctcagacttagtacattgttttagagactaatgtattgtgtctaagtgctggaaacaggaaaaatcaagttgaaattaaagatggctttgttcagccaaagtcagctctctctgggtgcaccggactgtccggtggtgcaccggacagtgtccggtggtgcaggctggctcaggcgaacttgctgctctcgggaagtgattaacagcgtacggctataattcaccggacagtccggtgtgcaccggactgtccggtgagccaacggtcggccgggccaacggtcggctgggccaacggtcggccgggccaacggccggtcgcgcgatccgcgcgagacacgtggccgagccaacggtcggaagggggcaccagactgtctggtgtgcaccggacagtgtccggtgcgccaacggctccaaagcgccaacggtcggcttcgccaaataaggaaggagatccgcaccggacagtgtccggtggtgcaccggactgtccggtgtgccaggcgacagaaggcaagaattgccttcctggaatgcactcaacagctcctagctgccttggggctataaaagggacccctaggcgcatggaggagtacaccaagcattctctaagcattcctaagcaccaagacttcgattccgcgcatttgattctttgcgatagcaattagagctccatttgagttgtgaactcgctgagttatgttgtgagctcttgttgcgacttgtgtgcgtgttggtactctaatttcgtgtcttgtgtgagttgctcatccctcccttactctgtgcttctttgtgaacatcaaagtgtaagggcgagaggctccaagttgtggagattcctcgcaagtgggatatagtaaagtgaaagcaaaactccatggtattcaagtgggtctttggactgcttgaaagtggttgattgcaaccctcgtccgttgggacgccacaacgtggagtaggcaagtgttggacttggccgaaccacgggataaaccactgtgccatctctgtgttgatctctttgtggttatcgtgttgtgcaagctctcctctctagccacttggcttaattgtgctaactcctaatcaagttttagggattaagtttcaagtttttacaggatcacctattcaccccccctctaggtgctctcactttgtttcttgtaaccacgccatgttcatcttgtttgttcctaaagacccattttgtcccaatcatattttgtttgggtctttggactaaggaccagacttcattccgggtgaagttgttcaactcctcttgcatggcaattatccaatccggatcacccaatgcttcttcaaccttaagtggctcaagagaggaaacaaatgagtaaaattcacaaaaattagctaaacgagatcgagttgttacccctctcctgatgctacccaagatgttgtccaccggatgatccctttgaatggtatgatggactctaggatgaggcactgatggttgtctttgtatttgctcctcctcatcattcacttgatcaagaggcactttaccatcaacactttcgtgttcattttctaccactgttggcatcccttgggattgatgattttcttcatgacttggatgacttgaggttgatgggtttgcttgggtgtagaatttgtcacccaccacctttgcacccacatcaacgacctcattggtcatccacaaagttccttcctcatcatccttttcttgaggtctcacttcacctattgcaagtttctttatggcctcacaaggtagttcttcatttcctgcagtgtcattagaaacatgcccttgcgagccattagactcatcaaatgtcacgtctatcgctatttcaacaagatcggtggtattgttgaaaacaggatatccatgcgcatttgatgcataaccaagcaagaagccctagtccattctaggagcaaactttgagctcttgactttcttgttaagaataaaacacttacaaccaaatactctaaaataatcaactttaggtttgttaccagtgagaagctcataagcagtctttttgtagatcttgtgaagatagagacggttgattccatgacaggcggtgttgaccgcctctgcccaaaagttgtcaggtgtcttgtactcatccaacatggttctagctgcttcaattaaagttcggttctttctttccacaacaccattttgttgtggactgtaaggaaccgagaactcatgtttgattccttcttcgcctaagaattcttcgacacctgtgttcttgaatccgtcccattatcacttctcactttcttgattttgagctcaaactcattttgagctcttctcatgaatttcttcaatatttcttgagtttcacctttatcactcaaaaagaaaacctaggtgaatcgagaaaaatcatcaacaatgactaaaccatacttactaccacaaatgctaatgtaagccacaggtccgaagaggtccatgtgaagaagctccaatggcctctttgttgtgaccacattctttgattgatgtgggactccatgttgctttcctgcttggcatgcgccacaaaccctatctttctcaaatacaacatttgttagtccaatgatgtgattatccttttgaagtttggccaaattcctcataccgacatgggctagccggcgatgccatagccaacccttgtcggactttgccactaaacaagtctcaggcgtcactttacttgttgtgaaatcaacaagataaaccttgcccttcaagcgacccgtaaaggcaactgaggagtcctcccttctaaggatcttcacatccacatcagagaataaacaattataacccattccacaaagttgtgaaacgaacaacaaattgtagcttaaagaatctaccaataaaacatttgaaagtgattgttggtcagagataggaattttaccaataccaatcaccttactcttgccactatctccaaacacaatttcttgtgcttcttgagttagttgcaatgaatgaaacatgtcttcctccatggtcatgtgatttgtacatccactgtcaagcacccaacttgacccaccagaggagtagacttgcaaaacaagtttaggccatgcttttaggtacccaaattgaattgggtcctacagtgttagttatagccttgggtacccacacacttcttttcatgacttttcttttagtgtaggcacccacatatttgacaaccaatttccctagatcccaagtcaacatataatcacaaagataagagtgagagatgggagcattaaattgttgtccacttgcggatcccacttccttcatcttactctttgtggaactcaagtttaccttaacttgaggtgacttgtcatttgacgagtgaatcctccccaaggcatcatatagggtggttccctctatgaacttgggggatctccaccccttatgcactgtgctagggttttccttggatgagttgaacccaagcccccttcttccattgttgggctttagggacttgtacttgggttcaactttctttaacccatcattgctagagcatcttttcaatattcctttgaccttcacctgtgggctattcttccttgcatggttagttagacaacaagaagcatgatatttggcacaatgtttgcaaaaattatcatttaaggagctagacttagattcaatcactaaagatgaggcactgatgttcttgcaattttcaagttgcacttgaagttcttgattttgaacatttaagcttaacatgcttgtttcaagtgcattcttttcatttgcaagattagctatagaggttttcatattaattacttctttatctttattctctatagttatcttgactaaagatatttccttagtcaagacatctagcatttcatctttattgtgaatcaattcttgaagctctaggtttctttccttttcaaggataagcaagtcttcttgagcatcaagagttgcttttcttttatctagcttctccattaatttggtgataacattgtatccattcaagccaaattctttaatcattttatttttcatggcaatttgttcatcatcatcatcatcatttggaaaatcattactaaataaggttaccttatgtccttttgccatgaggcaagttggagtgtaggagttgtcttgtaggatggtgaagagttgcgagcttgacgtagattggatggccacgtttgccaccacttcctcttccttggagctagaactctcttcatcggagttccattcttcaccaatatgggcttgaccatatttcttcttcttgaagtatcccttggtcttgcctccctttttgaacttgtccttcttgtattccttcttggcttcttgttcctttttgttaggacaatctgctatgaaatgaccggtttggccacattcatagcatgccctcttctttcctttcctttggaacttgtcattcttccttacaaatttcttgaatgttttgatgaacatagctgtgtcttcatcgcttgagctatcttcatcacttgaggtctcgaccactttctttgctttgtggtctttgttcttcttgggggtgtcttgttcattggtgatcaaggcatgagagtctcttgtcttgataggggcttcttcggactcgtgttgttgaatctttgcaaataattgatgaggtgtcatatcctcatagtcatcacgatcccttatcatccttttaagactcttatccttttctttatatgctctcattaataatcttgtgaccttggaatcactccaatcttcactcccaagtactcttattttgtttactaacaccatcaaccgatcaaagagtgattgaagcgactcaccctttgtccaatcatatcttgcaagctcactttccaaagcttcaactctatgtctcttagctttgggatctcctttatgtgacattttaagaatattccaaatgtcacgggcatcttctcttccttgaactttccggtattcttccggacaaagacttcctttaattatgctcactgcttgagcattgcgatgaacctcttgcatcatttctggagtcatctcttctccttgggtgggcttatacatacctacattaacaatctcccaaagactaggatgcacaccgattaaatgcgacttcatcttgtcggcccactcgtcatagttcaactcactaagagttggtaactttccaagtggggcggaagagaagttgggaataaaatttctagagtaatagaattgaactttactaaattcgttacctttgcttttggtagatgatccttcggtgttgagacttaccttgctcaacaccttcgacaccaaaagatccactagatcgtcattgtaatcaaatgttcccttacctttatcttcttcggcctttcttcttgattcttcttcttcggcctttttcttagcatcttcctctttcattttgaggaacattttctcggcaatcttcatggcgaggtcgaggaccttggggtccacttcctcaccggaagatgtgatggggatttcctcgaggagaggatccacatggtcccgttgagtagacatgattgtttcctcacgcggttaagcgtaaaacgaggtacgaagttctgataccaattaaaagtagcctaggggggtgaataggctacacttgtaaattttcactaaaaaacttcgagataggttaaattaaagttgcactggtgcaaaccggttcagttgattttaattacaactgaacaagtttgaacctgctcaacttagattagataatctgttaaacaaatacgaagtagtgaagaatatagctaaagacttgccctacacaaaatctactcgaatggataatatgaaccaaccaacgaatttaaagctcttaacaacaacacacaagaacacggaatataacccgaggttcggcaaccaccacaaaggtgtcctactcctcgttgaggagcccacaaagggtcgggtgttttcctaccctaatcctccacaagccgaccacaaaggtcaagacaatctcttctcaaataagctcaaagagcgggtgatacaaacttcttggggtcgtccacaaatttggagactcccaagcaacctctaaccgtcaaggaacacgaggttccaacagtaacaaatccgcacaaggttaagtttgcaacgagctcaagaacaaagagagtaggagaatcgagatgaaattaacagcgtgttcgatcgagttcacctcacaccaagggttcttcaaatgattgaaggagatgcgattgcgggtgtgaaaggtgaaatgaatgcgcttgttgggagtttggtcagccaagatttcgtgggagagatagaagtgaatgagagagagagtgtgagggggtatataaaggatcccccaaaagctggcagccattgggagaaaaggagtaaaaactggttgaatcgattttcagactggttgaaccggtttctaccagggagatcctggttcacagacctactcagccggaaactcgaccggtttcaaaaccggttgagtagaggaaaaatccggttgaaccggttttccaaaaagatctgcagtgacttttctgacagctctgactgtcagacaggtcagagcagggatggcagaggagcagtcccaaaacccggttgaaccgggtttccagggctgaaaccaaattttgagtaattttgaagagaacaaacatggagtatttgtgggaagtgaaatttgtttttctcaagggcattcatgatctggaaaaatgttctcgaagatgttttcaaaggattttgaacttggctcattgcacaacttacttaaccatcgcggatccctcttaattgcacgacgattcctatgactcaagaattataaatttagcaccgccgatgtttctaagcacttgaagcacgccatttgatgtggaattttaaattcgctgtgctttctatttttatgctcgtaagatctgtgcttctcctgtctgtagaattactgtgtacatgctaggagcaaacttgttagaatctcagtttgttctgtcatttaatcaccaaaaccctcaattagggttgattgcacttacaaaatcattggcagatcatcggatctcaatttatttgcatcttcaagttcaattatcatgtgaggagtccaggtcgctcataaccgggagcacggctgatatatcagttttacactctgcagaggtggtacaactttacccacaagccatgtatcccatctagcccgggttgatcggacccttaaacactgtcgaggtgaatggctagggatccattttgaggctttcacaaaatacacttaatacgaagcaacccgctaatgtttctaaagacgatggtggtggccccctgggtgaggtaccttagccaagaatacgtccccatgtaaatggattgataaatggattgatagtcatgtgttgttggcttttatggtgttacattgtgctaaatggattgatagtcatgtgttgttggctgccttgattttgctcag

SEQ ID NO: 1092 - DNA, 761 bp, Zea mays
  Intron number 5 from transcript GRMZM2G125387_T01 (locus G RMZM2G125387) derived from phytozome v7.0 (chr-ID 4; pos 1 65991519 to 165992279)
cagatcttggacatttttcgcaatcagcaatacaggtatagacgagactgttacaacttacaacagcaagccaacgactatgaaaagtgattactgttatatttatagaattttattgattcccagtgttcaccattttctcgtaataaaatcatatatagtttacctcagtttcttattctttgtacaagatactccagatgtttacacgactcacattaaaactcttattttcattgtatttgcatatcatcatcataacttagacttctgcaaatgtagaaaaattgtaatgcactaagaaccgctagtataattttctaattgccattaacatttaaactactttttttaatccacattgtttctttccttaggaattttgtgctgagtcagttcctgacccagtaaaatcattcctgaaagcatctgcctcttgactgaaatcttttaattatagggctgggagatttaaattttcatgcaaacactaattactgatttctttgaaaggtcaaccaagtgcctgtactcgatgcatgtttaagttgtcagcatatctgtaattctttatattttatattatactcgctatccttgacatccctgcattgcatgagatattgacattagcgtcatctctgaatcttgattgtgctagctactcaccacacttgaaaaaaggaaaatataaatgttgaactgtcatcagattctgaacgtttttttttaaaaaaaatcctgacagattgcattcatat

SEQ ID NO: 1093 - DNA, 2629 bp, Zea mays
  Intron number 1 from transcript GRMZM2G099379_T01 (locus G RMZM2G099379) derived from phytozome v7.0 (chr-ID 1; pos 2 79904352 to 279906980)
ctaaaaaatagcatacatgtaaatataaatataattttccagcataaggtatcattgttgtcaaaatctactctacaatttttctaatgttctcatcttatgcttctaggctatcaaaactgaaaagtacttgtccattccgatcacccttgttgcattggacccatcataaccatgcagtggttcttgtacgatagttaggccctgtttgtttgagattataatctatataaattatataatccaatgtaaataaactagtgaggaaacaaacaagcaacttatctgataagattacataatctagcacttgagattatgataatcctataagctcatcaaagggtgcttatttcagcttattttttatgaaagacccactacccatggcaagttgattaaaattacttccaattgtcatccacctatccataagcgttctcacccaccagacaattaaaacaatcaagggtattattgtattattgccgtccgacgtgatgtgccgacaaaggccgtccctgaatttattcatgtcaccggtgtcacggcgccatatatatcatgcatgatgcggacgccaggccaggacgccgtacgcctttaattaagccccgtgttttgacctaatctaaccgcgctcgcgccccctagcgatcaccactctcaattcctctgtggaagaagttttaaattctcgatggaagctgtttgcggaaatttcaaatgtttggtcaatctttctgagacctactcctacgcgcgcctactctggtcgtgggctcgtggccgatggcgagctcagttcgaggtcaagaaggaccggtccagtccatgtgccgtcacgtaacttgtgatgacctcacatgtatacgatacgagaaccatggatacgatacgatctctcctactactaacttaaaacgatccatttcgaattttatcaatgtcggtggtgagtcgtttggtatgacctgcacttgcactcgaaccatgtatagtgttgggtcaaaacggcttgatccgtgcctatctcacggatatgtcaagtctgagttttttggagttgggtcattttatttggctttgcattggttttttgggttgttcggattttggatcaaaaatcatgacatgtatctagtacatccatggattattggatgatcaaaaactttagtccgtgtctgcccattgcattggtcgggttggaccagttctgatttttttggtggcccatactttggtctacctactaagtcttgacacaatatggcgtcataatttagtattattaaatttgattaagtataaaaaatgtatcaatttataatatcaaataaatactaacagattaattttgaaatgtattttttcataaattgatttggatcgtaaaatataaatattatcactataaatttgagtcaacgtgattcactttaatttacacgcgcgtaacctacatagttgtgttattttttagacgaaaaatgtatatgtgacattgctctcacaagttcgcaacctcgttggtcaggcttatgtaaaatagagaacaacgaattgtagataataatatttgcagaataaagtttaaaatatgggataagataggggatgagatataagattttctggacatggctttaggcctatttaaaactgctctaactctaaaatatttagtgcagttgatgatgtaggtcattataagttccacgaaattatgtacctaaagttatagatctttagaagatatcaagaaaagtcattttgtttttttatttatactaaaattatttttaaaatttatgaacctcaaacggcattggcgaggcttctgtttccccttgtttgatggcagcagcgcgcctcttaaggtgttgcttgagatcaatggcgagtcatttgaggtgtcgctttttcgtcttgcgcccgacatcggcaagctcgccctggccgaacttgcaagaaggcaggcatgatgtcatctcaatcgaggggccaggctttagagcttgcgctccctacctggcacaccaaatattggagaggggaatcatctggtcaggtggtggattgcacccacccggattctcagatgaggagtaggcttagccgtttaggtgattgcctggtcttctagatgaacacaagagtttagagtggttcaacaccttggcctgaggaggctgatcgcctgatccgagacagttagctcatgggattaaactgccacgtatttgggtttttctagcatttttgttttagcagtgagcgtaatgtaagcaatgcgctgaaacttataccgctgaaatgcttcctgtatcagaaagttattcaaaagaaagacggctcaacaatacatccatcagcttggtgctacttgtgtagttggttatatctctggggtcgttggtactgttgtaagtcctgcaaataatattgtctcatccatgtacaacaaaaatgctaaaaaatagcatacgtgtaaatatataaatataattttccagtctaagatattattgttgtcaaaatctactttacagtttttctaatgatctcatcttatgcttctaggctatcaaaactgaaaagtattgaatttcacaatttgttcaca

SEQ ID NO: 1094 - DNA, 10399 bp, Zea mays
  Intron number 5 from transcript GRMZM2G146486_T01 (locus G RMZM2G146486) derived from phytozome v7.0 (chr-ID 1; pos 2 46711268 to 246721666)
gttgtttcttaaccaacaggattcttccattactgttgcttttgatgatattcctgaagatggcttaaacagccctctgcgtcttgagaagcttgcaaatgaggtactacaacattttgcagcattccatgctttctcctgataaccgcagctttttaagctcattattgcaatattgcacttctttgtttgcaatgtcatattgtccatgtttgttaattgctggttacactgaccaacagtttaatatacttctttttttggccgatcttctcctggtgtagtctagattttactggtttgccaggctgaccagacatcaaattatgataatccctattctaggtcacttatcgcaggatgaaggatgcactaattgaacttagcaaggctgtccaaacaggaccttgtgcaaaccttgttcctgttttatttggagagaaggcacccatgcgctccaaggatgctatgaaattcagtccattcaacaagaacttggatgattcacaggttactatttgaaatgcttcctttgttggttgctttcagctcttgattgtgtgatgcagcatagttaagtacttaagttccatttatttatattcttgtccacacggtatgagttaaagaaaatccatatacaaatgaaacttatcgttttttctggaataatatgatttgctatattattttgatagatagtttaccatagaatttcagtaaattattttgttctgtaacccctctttcattgtaaattgttaattacaattacatgaagttgagtactgtagagtatagactagacccaaatgggtccgacccttcctcagaccccgcgcaagcggagcacatgcaccaggctgccttttttaattacatgaagttgagtcatgtatgaattgatgtttgaattttcaacctgcacagttagacttaaacaacaacaacaaagccttttagtcccaatcaagttgggtagctagagttgaaacccaatagaatttacaagtcaaggtccactacacccgagctccaatgtagcacgctactaaggaagcaatgacgcacccaccacacgtcgcaaagggggcgttgattcggcccttgcccatttaacaccatacctgggttctgatatgtcgtgtcgctaagagggttacgttccaacggatttctttcgagtttcgtctctattagaatgactaggttcaatgttggctcaccaagcctctatcataaccctcctttaccaaggcttgagacctgctatgttgagaaaacatagacaaagtctagtacttcagtgttagacttaaagtatataattattaattatgggagccaaaattgcaattcagttcaccaggatgtctgccattaattaaatgctgcaatgctattatgctagaaaggatgttgttagtgtctgttgcccacgtatttgattgactatatcaaaatacgttacagttgtagttgcttttattagttctatcaccatatggagaaagattgtgactatatttggaagtattcaagccggagttaaaaaaaatacctaatttcttgatgactggtgaacgagagattagaaaaaactcaacctatgggggtaagaaaactctcgagtattgtattaaaaagaagaccttttgagaaaaccttcgaacccttgctccatctatacacaacaacaccgtagcccatgtgagaacgactgcgaccagggctgggcttagacctatgttttggcgtgggaccgacaagaggatttcttttaaccccaacctgaaatttgctctgacggggagtcgaactcaacatctgaggagtgctactcggaccacctaactaactcagctagagaccctttcgcgtgaacaagtggttacacttgagtactttaaacattttactactaaggttgtactatgaagaaatactttcacagaatgatccactgtgtggctacataccaagctaaatacccaacagtttacactttgaattaagtttcagaaggaagatataatagctgttgatagttcgttttattcatcacaactccagttttttttttcaattcaagtatttcttgaatttaaaccgatagtagaagtagcaactgaaaccagccgagcaggcctcagcaacttgtggatgtgccatcacattttgcattcctctcaatgttagatgactagttagatggccttgttgcagggctgtagggcctgcaatctactacagttgcatcctcttaaatgttgatggtttaccttgtcatatttttaggttgttgctgtggcatttgtaacttgtgttttttttttatgtttcagtgttttgcaaaggttcatagtactatagtagaggatttctattagaaagttattattgtttggaaaaaaccaggagctgcataaatattccgttttggtttttgaccttatacaccatatatgttttttcagtttgcttttgtataaacatccaagacacagaatattatttgaaccacagggaataaattaatgctgtatatgtcttctgtagaaagaggctatttcgaaggctcttggatcaagggatgttttcttgcttcacggacctcctggaactgggaaaacaacaactattattgagataatattgcaggaggtcaagcgtggatcaaagattcttgcctgtgctgcttccaatattgctgtggataatattgttgagcgacttgcacgatacaggttcgcttgaacaaagttgtgaaaatgttcatcacagaaattttttgctttaagatttctgttggaaagaaatgataacatatattgcatccattttagagaagatgggatgtggtaaataatcttgtcccatgagtgacacaatatatgcctttttcaccaatttgttaaacatgatacgaggctgttgaacttctgcagaacaaaattggtgaggttagggcaccctgctcgtttactgcctcaagtgctcgacagcgctcttgatgcacaggtattacactattttaagtggttgtcagtttgcttctatgctttgttagttggaactagaatttctagatgcataaagtttgttatttactccctttgttctaattctaagatgttttggcttttttagatacattgcttttactatgtatctattaatctatacatagactatatatgagtgtgcaaaagctatgtatctagaaacccactgatggctaagaagagaccgaaacatggttccgaccgagaaaatcatcgaaccctggttccccatcactagcgggccatcaccacccattctgcaacggcccagccggagggtggcatgcaggacgtaactcagaagcgagcgggacacgacgaggggatttttttaaccaagccataaattcgccccgagggggatcgaacccaggacttggaggtgctactcggaagcttgtaaccactaggctagatgccctttcgcgattgactactttctaattgttggcttatccaaatacatcgcaaagtgtgatcatcatttgcctttattggatattttatgaaaatctggattatgaatcttgtattcccttaggtcagatcggtttttgcctctgttatgcaggacaattctttgtttccctttggttagatcaccttttgcctatgttattacagggcgattatttcttttcccagcatcaagaaatgaggtggttctatattgtattttctttttgttatcaaccatatgcatgctgtttatttaaacaatttaactgtaaatgatacagtttaaatttactgcaagatttcttgtttgaatatatgagcagaagtcatatgatctttgacctgtgatacctccatgtgttcatatgacttctgggaccaggttttacgagctgataatagtagcttggcaggagacattcgcaaggaaatgaaggtaaacagctattcattcacgtccaagctcttgcttttatttacaccatgactgcttcttagaatccatggtgccagcctgccaggttttcaaaacttgaacatgaatatgtttacatgttaatgttctgacatacaaaaaccacatcaccagatttatcacaatacatgtgtttgttatgttttacgaatttagcgatttaactgcaaatgaggttatgggtcatatcagggaccgcgaaaaataaaaaggaatatcaattagaaagaatgcagtgtgtacattatttggacacactgcggattgctattaaagaaccgactactgacaaacctcttataattgtgacttcagttactttattctcttcagttagattttttttggtatgtgtcccttgtaggtgctcaatagcaaattgctgaaggctaaagataggaacactaaacgggacatcaggaaagagctcaaaacgcttgcaaaagaggagagaaaacgacagcagcttgcagtcactgatgtactgaaaaatgcagatgttgtgctgaccactctgactggtgcatcttcgaaaaagttaaacggaattacatttgatttggttgttattgatgaagctgcccaggcacttgaggtggcatgctggatagccttgttgaaagtaagtataagattcaagcgcaaatcgaagtttgtgatgcattctgtaatgatgtattttttaatctattgacagcatgcatgacaaatattgcccagtgttagcgtgatgtattgggaaatagggcccaggtggctcggctgccctaacagggtgcggcggctgcctccccccctctgtatttggttagttggctgtgtttggcaaggatcccctagattagacctttcctattgttagattagatctttcctttattagggatatccttgcctatatgtactgagccttgggctcctccaattaatcaatcaactattctcagccatactattctttcatggtatcacgagaccgggatctccccaacccctctcacccttccgctgcccctacgcgctgaatccgcgccgcagtatggtcgggacccctgcaccctccgtcgacgaccctgctgagcaggctcgccgcgactccgacgccttgaaacagcacctcgccgagactcgccgcgccgccctcgccgaagccgaggcggccgagcaggaggccgctgctgcatccgcggcacgcgacgcagccgccgagcgcgtccgcaccgcactggccaaggcggccaaagcccgggccaacgccgctgctgcggctgatcccaccgacccggccgacgacgccgaccacgaggaagccacgaacatctcccgcgccatgaccctccacgaggccgccgccgtcctcaacctccatgcccaggctgtttccggtgcaaaacgcccgcagtctggtgcccctcgtcctcgacacctccggcaactaccctcggtggcgcgaacagttcctcctcgccgtcacgaagtattcgctgcaggaccacgtccgcagctccgccatctcggcacttcctgattgggctcggatgaacgccgtcgtcaaatcttggctgtacagcacggtcactgccgaccttgctgaagccgtgatcgagcaccgcgccaccgcctacgaagcctggatcgccatcgaggaccacttcatcggcaatcaggagactcgtgctctccacctcgacgccaagtttcgcacgtttgcccaaggtgacctttccgtcactgactattgcaaacacttcaagaagatggccgccgaccttgctgacctcggcgaacacgtgactgaccgcactctggttctcaacgtgattcgcgggctcaacgagcggtatagggacatcggggtccacctccgccgtggtcgccccttcccttccttcgccgccgtccgcaatgaactcctcctcgaggagatcaacatggtgcagaccccctctactcctccgactgccctcgtcgccactggctctcactcacctcgccagtctgcgccgaccagcagcggcactccacgtccagccgcccccaagcagaagaagaagaagcggacaccgaaccaccgcacctcctccggtggccctgccgcgcctggcagcagcgctcccttctccgactcctctgctgctgggcatggcggcggctggccgtcgctcttcaacccatggaccggctccatccaaatgtggcctggtccccgtgcgcctcctctggcccagcttccccaggggcgtgtcggcccacagcagcagcatgcccaacaacaggcgcttctggcccagcagctgtactcccaccaacagcagcagcagccggtgcagtaccagcccatggcggcgcagtaccagcccatggtgggatctccgctctgggaccagaattctctggcctccactttcagcaccgtcaccctcactccaccggcgaacgactggtaccttgatacaggtgcctcttcccacatgacctcacatgatggtaccctctctcactcctcaatccctcggtatccctctcccacctctattgttgttggtaatggttcacttctgcctgtcaccgccaccggcacaacacaccttggttcccttaccctaaataatgttcttgtttcgcctcaacttatcaagaatcttatttctgttcgccaattcactattgataacaattgttctgtggagtttgacccgtatggttgttctgtgaaggatcttctctcgcggaacgtgatcatcaggtgcaatagctccgggccgctctacccactgaagctgctcgtggctcactcccttgttgccagctccacatctgcctccctgtggcatcgtcgcctcggccaccctggtcgcgaggcactctccaaactcacttcggctatccctggttgtaataaaagcttggagtctttgtgccatgcatgtcagctaggacgacatgttcgtcttccttttaatccttcagtgtctcgagcgtccaacaactttgatcttattcattgtgacttatggacctctcctattgttagtgtctctggttacaaatattacttagttgttcttgatgactgctctcatcacctatggacgtttcccttacggcttaaatctgacacgttttccaccctgtctaactttttcgcctatgtgtccacccagttcagcgcacgcatcaaggccatccagagtgataacggccgggagttcgacaactccagcatgcgcaccttcttcctcacacatggcattcactttcgcatgtcatgtccctactcgtcctcgcagaacggccgcgccgagcggattattcgtaccactaacgatattattcgctctcttctatttcaggcaagcatgcctccttcatattgggctgaagcgttgcacactgcaactctcctcctaaacatcttgccaaccaagacactgaagttttcaactccgcactttgctctattcggcagtgccccgtcgtacgataatctgcgtgtttttggctgtaagtgttaccccaatttgtcggccactgctccccacaaacttgccccgcgctctgccctctgcatcttccttggttattctgctcaccacaagggataccgatgtcttgatcctacctccaatagaatcatcatctcccgtcatgttctttttgacgagtccgtttttccctttgccgagcatacctctactcccactgctgcggacttcaacttcctagatgaattccctaacccggcgcctcttcccatagggctgccaactatgtctcctgcaggtcctccgggcgccaccactgttgctgcacgcccccatgccgacgtgcagccacgccccgcgccgccagtaccaccaggatttcccgcactcccacgtgcgggtggtgctccgccctcaccaaccggcgctccgctctccgcgccacgcgcggcaccgacggcctctcccgcactcccacatgcgggtactgcgccacgtgcggctccggcgtccccacctggcttcccgacgccgccatgcgctgctcctgccttgcgcgtctactccaggcgcccaaagccggcggtggtccctccggcggcaccagccgccaccacggcaccggccccggtgcttcggggtgctgttgctgtccccccgacagtgaaccagcacaccatgacgactcgggccaaggacggttttcgcataccgtccttataccacgccgcgccactgtcctcgattccgaagaccttccgtggcgcccttgccgatcccaattggcgggctgctatggaggaagaacatgctgcccttctccagaaccagacttgggagttggttcctcgcccgcaacatgccaacattgtcacgggcaaatggattttcaagcacaagttccacgcagacggttcgctggaacgctacaaggcacgttgggtccttcgcggtttcacccagcgtccgggcatcgactttgccgaaaccttcagtccggtcgtcaagcccgccacggttcgcactgtgctctctctggctctctctcgccagtggccagttcaccaactcgatgtcaagaatgccttcctacatggcaccttgacggagaccgtgtttgctgctcagccctccggattcgaggactccgccaggcccgactttgtctgtcgtctgcacaagtcgttgtacggtctcaagcaggctccccgtgcttggtacagccgcttcgccacccatctggtctctcttggttttgtggaagccaagtcagacacttcactgtttgtctaccgtcgtgggaccgacacagcctacctgcttctttacgttgatgacatcgtcctcaccgcctcctcgacacatctcctacggaaggtcatctcagctctccagcaggagtttgccatgaaggatttgggcgaactccatcacttcctcgggatgcaagttcagcgcagtgccgacggtatggtactctctcagcgccagtatatggttgacatcttggatcgtgctggcatggccgagtgcaaaccttgcacaacgcccgtggataccagccctaaggtctctgccacctcgggcgcaccagtacctgatccgtctgactacaggagtctcgccggcgccttgcagtatctgaccttcacacggcccgacattgcctacgccgtacaacaggtttgccttcacatgcatgaccctcgagagccccacctggctgctctcaagcgcatccttcgctacattcggggtactcttcacctgggacttcatcttcgaccgtcaacccaggatgacctggtggtttattctgatgctgactgggctggctgtcccgatacgcgcaagtccacctcgggctatgctgtgtttctgggtgacaacctggtctcctggtcctccaagcgtcagaacaccgtgtcccgttccagcgcggaggccgagtaccgcgccgtcgccaatggtgttgctgaggcttcttggctccgacagcttctccatgagctccacattccgctccgccgtgctaccattgtctactgcgacaacgtcagcgcggtgtacatgtcctccaacccggttcagcatcaacggacgaagcatatcgagatcgatcttcacttcgttcgtgagaaggtagccatgggtgccgtgcgggttcttcacgttcccacgacatcccagttcgccgacgtcttcacaaaggggctgccttctacagtgttctctgagtttcggttcagcctgaatgtccgtggctaaccaccgacaatcagactgcgggggcgtgttagcgtgatgtatagggaaatagggcccaggtggctcggctgccctaacagggtgcggcggctgcctccccccctctgtatttggttagttggctgtgtttggcaaggatcccctagattagacctttcctattgttagattagatctttcctttattagggatatccttgcctatatgtactgagccttgggctcctccaattaatcaatcaactattcccagccatactattctttcacccagtgcccactgggtaaatcttatgacaattaatgaagtcatttttttacataaattcacttaaagcatcctgctacaggcagttgtttagacgtgagcttctcgataggcattaggcaatgccataaattcacttaaagtgattgcctttgtgtttagtatgaatcagcctgcacaatactgtagttgtaataatgtagcactgtagtttcagtcattttggttatgatttggagcttaatctactttcttggcatccaggggccgagatgtattcttgctggagaccatcttcaacttcctccaacaattcaaagtgttgaggctgaaaagaaggggatgggaaagacactctttgaacgccttactgaagctt

SEQ ID NO: 1095 - DNA, 3040 bp, Zea mays
  Intron number 1 from transcript GRMZM5G857005_T01 (locus G RMZM5G857005) derived from phytozome v7.0 (chr-ID 9; pos 4 6936410 to 46939449)
ctggcgagcttgaagaacaggcgcgcgcagctcgggtgagtgggcagaggtgaaatgagcgaggcaggggggagtgggatgtgcggggacttgtagagggggtcagggtgccggtttggagctaggtggcgtcgtgggtgcggaaatctcggcatgcatgcgcgcggtccgcgccggcgagcggttgaaggagaggagaagggactggcgagcggggcccacgggacaacggcacagacgcgcgagcgcataacaggccgaagcgccgacaaggcgaccccactggacagcgagagggagaaagggaagagaggcgcgggtcggcgccgacaggcggggcccgcctgtccgagaccaaaggcgcgcggttgaagttggccttagtgggccgactgggctgctttcccttttcctttttctctggattttctaattccttttctatttcttttctctagggtttccaattccaaattcaaattatatttcaaattcaaataaattcaaacatgtgcaacacttcaaagaataactaaactcaacatgatgcaacatgtcatgactcataatgttttagcaaaaataaaataattaaaatcccctaactttaaactaattatacttaaaagaaaaaagggagagagaatctagagagagatagaacctatggtgacagagagaagagtaacacatgaatccccctaacttcaagttgtgcccttgattgcattcatttaccaaataatgttctttattatcacttattcatgcaaaggcttaattttgatgggacccaataggtcaacctagactgttcatccttttaccttggttatccctgaatcatttgggtagttttgctattgctttatatggtcttgggttaatatttcattatatccatgttccaaatattctgttattttatttatgttaatgtcaagatcattatatttttaattagaacatggagcttaacttgagaaacatgtgcgaccataagggtggaatgggacacccttggctaactaattaggaaagctagtggaagactaccttacccgaaaggggcaagggcagtaggggagttgcatgcagagaggttctcgggttgattttgttgcgatggcggtcagacgagggattcttgcaagtgctcttcccataaactgtagcgggttttcagaagctagtggaactttgtaaaggcctcgtagtggatccctagccattcacctcggtagtgtctaagggtctaactaaccctggcgacatgggatgcacgacttgtgggtacagggtacaacctctacagagtgtaaaactggtattatactagtcgagctcacagtcaagagtagctcaggactctcacatgattaaattatgaaactaaattcaatctgtcatatacattgcatgggattacttattaattttattcgtttattattattatggtttggtatttacttacacttagtaactgctaataaaatttgaccaacttattaaaaagcaatgctcagctttaactcctattgttgatcagccttacacatcacctgaactcccacctttggtgagttcatgcacattattccccacaacttgttgagcgatgaacatgtgtgagctcacccttgctgtctcacaccccccacaggagaagaacaggtggttcaagaggagccacacaacgaggagttcgatttgatctaggtggcgtctcccagttaactttatggcaccaaggatggactttagtttgtttcatatttataatttattttgtaagacttccgctatgtaataagtactctgattatattgtgacatttatctctatacactctgttattatatgtgatgtcttctttggtgcatatatgagatgcacccggctttaccccttaaatctgggtgtgacacttccttgggaaggagccgtaaggtaatggtaaaacaaacgttctaccaggttaaagccacacgtactcatggggcccgagattgtttggctatttcacatttatcatggcagatgacgcggtgctacgatggtcccaggcgccaccattttggctaccctgacccctggcctctatagcccaaggctcggcacggtccatcgtgtagcgccctacaagaggtatgcacactcaggcgtagtccgataggccatcagtgtgtcgcaacccgaggggtgcacagttcattaatgtgccgcaatcggagaggctcataggtcatgagtgctatgtgactcgaggggttcgtaggtcaagagtgggaagtggaccggcgctcgcgctgttaagtgcggtcagcttatatggcaggtcagtctatggccagacacaggatccactagagtggtccccttcgaacacgcttgcccccctccggtcaggttatgccatgcctggccccatgctcagtgtcgcgggattcgactaggggcgggttctttcagggttgacatatccacctctaccaactcactaatgggacctagcgaccaagggccctttcctcagcgcattgtctgactggcgggtcatagggactggggatcatttccccaacagtagcccctgaggggagaatatctccctttgagggctaatgtaggtcggacggtgtcccgtcttttcattccccgagaaatcatggcgtcccctcagaacctaacgtcgtatttatggtggtcaatcatctcttgggacaaaatcgggcgctcttcgcctctttttataaacctcagccggtcgttcgcctactagtcattcttgatgtgtccctcgagcttgccttcgaccaggttgatggtcaaaccttgagctattgggatgtcgcactttgttggtcatgatccgaggtaagctccttccttcgggcttgctgacttccttttttggtctgattttgctacaccctttcttcccgcaactgtgcggtcaccgctgacccgagggttgtcccatgatcgagctccatgtttcttccttttccccataggtgttcgcagggagctacg

SEQ ID NO: 1096 - DNA, 9452 bp, Zea mays
  Intron number 2 from transcript GRMZM2G030915_T05 (locus G RMZM2G030915) derived from phytozome v7.0 (chr-ID 9; pos 1 48079606 to 148089057 reverse strand)
aaggcaccgtcggtgttcagtgtgcgcaacatcgggaagactctcgtatccaggacacagggtaccagggtatgtttttttttgactatcgatattttttcgtactgcccctacattgtgtgttgtgaacttgcgcatatatgcatgtgtatgtagaccgcgctagtcatgcggtatattagatacgctcgttcgcgcgtttgtttgtggggactattcaggtttcattgcaagaattcgtaggagaggtaacaggtaattaagtttgttcggatttgcttgatagatagtttgtcagtatttgagatcgcagccttgcgtgcttattctaagctgttcctgaagaggtatcattcagtgcaatgcaactagaaccgcacctatcatttttgcactttctgttggaacgattattattattcaatccttttgcttttatatggacaataacgaatcgccatttacttgagcacccgaatggcaacttgtccttgttcatcaatgatctatcactgaaggtcacatgatcttttaatggcatggatatgattagtcttattaggtgccgctttgtttgcaatgttattcagaacgtagatgcactgcttactgtcctgatttttcgattgacgtactttctctggttttagattgcttctgagggtctgaagcacagagtctttgaggtttgcctagctgatcttcagggcgacgaggatcaagcttacaggaaaatcaggctccgtgctgaagatgtgcagggcaggaatgtgctcacaaacttttgggtaatgatcggcattcttttgctagcagctgttgccctttgttgtgttgtttatcactaatttgttttctattactagggtatgaattttaccactgataaattgaggtccctagtgaagaagtggcagacattaatcgaagcccatgttgatgtcaagacaaccgacaactacatgttgcgtttgttctgcatcggcttcaccaagaggcgcccaaaccaggtcaagagaacctgctatgctcaggcatcccagatccgtcaggtaacgtttctgttctttccacatatgcagcagtcgtaaaactgtagcaatttctcaaaacgtcaaacagtcacctgctatatttgcctgttatctttatacttgccatgtattgtgcgcagatccgccgtaagatggttgagattatgatcaaccaggcttctacatgtgacctgaaagaacttgtttcgaagttcattccagaagttattggtaaggagattgagaagtctacctccagcatcttcccacttcaaaacgtcttcatccgcaagggtgaagatactcaaggcccccaagttcgatcttgggaaactcatggaggtaattgctacatgcatgcaaatagatttaccagactatctccctgttacttgttatcctaaaacttgttgcttatcaggttcacggcgactacaaagaggatgttggtgtgaagcttgagaggcctgtcgagggagatgaggctgggcaggaggttgctgctgccgagtagtttgtttgctagttctatatctaggcgagtctggacatgaggttgcttatgacgtgaacttatagagttgtcttggctatgtgttttcgtctagccctaagattttgtcttgaaacaagtttaaaattaagattatttgtaacaagtgtttaggattactcgtggtgatattctgtgttcgattactgctgtactaagttccatcatcctcatttttgtttggtcatcgataatttactttctcattcgtatgagatgttctctgcttatttgttgttagctgacactgtcagttaaactagtgcccccattcttttttatttatcatgatttagtttaaaaatgaactaggactccctctcgtgtattattagttgttgttttggataagatttgactaaaacttataaactcttgactacaaataattattttattatttagttttgaaacctaatgattatatgttcttatttattttaacatgtacttttataaaagtgtaattgtattaagagtttatttgtattttaacatttaacaaaaaaatattggttaacgttatattttggagaaatataggggcccattgagaagaaatatgttatagttgacactgaagtgaggcgaagcaccaggcttcgtgagaaatcaggaggctttatgaagtctggacacttgcatagtgcctacttttgcactacccctcccataaaccccagaaacatcaaaaggcttggcgcggagctctgcatggttgacaaagagattgctccccccccccccccccccccgaagctctagcagcaactaagaaacagctggaggtgatccaacgtccttgcaaagctaactccaacactaggggcaagagagagaaaaagaaagatgacaagaagaaaggacccaagagccagacagaaagtagagcatgattgctctactctgctatgtttgcttattgcaacgatattttattttggggtttcttattttgtctcctataaagttattgcaacggtatttcattttggggtttcttattttgtctcacatgaatagatacaatacaagtctagtggggcctcacaagcagccgaacattttagattgtgtatttttacttttggataatcatagaactgataggttgcacattggctttatcttcaatgatcgttggttaattttattttggacttatgcactcgtttgcatggattggttgctttggagggttacacatcactatattatatacatgacaatacttcgtcgctccctaattttttggctttatctgttaagtgcatggaccgctctaattttaaggtgttcagttgattccctttggcataattggcattatgtatgcaccatggcacatggcattccgaacgcacactccgtgtttgttactggtcttatgaatcacaatctttatacatacgatgaacaaacaaggagaatggaagatactggtccataatagttgggagatcaatgcatcagaaaaatgaaattccctgcataacagaattgcataatctaaatgtgacataatatggctccaagaaacaaaaagagaatcttttgatgaaccatacattagaattttctgccctcgaccttatgatggtttttgttataactcttagttggttcatctggtggcttgattactatttggcaaggtgccaagttttatggagaaaggattttccacaatgagcatgcacatatggtgagatttaaatacaaaataataaaccaagaatggttcctcgtaaacatttagcgccttccacccccgactcaaaaaattgagtttctgcaatggttctctaactttagtgctaaccctgttcaacctataatttttatgggagatttcaatcttatttgcagcttggacaacagaaacaagcctggaggaagtacaacattgatgcttgaatttaatagtgcaataagtcaacttggcattctggaaattgctttaagagggcaattatacacttggtcgaacaaacaaacaacaaccactcttggagaaactaaactggtgctttgtgacacaagaatggatctcgcacttcctaggtacagaggctcatacactcgtaagagacgtgtcacaccacgtgccctgtctggttgaaataaagatatgcattccaaaacctaacatctttagattcaaaaattactggttgatgcatgataacttcctttcagtttttcaagacacctggacccaaccattatatcaactggacccagtcaggagactaatggccaagtttaaaagggcaaggaaggcattgtctaaatggcataaacaactttccaaactagccaataccattgaaaataacaagcttattattcaattcatggacttgattgaagagacgagggatctaaccatccaagagtgcaaccttagagatattctcacacaccaacttcaaaacatgctagaacaacagaaggtatattggaaacaaaggtgtaaaatgaaatggtcccaaagtggagatgctagtacaattttttttcataccactgcctctatgagacaaaatcataacttcattgctacaatacaagatgacacatgacatatgatatcttatcatgaggccaaagccaatgtattgtttgaggcttacagaagtatacttggcacttcgggggattctgaaatggtttttgaccatgatacgatattacaaaatacacaagatttgagtattttggagtcaccattcatggaagacgaaattaactcagtaattacaagcctccctaatggcaaaacaccgggtctggatggcttcaatacatattttctaaaaaaatgttgaccgattatcacttagtatttttatgatctttgtacaagctttcatgctgaaaatgtttgtatgcaaagtatcaatgggtcacacattaccttgataccgaagaaaacttccccctcacagtcagtgactagaggccaatctctctacttaacacaagcatcaaactagtgacaaagcttcttgctagtaggcttcagaatgtcatcaccaaactaatccacagaaactaatatgggttcatcagggggcgcaccatataggactgtcttgcttgagcctctaaatatatttatatgtgcagaaaatctcaaaggcaaatggttattcttaaacttgactttgaaaatcatttgataaaatagagcataatgccataacggatattcttcgtcataaaggcttcagaacaaaatggttgaagtggatagatatgatcacgagctcagggacatcatttgtcatgttgaactaagttccagggaaaacgtttcattccaagagaggagttcgtcaaggagaccctctctcaccgctaccgtttgtccttgcagctgacctccttaattccatactcaataaagcaaaagacgttggtatcatcaagctccccttaatacaacttatcattgagctcccctcgaatacaacttcagggcatgacctctcgattatacaatatgctgatgacacaattttggttatggaggcttgtcctagacaacttttcttcctcaaggctctaatgaactcatttgttgactccacaggactccatgtcaattatcaaaaatcaaacataaaccctatcaacgtgtcaaatgaaagaatggagctactagctaaaaccttcaactgcaaaattggtacctaccctttcacatatctagggcttccaatgggaactacaaaactaaggattgacacattcttacctctggttcagaaaattgaaataacgcccatcagcatctttcttcctctcgcaagctggcacgctacagatggtaaatgcggccttcaccttgaaagtcgcctagaggggggtgaataggcaaatctgaaatttataaactttaagcacaactacaagccaaggtcagtgttagaaataaagtcaagtccgaaagagagggtgaaaacaaatcaaccaaagaaatagatcggatgacacgatgatttgttttaccgaggttcggttcttgcaaacctactctccgttgaggtggtcacaaagaccggatctctttcaacccttcccctctctcaaacggtcacctagacagagtgatcttttctccttaatcaacgagtcgcttagacccctcacaaggaccaccacaacttagtgtaccttgcgttgattacaagttgcttgagaacaagaatggaggaagaaaaaaagcgatccaagcgacaagaactcaaatgaacacaaaaatctctctctcactagccactaaatgtttggagtgaatttggacttggagaggatttgatctcttgatttgtgtcttggagtgaagtctagagctcttgtatttgaatgcaatggctgaaaacttggataccttgaagtgtggtggttgggggggtatttatagccccaaccaccaaaatggccgttggggaggctgtctgtcgatgggcgcaccagacagtccggtgcgccaccagacactgtccggtgtgccagccacgtcacccaatcgttagggttctgacggtttcgaccgttggagctctgacagattagggcaccggacagtccggtgccgcaccggacatcactgttcagtgtccggtgtgccttctggcgctgatctgactctgcgcgcgctgtccgcgcactgttcacgttcactgttcacttttgcagacgaccgttggcgcaatagccgttgcttcgcatggcacaccggacagtccggtgctacaccgaacagttcggtgctacacgtgacagtccggtgctacacctgacagtccggtgaattatagcggagtggctctcagaaacccgaagctgagtagttcatagttgatctccctggtgcaccggacactgtctggtggcacaccggacagtccggtgcgccatgccgccataccagggcagtcttcggttggttttgctcctttctttttgaaccctatcttggacctttttattggtttgtgttgaaccttttgcacatgtagaacttataatctagagcaaactagttagtccaattatttgtgttggacaattcgaccaccaaaatcatttaggaaaaggtttgatcctatttccctttcacacctccctaccaacattttatttatgtacactcaagatacacaactctgtcgtgaagcaaattgacaaatacaaaaaacattgcctatggagaggtgatgatattaatgccacacgacctcctcaggcagcctggcatctagcatgcagaccgaaatagaaagggggcctgtgattctagatctcaagaaacacaatgaagaattactgatgaaaatgctatacaaattctacaacaaacaagatatatcacgagtgcatgtgatatgggacaataggtacaaaaatggttcactgccctcagaaggtagtaaaggatcgttctggtggagagatatattgaaaaacttgccagcgttcttagaaatagccaaagtcaaaacatgcaacggaaccacaactcatctttggcaagaaaaatggggcgacattctgatttgtgataaattcctagagttttttcctatatagtgaacaaggatacaactctaagacaagcaaaattgacacccatgatttaggatttgttccatctacctctatctgcccctgcttacttgcaaatgctttcattggtcacaatgcatcataacatggaactgacggacacatcagacaaatggagatgcgccaacattgcagataagtactcttcccgtaagatctatgaaatcaaacataaagtcccagaagcgccatatacctttgctctgatctggaaagcaaaatgccagcctaaaaatattcttttggctactctgcactacaaacaaaacaccaaatcagtgctcaagagaagagagatggaattagactcctacacatgtgacaattgcatacgacagaaagaagaaacatggagtcatttgtttctaaagtgtagcttcacaaagagatgctaggaaattgtcgggatcacactaacatgatctttgaacccacacattgcaatccgggatatgagaaggaaactagtataactttgggccatggagacaattatcacaatgatgtggtgcatttagaaatgtagaaatggttcaatcttcgaaaacacctctccgaccacccactggtgcaaaatcagcttcgttcaagagttgaaccttaatatctataagataagatgcgggaaacgataactgacaatgttagacaatgcatatagtcattgtaatatgacaaaatataatctgtaaaaacatatatagaaaagtaatgaaaggaatactgtaggagcccctacagtaggaaactttatcaaataaaactttacaatagaactagaatgatagaaatagaatgggatgacaatgcaattctctatgaatgtgatttgaggtccaattcagttcatccattgcaatcgtgatattcaaaaagagctcaacctaatgatttatctcctgtaaaatagtattggttctaaaatattggatatagtattaatgatcaccattagtgcttttcaaaaatataatctcctccagtagatgactaataatctccttgaatacatgaaacacatataccatgtatcgtttcctctccttttctcgtggccttctcccgtgctcccgaccgccgatgctcttatccgtcattgttctacgcatgttcgacgcttgtgcctccatctatgtttgcgagatggcgtcgacacggacactcacagactcacctgacgacgcaatgaaatagtaggtgatgtcatatcatcctgtgtccaatcgatactattccacgtgattggttcatgggctacccgcagctaggctcgcgcgcagcaggctggctggatacggtaactttgggtgtacaagcggatgcaaataaataaccttaaaataacttattcctgttgattggatgcctgtattcggacgcgtaggctcgggtggccctggctgatctgatacggcatttttctacgtacgagtatccgctcatacagcctgcgtctcctttgtgcgggtaaccaaacaggagctgagacaaagtcaatgcatacggtggtaaagatgagatggtgcgggtaaccaaacatacggattttgaattcactcgtacacctcgcgtctcacacgtgtaagtaaccaaatacattcttagacaaagttaacgcagtgatgattaaggatgtgattatacagatccgagtgaactccgtcaccgtagcccgtagtgttcctgaactcactttctctgcaccgtccgttacgctgcagatgggccgaatcagatgggccaaccatgcctcgaagcacacatatgggccacaccgcatcgtgtgcgtccatccgctcttgggtgcctgctgaccgcatgatcgaacctggaaaccctcgagtcgtatataggtagtccgctctgcctcgaagtgccttctcccgcagagccgccgacaactctctctaccgtccgataccccaagcaccagcgcggcggcggcgaccatggctgtcggaaagaacaagaggatctccaagggaaagaagggtggcaagaaaaagacgttagtttgcttgcctgttatatcccagttcttcagatcttacttgggtcgattgctttctttctttatccgttgctgatgcggttgcgtggttgcgttacttcttttatgcagcgtcgaccctttctctaagaaggattggtatgacatcaaggcaccgtcggtgttcagtgtgcgcaacatcgggaagactctcgtatccaggacacagggtaccagg

SEQ ID NO: 1097 - DNA, 1322 bp, Zea mays
  Intron number 15 from transcript GRMZM2G451179_T01 (locus GRMZM2G451179) derived from phytozome v7.0 (chr-ID 10; pos 111317572 to 111318893)
tcaacttctattggatactcgaagccggacacgtaattaacgaatggtaacccacgcacccctttgttttggttgttgcattagcactcacatatatatcgtcgtgaccaagctgagaaggtgacgcgccatccaccctgatgcatactcgctcgtctagtgagtgcataagctggaaagagcgtgcattcatgcagttggtgagatatagcttcttcgtgcccacgtgcaccagaaatgctccatgcatctgcctgttgctccattcatgattccctctcctctctcaatgaagagagacaagactccggccacaggccagccgggcacacacatgcaccaacagtgatatgtagacagacagattcctagattgtaggcagctagctaggacagcatcaggcagggaactgctttgctgtcttcttgaatgtctttatatagactggacttattaggactgatttggtgaacaggggaatggaggagcttatgggaaaggaatctcctcgctcttcaattttgattccttcttcatagatctccttcatttctctgtccacataaagagaaaaagatttaaatgttttctgcataatgttccacttcctgtcttcatgctgatggcaacaatggacaggtacctctggacaacccttgccctgcgctcaagatgctggctgacattacgcgatctcctgccgagtagcaggaggaagcaaacaaggcgatggaatggaacgacctgacaccagttcttcaagattcttctcttttaaagttccgtagcacttcattcattcagtcagccagtctatcttttcatatagtcagagaaaaataaatcattggtggtagcattcatacatgcaacaataaacaaacacaaaggaaaaggtagtgataggatcaaacaaatatttaattcagcagatattattgtgtagcaccgctgtagagcttgcacctgaatttccaacatgatgatctaattgacagtgccttctgctgtctcaactcaacacttgagctgacccgatctcgcctccttcctacattgcctctgatcccttgtattaatcggtaacgactaatatgcaattagaccttaggtacaagcatgcaaacgagcatcctattctgtttgatcatgatttaattgtatatatagttatagttttttagtagcttctttataaatctatacgaattggtggaaatatttaagtattaaatgtgacatatgtttagatcatgatgtaatggatcacgatgctcgcttgcatttatccgtgttaaattgtcttatacagatcggtaca

SEQ ID NO: 1098 - DNA, 9692 bp, Zea mays
  Intron number 3 from transcript GRMZM2G063322_T01 (locus G RMZM2G063322) derived from phytozome v7.0 (chr-ID 10; pos 80144663 to 80154354 reverse strand)
cccgcgttgtcgaccaggacaagtatccccacgtatgcctactgctgtgtctaattgtcatgccagcacagaatgacagaatccatgcccttcagcttaatcctatcggttagagtttgtactttgtaggttactagatttttgctccttggctgtttaatgttcatccttgtttgatttcaaccatggtttttgtttaatgttcgtccttctttgataacaaccatggtttttatttaatgtccatccttgtttgatatcgaccatggtttttaaggcaacaagacgagcagcccccttccagccgcctaggcgacaccatataaatgtattaatgtataattcaagtaaaaatcagaagcaaatcggacattaatattgcgaattcttagcatgtaatacagtagcaagtggtgctactagactactagtgcacggcatcgagtagtaagatagcaactctgagatctctcatctcttaatgtccataaactagtctctagtaatataatgtaacttaattaacagtgctgctagtgcagaacatatataagtaccttaagcgcagaactgaaatctctagtcaaagtgatgctgccttctcccactgtcggtttccaagttacctctcatctcatttctaattgcagtagtagtcatgatgcacatttttgtatctccaaagccaccagctagttgttgcttgagcctttttatccctccataatatgagtgaccacatagggtgcatgtcacaacatcttttttacgaaggtttgaccagtaggcatacttccaccctggatctgaactttccattgtgctatcaactttgaaaacaaagaattaaagaactaacaaaggtcagcacatggaaaggaagcggcggtccacaccactctgcatctataactagagcagcagtgataaaaacagagcagtcagggaacaaggcaggcaagcttcggcctttaagggaagacataggacatgaagagggagaagaaacatacaggcaagcaggcgggaccgtgggagctaggcaccttgaaaagcaggggacagagcttctggttggtgaggaggcaaggatgagcagtcttccactcattctatccctggggtccaggcagttggtcagacgacatgaaatcaatgctgcatacggaatggaggacatgaagacaacaataaattgatgcacaggaatgcatctgggagggaatcgatgagccacgcgggatgcatctgcaggaactcgctgtgagcgcgtaaggaagaagtggaagccggcaggtgcggtggattttctcttttggtatatcctcttctccccttgttccttttctctcccaatccccctcttcctacgtacgacttccttcgcagaaggcgggatgtgctgtgcgggagaaatttattacccactctggaaccttggacctggtttcccttctcagaggcgagtcccacgtcctccttggcgaccccctggacatctaacatgaaagtggacaccttatgtttgcatagctatgcttggacgcctaggcgacgcctttagaaccatgacatcgactttggtgggaactgagaaccagatggaaaggccatagtagtagcagttaccccctctccccctcctttccagcatctttggtagtgttgtgaacggttcctatgttgtacaaataaaggccgatggacccatggatagtgaagaaaacaagacaagggacaggtttaggacctcatggtgttcatgttgctcgattttgttttctctctacttgattccgcctcgcaccatgcatgcgaacggagccgaggttgtcctgtagcggtgcggagcagaggtggcatgccatggagcagagtggacggggttaggggcgagggagcagacgggggtagagggtgcacagagcagaaggcggtgctgctgcattagaaaggtggcagctgggtgggaatcggtggtggtgctggtattgatagcctgttagggcatcgataggagatatggtgcttagatgtgctagtgggcttttctaagacaatgggccaagtgggctgtacagacataactcttttatttctcacttattctttcatatgcagttacgtctctcatacatagctattgcgttgctgaaacataaaagtttaatcgcatttaacctagatgaggtgctaggccagggcctagcttttctgcaaccttggcaagttattatattctgaacgctcacttcctatggttgcgtacttgcatgagtgaaatgaataagagagatccggtgtttctactccttcacaccatgatatttcaggccttcttagtgcttgcaccgcacttgacggcttttttatcagccagttaattccagcacaagctgctaatggatctacattttcccactcccctgatcccaaatggtaggtcgttttggatttgtcccaactcaaacagctcactttacctttgaccgcaaatagttaaacacctaaatagattttggacacaaggttcatgctactaaattcaccatggagattaatttcataatatatatatatatatatttatctctattttgaaacattatattttctctgaactttcttgccgaagtttcactttgtaagctgtgtctgtgtcctaagagcaactccaagagattagccaaatcactggtgtagctactctctaaattttgaagagccatttgccgagtccgttggagacgcttttcttgtaataatagccaaatttacctttacaaaacgatccggccagtctcttggagttgctctaagtgaattgcgtctgatacattatgggcgtgtttggttccttggctgggcagagcctggttgaaacattgatgcaggttgagcccagcctgaataaatggatgcaagtgataattagtttggttgtttggttatctgtattgaatgagccaggatttgatgggaatatgtttggttgtctatatttagtgagccaggatttgatgggcttgtgtttggttaatctgctggtgctgggcgtatacagagatgtggacatgtcttttgattaaacagcttaaaaatttaaaaaaagaatatgttgtctatctttaaacagcttacagagatctgttgtctatatttaaacaacttaaaaatttatacaatttaccagctaaatggacagaactgggcgtgtcttttgattatatttaacagcttgatagggacaaatgaattcttaaaaaatttacacaatttaccagtaaataggttgaaaatttacaaaatttaccaacttgacagatatagcaacatggaaagagatagcaacagggacagagatagtaacatggacagcttgattcaagcttgacagcttacacaatttaccagcacaaaaaaagtacaaacagcttgacaggttacacaatttaacatgacagtatcataggcatatatcagcttgatagcttgaaaaatatacacaatttaccatcttaacaacttgacagagtaacatggacaaagatagcaacatggacagcttgatagcttgattcaaggtgtcacaatttaccatcttaacagcttgatagtagtaacataagcttgacagtaagcttgacaggtgactgaaaacttcaaactgtttactgaaaactaagagacgatttttctttctcaaatcatagataaaagaaaactggaaatcattctaaacagctggtgactgaaaacttcaaacagctggtgaccaataagataaaagaaaacttcaaacacctgattacacaataagaaataaatcaaacagctgtgtaaaccaaacagctggttactgaaaacttcaaaaccaaatcaagtgtagccagctgatcaaacatttgtaaatatgaaataaatcaaacagctgatcaaacagctgatcaaacagctggttactgatatttacactaggacttgtaaatatgaaatagttattaatattagcctcagctcagtaaaattgatcctacatgacagtgtagccagctactaaatagtgataaaggatatagataggagtatcagttctcaaaaaccaaaaccaaatcaagtgtagcatatctgttcaaacagctgatcaaacagctgattactgaaaacttcaaacagctgattacagtgtagattacacaacagttcaagtgaatcggaatcaagtgtagcatatctgttcttaaacaccaaaaacaacaaaacaacataaatgactattattagtggctggctaactgagtaggcttaatattcacttttgttatcatcattggcataaaggacacacacatcagatcaagtgtagcatatcagttctcaaacagggaaatccataggactcagggaaacatcattgttctcaaataccaaatctgttcttaatcaggataaaggagagacacatcagataaactgttcttaaacagggaaacccatcgaactcagggatacatcattgttgttaagtagcatctagtatagatggaatagagcaagtggaccaaatctgttcttaaacagtatagatgccctaaacccatagacccatagaactcagggatacatcattgttctagacagacattgctgcactcagggatacatcagttgtggtagtgcttggctaggaaagtcttgagccataggtcacgatcatcaggagtcatgtccaggaacaccagggaggtggccttgtgctccatcatgtggtttagggcatacatgagagcctccctagagaacccaggacagttgattacaacattgtagatcccaggtgctgcttcagcatggatgctttcacggacagcagcagcaacatcagatacagcctctttcatcccattgaacacaacaacatcttcatcagtcatgtacctcttcctcttccctaagttggacataggcttggtatcaatggagtcaccaggggtacccttatcaacagtctttcccttgccagttagattggaagcatcaacaaactctgaggtcacttcaatgccatcatctaagatgtcaacaatgtcacttggcttgcccaaaggctcatttgaacccattgcaaacctaccagtggcaaccccacttccaaaaatgatttgcatagccatatagttctctatgggcctattgaggtaatcagcatcttttgggtgatcctattgagttagcaactcaagttagcaatttgaagttagaccaaattagagaaatggaaggtgctggtcctaaccttgatgtaagcagcataatgaccctcttctaagcttatgacaaaggtatcctcatcccaaagagcgccactaatgtccttcagtttgcaaactttgacccacctagacctccacttacgaaggtgattgtacacttgctggcctgttacttcttggccacagaactcgaagacatttttagcaacagagttaaggtggatttccttaaaacccttgtcagtcctaaccccagtacctatcaactcaacaaaacggcgtagaacaaactcagacattgcggcactccacctaagagcaggcctagccccctggctagcaaccccagagaccatgtcagccatagctggaacaagtaaaagattagggggaatacagatagatattctcagcataggaaagtaatgtcaacataggaaagtagaagtagaagtagcagtaatgtcagcataggaaagtagaagtagaagtagcagtaatgtcagcataggaaagtagaagtagaagtagcagtaatcatcattgctagtcaacaatggtatcaggatgtaagcaatgtcatcattagcaactgggcacatcacacaaagaaagtgagttcaaaactatagatagttcatcattgctaatagacaatgttctcagcatggaaccagttcttacaaatttatgagcaacttagcacataatgttcataactatatatagttcatcattgctaatagacaatgttctcaattttgccacatctgttgagcaacttagcacagtacataatgaccactatcccctattttgccacatctgttgagcccaattgtccctggtagcagaccaggcagcattgtccatgacaaggtcaaggggagctccctcatgaagttgatttgcagcccatgtgtcttctagtggaacatgttcatcattcccatgacgaagaatccagttgtggaggatacaacaagctaggactagctttacttgtgtcttgtatggatggaaaggtttgttgtataatattttgaatctgttcttcaaagcaccgaaggccctctctattgtcacccttagtgatgaatgtctaaggttgaagagctcttttgggttctgtggattcctccccccatattcactcaagtggtaccgtgtggcacggtaagggggtaaaaacccaggcctgacagcataaccagcatccacaaggtaaaatttacctaacatcatagatcatatattagggaataccaagggaagtgtgtattgtgtagaccaatactaattttttaccttggggcacttttagaccatcttctctctcaagggcatcagcaaggataagggcatcatgtgctgatccctcccagccagcaagaacatatgtaaaccttagatcaaagtctacagcagctaagatgttctgtgttgtggtgtgtttcctgccaaggaaggcagccctctgatttctaggaactcttgctagcacatgagtgccatcaatggcaccaatacagtcctacacattagggcaaacatttgttactacaaacctacacatgaaaaggaagggattacatttgtggatggctgaccttgaaataggggtaccatctgtggctatctctaattttggttggtgtagcagttgaaggtggcaagatcatttcatttctcagttcaccaaccgcatacaatacttccctgaagtatctgctgatggtctcaatagaccttcgaaaggtcatgtgtacaactctaaacctttgattatgacctaccacatgtaaaaacatggcaacctgctcctctactgagctatgaatactatctctcaatagctgcctagtgcgaaaaaggtcacacaactgcataaaaggggcccttctcatcctaagtaagtcaacacactcaacatcagtggattcataaatgaatctcaggttgttttgtctctcttggtctctttggtgcattgggccataagtgatagacctcctagcatgtagtcggtgcctcaaccatgcatccaaccaggctgacataactgctacaaggaccacagcctttgcaattagccgccgacgtgcaatagtaggatccattgctagagtaataaaatagaaaaggagattagaggtctaagtttggcttagatgtactgtgctagttgctaaaagtaatttcatagaacattgatctatagctcagatgcacactagcatcatagaacattgatctatagctcagaggcacattagcatcatagaacattgatctatagctcagaaaatatatgatcaagcatggtaaatagtaatgtgccagttgcgaatatataaaacagattcttacacgagccacggctgcgacatccaagagatgcgccacccagaggcattaaagcatcatataccattgatcgacagctcagagactaataaacaagtatagatatattcaaaagtaaccatataactcagctcaacacatagaacattgatctatagctgagaaaatatatgattaagcatgctaaatattaatgtgccagttgcaaatatatataaaacagattcttacaaaaaccacggctgcgacatccaagagatgcgccacccagaggtactgcttgtgcccagcaagagtaaccatagaactcagctcaacatagaactcagctcaacatagaactcagcatagaactcacccagaggtactggttggttgctcagagactaataaaaaagtaaccatagaactcagctcaacatcattgatcctaggtactgcttgtgcccagcaagagtatgtagattttgttaataaatatgtcatcttgttaatatacaggtaaccaaacaacatgaaccatctgatttttgcatcccatggatcttgcatcctcatatacaggtaacaaaacggatcactaagggtgacaatccaagtaaattatagattttcttgaagaaatgcgtgttctaaaccagatcagagcaaccagatcagagcaaccaatacgaaactggatccacaaatccagatctgagcaaccaatacgaaaatcatatttgagcaagcacaaaatcgtatctgagcaaccagatccagggggagggcaagaaaaagtgtcaaacctccgtacctttgacagcggagggagagctcgacggagagagggagagctcggcacagacaagtgatggcgacgacaccgatggagatctcgagggagagggagagctcgagggagagagggagagctcggcacagacgagtcacggcgacgacaccgatggagatctcgagggagagggagagggagagagggagatctcgagggagagagggagggcgagtggagatggcgtacccggccgaggcggcgccaaaccctagcacgcgggatccagctcgagggagagagggagggcgagtggagatggcgtacccggccgagacgacggcaaaccctagcacgcgggatccagctcgagggagagctcgggaaaccctagcacgcggcgctgcgcgagcgaatgcgcctgcgagcgagctgccgcgcgtggggagcctggctacggagcgacgcccaaaatggccgtatgagccgggcctggttgagaggtgggttttgcagcaagcgagacaggctccgacccccacacaggtaaccaaacaacatgcaccatctgatttttgcatcccatgggtgttgcatgctcatatacaggtaaccaaacaggtggtatgcaaaccgacatgggtagctgctcgctcaatcggtttctggttgccactctgcaagcagacactgaagttgatatacgtgctggattccgccttcgacttgcttgatacattatgcaaaccgacatgcttgctacttatgggggggtgtgtgtgttatttggggggaccttattaattagtcctgttggcaggtagggtgctgttttagttggcatttatttaggctactgaagttggttggactacatttctgcaggtggggtgggtgttgggaacacgaacaatactgcttagtcatagatacatagcgtacagtaatactgctggagtgtggttttcatgcgtacgagatgctcgaagtaatctcgaagcaaagcagtgcttatatattcatgtatcctattttgtgtgtaggagatagctctttgtggtcagcttggtgaacgcactgcaatgctgtgctgcatcctttttttctgagtaggctattggaagcatcccatccattgcagaccgcacttcttttttttgcaatgctgtttgctgtaggaagtaacagtgaactattgacgctgaacatgctgttaacggtcgaattattttcctttggcagctgtcagtgcggaactgcttcatccggggctcggt

SEQ ID NO: 1099 - DNA, 477 bp, Zea mays
  Intron number 3 from transcript GRMZM2G170842_T01 (locus G RMZM2G170842) derived from phytozome v7.0 (chr-ID 4; pos 1 14694043 to 114694519 reverse strand)
gaggatcgtggccaggttagtgaaaacttcactttggttgttctgttctctttcttcggacactgaactacaataaacaatgggaatcataatttaagtatatactggatgttgtgtaatccacacattcatatttccagaattttttacattctgattttaaatgattctttttgagtgatgagaagagcatgtcctctgttttattaaacatccgataccttccctttgcccaaatttcatatgcatatggaattgccctaatctgtaccacagaaggcagaatacttttggttcttatctgttcaacgatgttcctaatttcttacctttctagtataaattcataacatgacatgttgcatctattcactgatcttagtccatgcaatacgagctgttttgacacattgttttcatatttttcttcgtctttctgcagtgcttctgtggctgctgactgcagcctgcatcaaa

SEQ ID NO: 1100 - DNA, 2330 bp, Zea mays
  Intron number 1 from transcript GRMZM2G072573_T01 (locus G RMZM2G072573) derived from phytozome v7.0 (chr-ID 9; pos 1 27211184 to 127213513 reverse strand)
aactgtcaactgaccatagcacgagtattgaggaggtaataattctgttaaacaaatgctattattgtgttcacttcctaatgacatctgctatcctatacatatttggctttgagttcttcgtctactaatcctgcagaattagcggttcctttgatcagttttctttatttccttaaggaaacagcaaaatgatatacaaacttcttgccttagttaatacagcgatgctaaaatatgtagtttcctaatttgagttgattttgtggcacagaatttgatagagctgattgtaatggagtttaaacctcttcacatatccaaatcattttattgatactgtaaattcatgatattatggttttaaaaggtattgtaagtagttcagctatcaggaaaccagcaaccgaaaattttatttagaaaataatcgtttttatgatttatatgtgcttctgtgatttttggatactattcctttaggttggtcaaaaataattcaaacccacaagctatcttgaactttttgaagtactagtttggcttatcatcaccacatgttagaaatacctcttgcttaaaacttgtgcctgttactacattcaaatcactgtgcccgtttgtcctgaactgcagccagtaatcttactttttttggaacacgcaggagagttgtgtttcacattaatagaataagagagttacaacatacacgcagccaccccacaatcatgaaaaagctataactgtcacttttaagagaaaataataatgacacaacccgacgaacttaaaaccccgagctaggagcagtaaggaaagggagtaccttaactcatgccatggaccaatgctgagattcctccaatcctccccagcaagacaagagactgtaagtaggcttggagaaatgacattgacaaacagtcagtttctgtgtttccacagcaaccagccagatatagtctgcctggcttctttaagttatctagatgattaattgagcttactcactaatttagatatgcagaaactatcaaataagttcttcaaaacaaaaatgcatttgagtaatgtttccgtttgtcgaatataccaaattccatatctaaaataaattttgaaatataataggactgggcctagtgcagtggttagagttgtctctttgagtcactaggtcatgggtttgaagcagcctctccacatttgcggggaagacttgccttggtttatcccttcccttgacccactcatgtgggagtctttgacactgagcctgcattcctttaataggactgctatattattgaacattagtatgccttactagctagtagttacaattgttcagtacatactttacaagaggtccacagatcacaacctagtttatttgcatgtaagctcgtagacgagatgtctaatgctaactttcatttaatgccctgcagttgaatttgtcttggcgacagccaggggtatggccttccccgggactgacaacattattatcatattatcatctagagaacttattgcttgctagtttgacggtagccttatattgtccgatctttagatttgtaagtgttgttttatgtacttcagcccagtgttttacacatgtagatattaattggaagggtgtctaattggctctatttgtaacgttctgatgtaaatgaaatcaggcatacttttgtcttctagaaatgcctttcaatgaatcggttttgtttctgcagctagttatgttttttgagacattgcagcatcttgtggtgctgggagcacacctagatgcctaggcaatatggcgtagctaaaacctcgtggtgtcctgtggcgtctggctctggctcttaggcctagggtacaccgcaacacctaggcagcacctcaaaaaccatataagaggatatatgatttttttcaatgtctttattctttttaagaagggtacgtttggtgcagtggtaagtgagagctgtctcaccgagtcatgagtttgaagcaatctctctgcatttgcgggggaggcttgcctcggtttatccctttcccagaacccactcatgtgggggcatccggcacgggatctacccatcttcttcgtttatttttagaacaaaccctccagttggctcatccagtcacatttgaaatttcattttaacttgctctctcaagtttaattgttaaatctggttagagtgctaccttgaactattacagtagtgactactggctagaatttgtttaaccattcagtttattttgtgatgatgcgcttcaggaagtcttgaggattaaagtagagcatcctg

SEQ ID NO: 1101 - DNA, 1346 bp, Zea mays
  Intron number 1 from transcript GRMZM2G313780_T01 (locus G RMZM2G313780) derived from phytozome v7.0 (chr-ID 4; pos 7 7746860 to 77748205 reverse strand)
gctgcgacgaagccctcgacgagacgaacgcagcggtaccctcggattcggcagacgatgcacggattgagagtaattgctcgccggagttgtcgccggagttggaaccgccccgaacttcggcgggcaataccgggagctaggaattggatttggatgaaccgtttcgtgttctggaacgggctcgacgagatgaagccggacatgtatatatatctaggattctgacgagataaaaattcggttaaaattcggattttaccatttttaaaattcagaaaaagcctagaaatccatattttgtgctcaaaatattatatatgctttcaaaaattctagaaaaaatcctataaatgttttggcacctaatgaactcaaaaaacatagttagaatttctaaaaacatttttaaggtcctcaaataaatagattttggtttccggaaaatagaaaaatattccaaaaaatatgaaaatttaccgagcgcttctataagatatgttaacatgtttcaaacacattttgcacttggaaacaccatgcaacgacatgaatgcaacaaccaaagtgcctttagggctcattccactaggtttacgctattataaaacaaaataattctccatttttaggaaaaagagaaaggaaagcgaagaactgagagagtaacaccagaatttggtggatattagaaaagaaattttatacccccaaattcagggtgttacaaccttccaagaaggttgccaagaaactttttagagatgaagacacaggagatgacgatgttgctggttctggagacgttgatgctgagtagcggtatgtccaattctgccctacaacttcatgagatatatgcttccaagtgttccaattgcatgtaatataaggcagttggtactacgcaaatcaaaagcccaatgatcagtaatagctacttttagctaactaaaacactatgctgcataggaacaacattcaaagcaagctcacaggtcatcagatatctcaaacaagcattctaaagctaacaacaggtccatatgctgttgattgaactaatatatgaataaaagagaaaatggtgtaaccttctaccgatataggtcaaaatagaaattagcaagttttcggaaaagaggtcaataggctaaaacatcagcaagtcaaaaaaatcgatagtcaagtgatttcgaatggattaccttcatagacttcttcagtcgagatctacggaaaaaagtagacattatatttgagattgcaatgtttgccaaaacttgttaattgattgctacccttttttagttgcagtgcttttggacacgagcgccaccagctat

SEQ ID NO: 1102 - DNA, 531 bp, Zea mays
  Intron number 9 from transcript GRMZM2G068862_T01 (locus G RMZM2G068862) derived from phytozome v7.0 (chr-ID 7; pos 1 32161044 to 132161574)
gggattgcaggtaataattaggaatattataactagcaataatcatgaattcatgatcttcttagaagttagaactgtcaatgtattatgtgtagttttggggcaaaagtactgctttgtgttaggaaattgagttgcattcatcatatatcatgtggtaggcctatagtgcctatatttatgtccaaaacgtagacacatagttggagtcattatacaactgtagcagctccaatatacacacatgaagaatctaattattctgcatcatttaggttttccccactgattaaggaattatagtatttggatctttttcttcttcgttgatgagggaactggcccgttagagtgagacctgtctcctaattgtatagcaaattcagtgaaactaatcactatctatgattgtaacagtactttgaaatatcaaggttggattcttatatttctgtttttgcttatgatttcatttactcaatgttgatgtgaacagggcccgactgtaagtcctgtctatcgcagacgtga

SEQ ID NO: 1103 - DNA, 4652 bp, Zea mays
  Intron number 1 from transcript GRMZM2G000700_T01 (locus G RMZM2G000700) derived from phytozome v7.0 (chr-ID 8; pos 7 5892318 to 75896969 reverse strand)
caagttgctcatcgtcgtcaccctcctcctcctccttgccttagttttgtcctcacctacatggctccatctaccattgtgttggtctatgtgggagtttcactgattgggttcggctttcggggttgttgatgcttttgttgtataggctacccatagtgtgatcagtgtaggtgttgtctggctcctgatatagggaattggggggattccatgctgcttggcacggggtgtgcgtgcttggcttggtttcgctcaaatttgtgcctgatcgtttggattcgccccggtcttaaaccctgcacgcgagccactcagatctcggtttgttgactggtcacttggtttgattcgctccgaaaccatgctgggagatgcattgcccatggacaattcttctccactcatctaaaccatttgcaagaggatactcaaggtttggttgatatattattaattctccagacagaataccattcccaatttccagatgcatgtgcgtgttgttccttctcatcgttggtattaaattgatagggattcatgcagcgttctgcagagttttcttaactcgggatggaatgaagaaaacaggaagcttgtgttctagatataccgacatgtctttctcgtttggtcagtgttaagtaataaccaacaaatccatctaaaaaggtgaaggaaataggtgatgcctaagaggagggggagtgaattaggacttctaaaactttctctaaattaggccacaaataaatccctagagcaaaacctatgcaattaatcaaactagaaatgtgcaaactaagttttgtctaagtgttgctatctctaccataatgtataggtttcaatcctaaacaacataagtatataagacaagattgaaacttaaatgcttaatgtaaatgcgaaggctaaagagtaaggtaaagatgcaaactctcgtggatgacgccggtatttttaccgaggtatccggaaccacgcaaggtcccaactaatcttcattggtgcccctacgcaaagggaagcccatgcgagggccaagcaccacaatcgagtaactctgtagagagctgcggaccttctccacgcgcaagtggtgctccgcttctggctcctctcagacgctctccgccatctccactattgagcttccggccaaaaacgtcgtgagcctcgttccctccggtacacgatggtggccatgacacaaacacggttgtcagggtctcacaagagtctcgccccactcggtacaattacaacggctcgtgcaagagccgaggggttgtgtggttttacaaaactcactcaactaactagggttcacctagagcaagcgctaaagcgatctaactaacctaaacacttcgcaaagcacctacactaatcaccgagtgattctattaagcacttgggtgtatgagcacttggaaatgtctagtatatgccttggtatgttgcttgggctcccacaccttgaattttcaaatgtttcaaattttagttgatagctcacaatttaaatttgcaaaagtttcaatttttctagaaaacctttataatcattttgagagctaatcatcttatttttttcaaagttttaagttgagcttttttcttagtgcaaacattctaaataaatttaacgattttcgcaagctcatctatggagagctttccttcaccttcatcatcactactgctatcatcactagaggatggaatactcattttacgtcttgccataaggcacttgagtgatgaccatgatgagagtgatgaggactggtggctgtgcatccttggatgttcatcttcgcttgaagaatcatccaagttttgacaattgttagcgtcttgcctttgctcctcccctttttgggttcgaccatagttggatagctgtctctgaaatggcccttctcccacatgcgaagcatcctctccttctttgctttttcctgtcaatgttaaagagaagatcctcgacctccaggggcacacccattagattgatcttgcgaatcatccccattacctttccgacgcgtcagattgtttctttgcccgcggaagatgatgttgatggttgattatcttcatcatcatcactttcttcttcttcctcttcttcacttgaggaacttggagtgggaaccttctttttcccttttctttcatcacatgaaaaagcatatggtcttaaagaagtgggctcctctccccgacacatttttcgcgacatctcaaaagccatgatttttccaatcacaattgtcagggccattgtactcaagtcctccatgttgtgaagaatagtgatgatgctcctatatctttgttgtggtagtagggacataatatttctcacaatgtccacatcacctagattattaatgccaatagaattgagctcattgataattagattcaaacgagaataaatgtctctaacaagctcattatccttcatagaaaacgaattatactcatttaagactatacaatgtttttgctcacggacattggatgtgctgtcatggagctcatgcaattttagccaaatgtcattagcagttttcaatgtaaatacttgattaaaaatatccatgcaaagagattcatacaagcaatttttggctctagcatttaattgaatttctttttcctcactcgtggtgggtttctcgggattcctgggaggttttatcccgtcatgagtgactctccaaacatttagatcaacgacctctaggtaacaagtcattctagcactataatatgggaagctagtgccgtcgaagtgtggtggcctatgggtatccatcccctttctctaaaaagcgtcggctcttttagcggtgaagctaaagcgtttcaaatgagccaaaccaggctcggataccaattgaaggaaacatgtgatgcctaagagggggtgtgaattaggacttctaaaagtttctcgaaactaggtcacaaataaatcactagagcaaaacctatgcaattaatcaaactagaaatgtgcaaactaggttttgtctaagtgttgctatctctacagcaatgtctaagtttcaatcctaaacaatataagtatataagacaagattgaaacctaaatgcttaatgtaaatgacgtcgatatttttaccgagatatccggaaccacgcaaggtcccgactaatactcgttggtgcccctacgcaaagggaagcccctccgtagagagccgcgggccttctccacgcgcgagtggtgctccgcttgcggctcctctcagacgctccctgtcgtctccgctatcgagcttccgcccgaaaacgtcgcgggcctcgctccctctggtacacggtggcggccttgacacaaacgcgattgtcacggtctcgcaagactctcaccccacacgatacaattacaatagctcacgcaagagccaaggggttgtgtggttttataaaactcactcaactaactaggtttcacctagagcaagcgctaaagcggtcaaactaacctaagcaaaaagcacctacgctaatcaccgagtgattctattaagcacttgggtgtatgagcacttggaaatgtttactatatgccttggtatgttgcttgggctcccacaccttgaaatggtcagttggggtggtatttatagaccccaacacaaaactagctgttggactgacaccacaggtgactgttggcgctgtaggctttccagacgtcacaccagacagtacagtggattctctccaccagtgccacctgaaactagccgttgggttactgtttcctagtgcaccggacagtctggcatgtggcaccggacaatttggtgcccttgcacggacagtccgcctagcaacacttgtcttcgtttcttggacttgcttgatacttgttgatcttcacttgtgatcttcataatgtattcttttgaggtgttgctttcctcaatgccttagtccaagtaactttagcatcttgtgaactacaaacacaaacactagcaaacacattagtccacatgttgtgttgatcatcaaacaccaatacctgttgagccaaatggcccggggtccattttccttacaaaatggatgatttgtcacttagtttcatgcatcacaattttgctgttgatgtttgtatgcatctacttttcattgtctggaattagtttagatgtattcagcattttttagtagtctattgttcttcctattgtcatttgtcatcactgccatcatttacatcagcaacactgaaggtctacccgtgttttttcttgtttggaagaagactatggcgacttgatcttgtcttcttttgtatggctaaccaaattatgtttcaatagtcagctgaagttagtgcttaaactatattttctatttaattcattttgatcatcttcaaatgatgcatactgaaaagtagatggaaactaggaatatcttaatgatatgttgatgaaatggtcttttgctcattgatgtgcttcattttggcttgtaaattaaacaaattattcgcttggatcaaatattggtttatctacatgctctaaattactttttctttattttgcacaggtcacatactgctgttgctccgctcgaacgattga

SEQ ID NO: 1104 - DNA, 28997 bp, Zea mays
  Intron number 1 from transcript GRMZM2G365731_T01 (locus G RMZM2G365731) derived from phytozome v7.0 (chr-ID 1; pos 2 36156841 to 236185837 reverse strand)
tgggaaaccacacccaatccaactcccgatcagtatatgttcttctcaacctcgacgtggtcaatctgagttccattctgtaccttgcggtcgcaattttgacatgaatggggttgaggggccagggcatttttcagccaagaatttaggcaacctacccaaaattcacttcccatcctttgatggagacaatcctcggttatggcaaaagcgctgcgaggattatttcattatgtatgaggtagatcctgctgtttggattcgagtttcatctatgcagttcactggaccggctgcccgttggttgcagtcagtagagtcgagagtatccactatgtcctggggagagtttggtaggttgattttagaacggttcggcaaggaccaacaccagctgttgctccgacaactgattagcatccgacaaacacattctgtggcttcttatgtagatgagttctctcaactagtagacaaattaaatgcctaccaaaccatgtctgaccccttatattacacgttgaaatttgttgacggtcttcgtgacgaagtcaaagttgttgttatgcttcaacgcccatcagacctcgatactgccatggttcttgcacaattgcaggaggaagctggggctatgatgaagagaaccggttccaaatggggtgattctactactgcattcaagcctcggctaggggctacaccagctcaacctgttaaagaacccaagcacatgactgctttgtccacaggcgacaaatccattgggggtactttaccatctacagatgaccgtattgcctcattatatgcctatcgcaaagcaaaagggctctgctacaagtgtggattgcaatataaccgtggtcatcggtgttcagacacagtacaactacaagtagtggaggaattatggcaaatggtacaatgcaccaatactgaagcaattccagaatgcgccgaggtgtctgaagacaatgttgagattaatgtgttgcaattgtcacaagcagctatggatgggtctgaggcccctcgcactatgaaatttgtgggtcacatagcaggcatggatatcttggcactgcttgattctaggagttctcattcctttttgagtatggctgtggcttcttctattcctacaatttctacaatggaccagccaatgaaggttcaggtggcaaatgggtcttacatgagctgtgcaaaacatattgtggatgcttcttggtccattagtggggttacattttcatccacattaagagtattacccttgtccacatatgatcttattgtggggatggactggttggagagtcacagtcccatgctcatacactggtcacaaaaatggctcagtattcctcttcaggacaccacagtaaccttgcatggagttaagtcctcagtgttacagacagcagtgatacaggtctgtagcttacaaggattatctgacaaagagcagactatggttgttgatcttcctactgatatccaagaacttttatctcaattttcttcagtttttgacataccccataccatgccaccagtgagagaatgtgagcatcagattccactcattcaaggagcccgaccagtgcaaatgcgaccctatagatatgctcctgcattgaaaactgagatagagaaacaagtggaagaaatgttacaatcaggcattgtccaacctagccaaagtgaattttcctcatcagttatcttggtgaaaaagaaagatcatacatatcgcttttgtgttgactacagacatttaaatgctttgactctcaacaccaaatatccagtccctgttattgatgaattccttgatgagttacatggggctgcgtggttctctacccttgatttaagggcaggttttcaccaaattcgcatgagtccaaaagatcaacacaagactgcatttcaaactcatcacggccattttgagtttagggtgatgccttttggtctttcaggagcaccagcaacttttcagagtgcaatgaactcaactcttgctcctcttctcaggaaatgtgtgctggtcttttttgacgatatactgatctacagcaaaacctggacagaccacattaatcacttacagcaagttctccaaattcttcagaaggatcaatggtttatcaagatgtctaaatgtgcctttgcccaacagaaaatagactatttgggacatgtcattagtcagcaaggggtggctactgacccatcaaaattgaggcagtgtcttcctggcctacaccttcaaactgtaaagacctcagaggatttcttggacttgcgggttactatagaaagtttgtcaaaaaatttggggtgattgctcgacctctcaatgatctattgaaaaaaggggtattgttcatatggacataagtgcatgaagcttttctcaccctcaaacagggcctcactacagctcctgtactcatgcttccagatttttccaaaccatttgccatagaaacagatgcttctagcaaagggattggggttgttcttctacaaaacagtcatcctttagcatatgtgagcaaggctcttggggttaaaaatcaaggattatcaacatatgagaaggaatatctagccatcctgttagttgtggataaatggcgtcagtacctccaacattcggaatttttgatatattcagatcacagaagtctgtcccatctcactgaacagaggctgagtacaccttggcagcaaagagtgttctctaaacttctgggcttgcaatatagagtggtatacaaaaagggggctgacaatggggcagctgatgccctatctagaagaccacatcctgattcctcactatttcatgttacttcaatagtacctcagtggatggatcaggtattgaatagctatgcagatgacaccttctcacaacaactcattactagtttggctactaccacagataacacaggaccttataccttacaatcaggcattctcaggtataaaggccgtgtttgggtggagacttgtgaagctcttcagattcagattatatccgccttgcacgacagtccagttaggggtcattgaggatttcctgttacatatcgaagaatcaagcaattgtttgcatggaagaacatgaaatctatgatcaagtcatatgtggcagcttgtacaatttgccaacagtctaaacccgatagacacaagtaccccgggttacttcaacccctacccataccagaggctgcttggcaaatcataagtatggatttcattgaagggcttcccagatctgctcacgctgacaccatcctggtggttgtggacttattttctaaatatgcccacttcttgccattgctgcatccctacacagccttgaaagtggctcaactctttatggattcggtatacaagttgcatggcttgcctcagtcgatagtatcagatcgagataaagtcttcactagcaagttttggcaggaactattcaagctgactggaacaacacttcgcatgaacacttcctaccatcctcaaacggatggccaaaccgagcgtgtcaatcaatgcttggaaacctttctacgcagttttgtgcacgcttgtcctagaaaatggtctcattggttgtctctggccgaatattggtataataccagttttcattcatcattggggcggtccccatttgaagtactatatggtcgagccccaaggcatttggtattaacgttgactgatgcagttccttcattagaccttcaggcttggcttgaccagcgggaactcatggttaaactggttcaacaccaccttcaccgagcacaacagaggatgaaattccaagcagataagaagaggacagaccgagagttccaagttggagacatggtttaccttaagctacaaccatatgtccaatcttcagtggccactagagcaaatcacaaactcagcttcaaatactttgggccctttgcaattattcaacgcattggcaaggttgcctacaaattgcagctgccttcttcatccactgttcatccagtttttcatgtgtcccaactcaagcactcagtgggctcccaaaatgttagtttagtgttgcctaacatgtccattcctcttcagataccaaaacaggtgcttgatcgacgtgttattgttcgaggaggcaagtccatacaacaggtcctcgttcactggtcatctacagatgaagcactatcgtcctgggaagatgaagcagctcttcgacatcgatttccagcagcgccagcttggggacaagcggcttctcaaggggaggagaatgtcagagacctaccggcgccagcacaaggtgaagagggcgcaggaggaaaggaaccaagggatggcgttcaaatggtggaccgtcgcattcgtaggcctaatctccgtgtcaagggagcagaatggatagagtaatgggccttaggccatagctatacaggaatataaagcaagcgtgtaatggaaagatagacaggaaatataccagaacagagtcagtctgctcctttgcctatccgtgttcttttcttcctgcctgtcttctgcttcttcctcgccaaggcgataacaacaccgtcgtagtcacggatctttggatgaatggccgggattaaatgggagtgtaccggtttggccaagtaatctgagtcctctatttggaatccagtcacccatattagatcgggtgatcggtcgaggaaaaatcgttaaggagtccctaaaaagtttagtttacttatcaacccgtagtccatagcaatggaaaatcctaacaatctagtccaaacttttataaatttcaccctgaagttattagaaactgaacccaccatcccacagtgtttggtttatatagagccactcgggtgaataattaaaattacaaagaagtccctgttcttcacaaattggtccctggtttttgcaaaaaaactccccaacaagtataattttaactataaaaaccaccaaatcttatttccttcataatttttacgttttaacttcaattttagtggttctagaacctacataatcgtctcgacacatatatttatttttatgcaattgttttatatgtttgctgtaataatgtttttatttattgttttcctatgtgtatgttttgttgagaatagaaaagcgaggttgcgaggaacttgaaggccaactctgggaaacatctagacagctaaaatttattaaatagatgtgtccttgatcatgttttttgaccaaataaataactggtactaggaaggtgcccgtgcagattgataaaacatgagtgactgtggataggaacgaccggagatatgataaaatctagatattgtgtgaattatagcaaattggtaattgatttttgttgaaggatttcatacatcgttgaatgacatcatcaataaaataaagctatttctggctattcagagaacagtaagattggaaacaaggtactccctccgtcctacctaatttataattcatttgattttttattttaatttggatctacttgtcttattcaaaaaaaatcataatggttagaaaattttactgtgatatatatttttaatatggttttgaatttttcatgttttttaaattaaataagacaagttagtcaaatttgataaaaaattaaaacaaattataaattaggacggagggattaaatggaatgtagggcactagggcacaaagcgaggttccatagctaaatggcagtaaaatggatcccacatacgtgcgtccttggcattcgaactaatacgtgtttaatcgatctgccacccacatttctgtcggctcgggtttctctagtcttgtacactgtgatttcagaagagcttccggggcgtagtctttgatgtcgtcgtccttgaccgacgtggacgccatcatatctgcttgaactgacggacctccgacacgtcgcggcctagcaacagcgccaccttggtccagaacacctccacattctcctgtcgctccacgtcggcctcgtctagtgtcgcctcgatgtcctcctgcagcttggggcagaatctggcgcaattgcgcagcagctcgaacagcatgcccagctgcccagagggccgaagccagcatttgagagggacaaatcagatcgtgtgggtgctatttaggaggtattttatattatttatatagggattagctaagaaaattaatagcttctatcaaatttgaggaggattagggtgggatattgcccccctctgccccactagaatcgccctggcccaccgtgctccaccgtgttaaccgtgaccgccaggcgccagcacgccgtagccgtggcgtcggatgctcaggcgccgtcgtcccacagcctggacgcggttattgacacccaacaccagcttccccaccgccaggtactgctgctcatccttggctttcctctcacacgcacagcaggccacgcatctcatctatgcaacggaaccgctccttggcattctatggaacacatgaccacctctcgtaggaaagggtgtagatcaagggcgaagcatctacttctgccgcattgcctgacgacgttggcgagcgacgagcgcgcacacgcaactctctggcagaccggcacgacgataggccacgcggccgcctgctccgccctcgagtgctccacaatctgccacgacgcctaggcgcgtagcaatagcacaaccagagctccagagctgcaggtgcggaggtgccagaggtgatcaacaactttgatctttgaataagtgaatatctaatctatactaatatgctgatcagtgatcattgcctgacacctcagtgagcacagcagtgtctattggagtaatggtaaattccaattttcaacttattttgtatgttaaggtaggtcccttttagactatgttcggttgttccgggatcgacagggattactatccaatccaggtggatcatcccggcgtgtaaagttttctggcccatacttaaaattgtgttcggttagcccacacggtatccttttcccgtctttttgcagccattttcatggagttcggctcgagaactcacctacgccgcagggacgtggaacatttccacacaaagacgagagggagggcgacatatgtggcccatgaggcggaggcgacgacggcgcgctaggctgcagcagtgggggctacctacgcagcaaactacgacctgcccttcgataccttatcctctttgcaacaactgtggatctatgcaaggtacatgcccgattcgatgctgagaaggaagatatagcttctccctcaaccttgtttgtcttcgtctcctccggtggctaatttctatccggtaatcacgccctcctcttcatttccatttaatgtccatgaactagggagttggtgtttttggcttctagggtttgtgattcgtgctaggttcttggcttctagggtttgggagcaaaatctacactgcactgaagtttggaatctctaatttttcgattccataaggctatgttcatggatctattgacgagtctcctaactgtctggtattttcttaggactttgccgaaagccgcactcggcaaagtacggctctcggtaacgagctagtttaccgagtgcaggacactcggcacaggaccacactcggcaaagacttgtttgccgagtgtcaaacactcggcaaagaaggtgctcggcaaagggccgtcagcggccgtcataaagctgacagccgtcaacctgccacgtagcaggcactcggcaaagaactctttgccgagtgtcttctatagacactcggcaaaccatatttttgttttttacattttggccaccaaactttttgtggtatgttactatactatgtagacctacatgtaccattttgggacaaatataacagtgtttgcaatagctagtagatttagttcgtttatttgaatttcttcggaaaattcagatttgaactgcaggtcactcgaaacttggaaaactgtgtatgcaaaaatgatatccatgctacttagcacaggttacgaccgattcaggagcggaccggaaacttcgagcaccatgctcactcaacatggccgtgaacttgccatccaggtgtttaaaaattgtataaaacacaaacaaagtcagaaaatcatgaaacctgtctacgtgtcatgatatcatatgtagagactgtgataaaaattggaaaacgtttcgagaaagctgtgacgcactatgtgtacaaacctaagagatccacattgaaactccatgatttcatgtgtagttctcttaggtttctacacatactgtctcacaactttctcaaaacattcttaattttttatcacaacctctacatatgatatcatgacacgtggacaggtttcatgattttctgactttgtttgtgttttatacaatttttaaacacctggatggcaagttcacggccatgttgagggagcatggtgctcgaagtttccagtccgctcctgaaatcggtcgtaacttgtgctaagtagcatggattgcatgaacggttttccaagtttcgagtgacctgcagttcaaatctgaatttttcgaagaaattcaaataaacgaactaaatctactagctattgcaaacactgttatatttgtcccaaaatggtacatgtaggtctacatagtgtagtaacataccacaaaaagtttggtaagggaaaagaaaaaaatagaaatattctttgccgagtgtctaaagttgacactcggcaaagaccttgtttaccgagtgtctaacgtggagcactcgacaaagatcataaatatatactttgtcgagtgcttgtccgctgaaactcggcaaagagttgtttaccgagtgcctgtgatctggcactcggcaaagactatatttaaattaaaaaaatctttgccgagtgcccgtgatctggcactcggcaaagcttaaaacataacgtataccgagacccttctcttctccttctccttctcactcccactctcactaactccctcgccgccgccgccgctccccgccgtcgcgctcgactcctccccgccgcgcgccaccacgccgccgctcaccaccgtcgcgccaccacgccgtgcaccaccacgccgcgcgccagcacctccccgccgcgcgccaccccgcgaggcacgcccgacgccgcacgccaccaacaccgcgcgccgccggaggccacctcctcgcgcgccgccaccgccgcccggccacgccacgcgtaccatcgtcgcccccacgcgaggtatgaatttgttatgcgtcaatttttatttattattgattagatgatagaatgtataaatcatgtaaattagtgaatgataggatatataaatcatgtaagttaggctatagtctcgttgaaaatttgtgaatgaaatatgtaaatcgtgccgttaaattatgtgtagtatagtctcatggattgaatatatatatgtgtgtgtgattgccgaccatcgtgccgttgaattatgcgtgtatgtcagccatcgtgctgatagttttatttgcaggatttcgaaacctcctcgtgcaggggaggtgctgccaaaattttctgttgctaggcttctgttagaggatggaggaccgtgagtggatgtacacgggccgtagaggaaggaacgatgtcaccactgaatggattagaaagaccgatgatttcgtggaacgggcatatggcgaagctgctaaaggagtgagtctagtcccatgcccgtgcagcaaatgtgccaaccggaaaagaaaaccaaagaaggccatggtagaacatatttggaagaatggatttacgacgggctatactcggtggatatttcatggtgaagtgcatcgtacgagagaggaggtgctgagacaacgtgtcgaggattatgacgcggatgcgggggtaggggatatgttgaatgactataaggaggcacagtacacgggaggatgtatggatgacgagccagagccgactgcaaaggcgttctaagacatgttcgacgcggcacagaagccccttcacggtcagacaaaggtttctcaactggatgccattgggcgtgtaatggcgttcaagtcgcagtacagcatgagtagagacgcattcgatggcttgttgacggttattgggagcctgcttccggatgatcacgttctgccaaagagcatgtacgaggcacagaaactccttcgtgcactcaagatgacgcatgatcagattcatgcttgtccgatgggctgcgtgctatttaggaaagaatacgcggaggaaagtactgtcacaagtgtaaatcgtctaggttcatggaggtagactctggtgatggacagaagaggaagcttgtcggcgtttcgaccccagggggtccctggactgacgagtaaattgtcgctgtgtgtcccagcccaggtgggtctgcgcgagacggaacacaaaggggggaaaacagcaaggggaaaccgcgaccttcgtgttgtcctgcgcccagggcggatgcgcttgtagtagggggttacaagcgttcgcgtgggagagagagagagagagagagagagagagagcgagagccttgtgcgtcgacccattctcccgcgcggccaccttctcatacgagagccctggaccttccttttatagacgtaaggagagggcccaggtgtacaatagggtgtagcagtgtgctaacgcgtctagcagagaggagccagagccctatgtacatgccgttgtggctgtcggagaggttttggcgccctaatcatgtgatgtcgtggccgtcggaggagcgcttgagccctgtggaagtacagctgtcggggctgtcggatccttgctgacgtctccttgcttccgtaagaggctgagagccgccgtcgtcatggagcacacggggtgccatcattacatgttttaccggggcgagccagatgggacgccggtcttgttccccgtagcctgagctagctaggggtaggataatgatggccccacctgtgacgtggtcggttcgagcccaaggtcgggcgaggcggaggctcctccgaggtcgaggctgagtctgggcccgggggtcaggcgaggcggagaccgtcgtccgaggtcgaggctgagtccgagccccgggggtcgggcaagacggagtccgtattccggagtcgaggctgagtccgagcctaggggtcgggcgaggcgaagtccgtcgtccgaggttgaggttgagtccgagccctggggtcgggcgaggcagagtccgtcatccggcgtcgaggttgagtccgagccctagggtcgggcgaggcggagtccgtcgtccgccgtcgaggttgagcccgagctctggggtcgggcgaggcgaagtccgtcgtccggcatcgaggttgagaccgagctctggggtcgggcgaggcggagcttcctatggcgcccgaggctggacttagttgttgtcagcctcactctatcgagtggcacagcagtcggagcaggtcaggcggtgttgttttcctgtcaggtcagtcagtggagcggtgaagtgactgcggtcacttcggccctgtcgactgaggagcgcgcgtcaggataaggtgtcagtcgatccttgcattaaatgctcctgcgatacggtcggttggcgtggcgatctggccaaggttgcttctccatgaagcctgggcctcgggcgagctgaaggtgcgtccgttgcttgaggggaccctcgggtgagacgtgaatcctcctgggtcggctgcctttgcccaaggctgggctcgggcgaggcgagatcgtgtcccttgagcggatggagccttgacctgaatcgcgcccatcaggcctttgcagctttgtgctgatgggggttaccagctgagattaggagtcttgggggtacccctaattatggtccccgacagtagcccccgagcctcgaagggagtgctagtactcgcttggaggcttttgtcgcacttttttgcaaggggaccggcctttctcggttgaatttcgttccggtgggtgcgcgtgagcgcacctgccgggtgtagcccccgaggcctcggaggagtggtttgactccttcgaggtcttagcacgttttgtgatgcttcggccggtctggttgttccctcatgcgaactggtcgttgcccgggtgcatagtcaggttccaagttctcgggctggtatgttgacgttgtcaacggtttggccggagccgggtttgcgagagcagcccccgagcctccgcacagagcgagaggatggtcaaggactgactcggtttttttcatacgcccctgcgtcgccttttcgcaaggaggaggggtgaaagcgccatgttgccctcggggggcgccgaacatggtgtctccggtgagttgctaacgggtgattcgagtggacgcccgtgccccgttcgataagggtcggctagtggcccagaggcgcgctccaaaagtacctgcaggtgatttgccggacccggtccgtttgatagggtccgagggctccatgcctccctctgatgggattccgttgcagaatcgctcctgtgggtctcggaaatgtcctagggtacctcgggagcgtagcccgagcctcagccatgtatcggacgtacccagagtcatccctcgctctgcgtgctctgaggcggctgtcgaacccttcgggggccagcctacgaacccctgatcagtagtgggcgcggagcccgagtggcctgaggcggctgtcgaacccttccgaggggccagccttcgaacccctgaccagtagtgggcgcggagcccaagtgctctgaggcgtctgtcgaacccttccgaggggccagcctttgaacctctgatcagtaggagggctcggggcccgtttccttcgcggagaaggatccctttcggagtatcccctttcctggtccctgtagcaagagagagaaaggggaagaaaagggatatgaaatcgaacgacgtggtgtaccttttttgacgcggtcatcatggcggaggtgaagcgtcgcctgcttcgcctgccaaaggtgccgcctgtcctgccgcagagttaatgcgacgggacgagtggttcgcggggcagccgttgtgcgtgtgcgagccattcgaggaacagaacacggacgcgtcgtcttcatgtcgtgggagagggctctctcgctgtcccaggaggggacgtgagcctgcagacgatttgactgctgcttccgcccgcctgccgccgacattactgccggcccacttttggccatatcgaccgtcgtgccttctctcgcggcggactgacccatgaccgatgtgctcggttggcactgttggtccatgcgcagggttgcctccagtcgcgacatcggttccgcagtcgagaatgcgcggtactggcgcaagtggcggtgcagtttctctcacgtagtaaccggcgcgtcggttacatgacgtgtgggcctgggccccatgctggaggtgtcaaagtcgaaagggtgcgcccccttggtgcggttgcatgccgcctgcatggcggtccgccctttcacccgctggtctgggcgaaagtgggggagtgcgtgtaaccgctgggcagttgtgcgctccgcgcgtggtggtttggctccttctgtcctgggccaacttgcatgacgtgtgggacccagcccccgtgtcgtagggggaggaccttggagcgtgttggtgaagacttagtccgcgacggctgaggacgcaagtggggagagtcgcctttaaaaggagggcgacccccttggatggcaaccatgtcttcgcactctcctcatgcatcgcgccctcccaccttccgagcccccggatggggagcgcccgagtcgctttcgtcttgtcgtcgttggaggaacgcaacttcgcggaagttggtaccttttagccatcgctcggcttcaaggattttcatcaggtggcccggctgcatcccctcgccggtggtcacccaagacggtgaccaccagtttgatggtggggagaagcaagctgggctgcggcctctgccccgccttcagcttcaaggatgttcatcatcagtgctggggagggggagtgcaccgagctggggagggggagtgcgccgatttggggcctgaacatgtgtgtattttggcgtaaagcgtgtttcttcctcatttcgagcactaggactcgcctgtcggctagccgaaccgcttaaccaagtgtgagtcgtctcgtgcggaatgtgacgagtgaggtatccgtatcctggaggcgtaggagtccctcggctcggtcggccttgtcgcccgaggcttctcttgcttagttaaagaaaccctcggccgctctgcgatgagccggagccggaggcagcgggtgtcagcgtggaacagagggcagggttggctccaaaagaagcttctttggccgggagcctggctggggctgtccactggccggaccagcgccggagtcgggttgctgaggccatgagcccgggctgatgtcctcggggggacagctgcctgaggctacggagcggccgggtcgagccgtctgctcgggccgggttcccggatgagaccctaacggcgatggcccaggcgtggtgccgacaggttcctttgaggtggagatcctccgaccgtgttgccgtccgaggccgggtcggattccgccgaaggtggagtcgacgccgagggtgctgctgctcccccactgatgtctgatcctacaagaacagtttatctgtagtgtgcgtatgttttttgcggccatcgaggcccaaacataccgtcgtcgtgctgtaaagctgtgtttctttttccccttgtttcgagtatcgggacttgttcgtcggtaacagaattgtttatccgagcaagagttacttttcacagaaggtgatgagtgaggtatccgtatcctggaggcgtaggagtccctcggctcggtcggccttgccgcttacgtgtactcttactcgtccgttggattctgttatcgatatagtcgagaaggcacgaaaaatcgtttcggcagaaaagttttcgagcattaagacgtgttcggtcagcggaatcgcttatccgagcgtgagttacttatcgcagaaggtgatgagtgaggtatccgtatcccggaggcataggagtccctcggctcggtcggccttgcctgcttacgtgtactccatcgttttcaggatcccactttcgaagtagtcgaaaagcacgaaagacgttctggcagaaagaaattttccgaggaaaattttgacgcagagggggtgcccccttctagcccccgagggagggtcgggctttgccgaggcaaggctgaaccttccttgatggttagactttgtttgcatatgtaaacgaggtgtatgaacgacttgaaaacatcttaagggtagaagtgacgtagctgtcggatgttccaagcgttgctgtagacctcgccttgactgttggccagcttgtatgttccgggcttcaaaattttggcgatggtgaatggcccttcctaggaaggcgtgagcttgtgacgccctcgggcgtcttgtcgtaaccggagcaccaagtcgcccacctggaggtctcgggaccgaacccctcgggcgtggtagcgtcgcagagactgctgataccgcgccgagtgtagtaaggctacgtcccgagcctcttccagctggtccagtgagtcttctcggttggtccagtttcttcggtcgtcgtacgccttcgtcctcggggatccgtattctaagtctgtgggcaagatagcttcggccacatagactagaaaaaacggcgtgaagcccgtggctcggcttggcgtcgttctcagactccagaccactgaggggagttccttcatccatcgcctgccaaacttgttgaggtcattgtagatccgtggcttgagtccttgcataatcatgccgttggcacgctctacctgcccattcgtcatggggtgagctacggcggcccagtccacccggatgtggtgatcctcgcagaagtccaggaactttctgccggtgaactgggtgccattgtcggtgatgatggagatcgggaccccaaagcgatggatgatgttggtgaagaacgccaccgcctgttcggacctgatgctgtttaggggtctgacctcgatccacttggagaatttgtcgatggcgaccagcaggtgcatgtagcccccaggtgccttctgcaagggaccgacgaggtccagaccccacacagcgaacgaccaggtgatgggtattgtttgcagagcctgagcgggcaggtgggtctgctttgcgtagaattgacacccttgacaggtgcgtacaatcctagtggcgttggccaccgcggttggccagtagaaaccttgtcggaaggcgtttccaacaagggctcgaggcgctgcgtgatgaccgcaagcccccaagtgtatttcttgcaatagttcctgaccttcggtgacggatatgcatcgctggaggatgtctgaggggctgcggtggtagagctccttcccgtcacccagcaagacgaacgacttggcgcgccacgccaatcgccgagcttcggttctatcgaggggtagctctcctcggtggagatattgcaggtacggggtctgccagtttcggttaggcgtgaccccattccgctcttcctcgacgcgcagtgcctcacccttgggggccaagggggcctcgggctgagccgagggtgccccggggtgagccgagggtgcctcgggcagggccgagaccttctcgggctcgggcgtgtcgtcggtcttgacagagggttgatgtaggtctcgggagaagatgtccggaggaaccgttgtctgccctgaggctatcttagccagctcgtccgcagtctcattgtatcgtcgagcgatgcggttgagttcgagcctgaagaacttgtcctccaggcgccgaacctcatcacagtaggcttccatctttgggttacggcaatgggagttcttcatgacttggtcgatgacaagctgcgagtcgccatgagcgtcgaggcgtcagacccctagctcgatggagatgcgcaacccgttaaccagagcctcgtactcggccacgttgttggacaccgggaaatggagacgcagcatgtagcggaggtgctttccgaggggtgagatgaagagcaggcccgcgcccgctcctgttttcatcaacgacccgtcgaaaaacatggtccagagttccagttggatcggagctgctggaagctgggtgtcgacccattcagccacaaagtctgctaggacttgggacttgatggccttctgaggggcgaacgagattgtttcgcccatgatctccaccgctcactttgcaatcctacccgaggcctctcggcactggatgatctctcccagggggaaggatgacaccacagtcaccaaatgagactcgaagtagtgtcgcaactttcgccgcgtcagaattaccacgtacagtagcttctggatttgcgggtagcggattttggtctcggacaatacttcactgatgaagtagaccggcctctgggcgggcaatgcatgcccctcttctcgtctctcgaccacgatcgcggcgctgaccacctgagtggtagcggcgacgtagatcaagagggcttctccggcagcgggggcaccaggatgggcgcactggtaaggagcgcctttaggttcccgagggcttcctcggcctcgggggtccaagtgaagcgctcggtcttccttaagaggcggtatagaggtaggcctctttcgccgaggcgcgagatgaaacggctcagggccgcaaggcatcccatgaccctctgtactcctttcaagtccttgatgggccccatgttggtgatggccgcgattttctccgggttggcctcgatgccccgctcggagacgatgaaccccaggagcatgcctcgggggactccgaagacacacttctcgggattgagttttacgcctttcgccttgagacacttgaatgtcgtttcaaggtcggagaggaggacggaggctttcctcgtcttgactacgatgtcatcgacgtaagcctcgaccgttcggccaatgtgttctccgaacacatggttcatgcacctttggtatgtcgcacccgcattcctcaaaccaaatggcatagtaacgtagcagtacatgccaaagggtgtgatgaaagaagtcgcgagctggtcggactctttcatcctaatttggtgataccctgagtaggcatcgaggaaagacagggtttcgcacccagcagtggaatccacgatttgatcgatgcgaggcagagggtagggaactttcggacatgctttgtttagaccaatgtagtctacacacatccgccatttccctcctttctttctcacaagcacagggttggcaagccattcgggatggaatacctctttgatgaaccctgtagccatcagcttgtggatctcctcgcctatggctctgcgcttttcttcgtcgaatcggtgcagaggctgcttcacgggtcgggctccagctcggatatccagcgagtgctcggcaacatccctcggtatgtcaggcatgtccgagggactccacgcaaaaacctcggcgttcgcgcggagaaagtcgacgagcactgcttcctatttggggtcgagctcggagccgatctggatctgcttggaggcgtcgttgctggggtcgagagggacggacttaaccgtctcagctggctcaaagttgccggtgtggcgcttcgcatctggcgcctccttggagaggctctccaggtcggtgatgagggcctcagattcggcgagggcctcggcgtactccatgcactccacgtcgcattcgtacgcgtgtcggtacgtggagccgacggtgatgaccccgttggggcccggcatcttgagcttgaggtaggtgtagttggggacggccatgaacttggcgtaccatggtctccccagtgttgcgtgataggttcctcggaacctgaccacctcgaacgtgagggtttcctttcggaagttggagggagtcccgaagcagacgggcagatcgagttgtccgaggggttggacgcgtttcccggggatgatcccgtgaaagggtgccgcgccagcccggaccgaggacagatcgatctgcaggagcccgagggtctcgatgtagatgatgttgaggctgctgcctccgtccatgaggaccttggtaagcctgatgttgccgatgacgggatcgacaacgagcgggtactttcccgggctcgacacgcggtcggggtggtcaccctggtcgaaggtgatgggcttgtcggaccagtctaggtagactggcgccgccaccttcaccgagcagacctcccggcgctcttgcttgcggtgccgagccgaagcgttcgccacttgcccaccatagatcatgaagcagtcgcggacctcggggaactcctctaccttgtggccctccttcttttcgttgtcgagggctctgccaccttccgccggtggcccagccttgtgggaagtagcgccgaagcatgacgcactcctcaagggtgtgcttgtcgggaccctgatgataggggcacgactccttgagcatcttgtcgaacaggttggcgcctccgggaggctttcgagggttcctgtgctcggcggcggcgacaaggtctgcgtcggcggcgtcgcgtttcgcttgcgacttcttcttgcccttcttcctcacgccgcgctgagcggatgcctcgggagcgtcttccggctggcgcccctgaggctgcttgtcctttcggaagatggcctcgaccgcctcctgaccagaggcgaacttggtggcgatgtccagacctagcttgcttaccaggtcgcggcaagtggtgccggcgaggaacgcgccgatgacatccgagtcggtgatgttgggcagctcagttcgctgcttcgaaaaatcgccggatgtagtcccgcagggactctcccggctgctagcggtagcttcggagatcccaggagttcccagggcacacgtacgtgccctggaagttgccggcgaaggctttgaccaggtcgtcctagttggagatctgcgtaggaggtagatgctccagccaggctcgggcggcgtcggagaggaacagagggaggttgaggatgatgaggttgtcatcgcccgtcccacccagctggcaggccagccggtagtccgcgagccacagttccggctttgactccccgagtacttggtgatggtagtcggggttcggaaccgggtcgggaacggcgcccatcgtatggcccgactgaaagcttgcggaccgggtggttcgggcgaggggctccgatcctccccgctgtcgtagcgtcccccacgcctggggtggtagcctcggcgcatcttctcgtcgaggtgggctcgacggtcgcggcggtggtgctcgttgccgaggcgacccggggccgcaggcactgtgttccgcgtgcgcccggtgtggaccgaggcttcccgcatgaatcgggaagtcgcggcgcgatgctctgggggtacccctgccttcgggaggcagagctcttgccccgtcggaccgcggcatcttccaggagatccttgagctctccctagatacgccgcccctcggtggtggatggttccagcatcgctcagagtagtatcgctactgcagctaggttctggccgaccccaccggaagctgagggcagccttgccctggcatcgtcggcaatgcggtgctggacgtcctgggccagatgacgcacttctccggccggtgctcggcctgcccactcctgcttgatattttgccgaagctgcacaagttgtcctgcttcctcgtcgagcctggcctgcatctcgcggatttgctcgagctgtgcgtcctgaccccccgcggggattgggaccacagctagctcccgaaggatatcaacgtgaggcgcaggcctagggggatcaccatcctccggcataccaagatggttgccttcgtcgagaccccctagattgacgtggaagcattcgcgacttgggccacagtcctcgtcgccgaggctgtggctactatcggagcaatcggagaggcagtagtcacatgcggtcatgaagtcccgcatggcactggggttatcgagcccggagaaatcccaaccatagtcgggctcgtcatctccctcggaacctaggggcccgtaggtcgagacggtcgtcagtcggtcccaggttgaccgcatatgatacctcggagggtttggacatgcctttatgaaagcgtccaccgaagtgtggtcgcttggtgggtcgcggctgaatctaaaaggcatgggatgggaaacggacggtacctcttgatcgacggatggtgatgaggtcgcgtcagggacagactgcaccgttatctcaggtacgaggttaacgcccatcaagtccttcacgagcgtgctgctggcgtccgtctgcttggggttggcgtgttgcggggagacgacgctcgtcttcgtctcagacgcgaggtcaacgcccgacgtgtcccccgctggggcgccagcgccgtcgactcgctcgatagccgacgaggtgccgcctcctgcttggccgtgcctgcctcgcctccttctccgtcggcggggaaggtgacgggacagacctagatgttgctcttccgccacgtggggaagacgtcgtcgattccgccgccggcgggcgggctgacgaccgccattgtcattgtcgcgcggcggaggaaggagtatcatgtcgtagctgccgttgagggacatgaactcaagactcccgaaacggagcaccgtcccgggttggagtggttgttggagactacccatctggagcttgacgggaagctgttcgtcaacacgcagcaggcccctacctggcgcgccaactgtcggcgtttcgaccccggggggtccctggaccgacgagtaaattgtcgctgcgtgtcccagcccagatgggtcgacgcgagatggaacacaaaggggggaaaacagcaaggggaaactgcggccttcgtgttgtcctgcacccagggcggatgcgcttgcagtagggggttacaagcgtttgcgtgggagagagagagagcgagagcattgtgcgtcggcccgttctcccgcgcggccaccttctcatacgagagccctggaccttccttttatagacgtaaggagagggcccaggtgtacattgggggtgtagcagtgtgctaacgcgtctagcagagaggagccagagccctatgtacatgccgtcgtgcctgtcggagaggttttggcgccctaatcatgtgatgtcgtggccgtcggaggagcgcttgagccctgtggaagtacagctgtcggggctgtcggatccttgctgacgtctccttgcttccgtaaggggctgagagtcgccgtcgtcatggagcatgcggggtgccatcattacatgttttaccggggcgagccagatgggacgtcggtcttgttccccgtagcctgagctatctaggggtaggataatgatggccctcccctgtgacgtggtcggtccgagccctaggtcgggcgaggcggaggatcctccgaggtcgaggctgagtccgggcccgagggtcgggtgaggcagagaccgtcgtccgaggtcgaggctgagtccgagccccgggggtcgggagagacggagtccgtattccggagtcgaggctgagtccgagcccaggggtcgggcgaggcgaagtccgtcgtccgaggtcgacgttgagtccgagccctggggtcgggcgaggcggagtccgtcgtccggcatcgaggttgagtccgagccctggggtcgggcgaggcggagtccgtcgtccggcgtcgaggttgagcccgagctctggggtcgggcgaggcgaagtccgtcgtccggcgtcgaggttgagcccgagctctagggttgggcgaggtggagcttcctatagcgcccgaggctggacttagctgctgtcagcctcactctatcgagtggcacagcagtcggagcaggtcaggcggcgctgttttcctgtcaggtcggtcagtggagcggcgaagtgactatggtcacttcggccctatcgattgaggaccgcgcgtcaggataaggtgtcagtcgatccttgcattaaatgctcctgcgatacggtcggttggcgtggtgatctggccaaggttgcttctccgtgaagcctgggcctcgggcgagccgaaggtgcgtccgttgcttgaggggaccctcgagcgagacgtgaatcctcctgggtcggctgcctttgcccgaggctgggctcgggcgaggcgagatcgtgtcccttgagcggacgaagccttgacctgaatcgcgcccatcaggcctttgcagctttgtgctgatgggggttaccaactgagattaggagtcttggggtaccctaattatggtccccgacacagctcgacatccccttgacaatcctacgacaccttccgttcataccgaggatccaacatctgtacatgacagaggaatctacaaaacagatgacatggcaaaaaaatggaaacgatacaatcctaacaagatggtgcacacatccgatggtgaagcatggaaacactttgatgccattcaccgtgagaaagccgaagaggctcgtaatgtacgtgttgcgtttgccacagatgggttcaatccctatggaatgagcgctgcaccatacacatgttggctcgtgtttgttatcccaatcaatctcctcctggtgtgtgctttcaaaggcagaatatattcgtgtcgttgataattcccggacacccggggaataaaatgggcgtgtacatggagcctttgatcgatgaattggtacgtgcctaggaggaagaggtatggacgtatgaccgagctacgaagacaaactttagaatgcatgtttggtacgagtactccatacatgacttaccggcgtatgggctattctgcgcctggtgtgttcacggtaagttcccatgcccattttgcaaggaagctctcaggttcatttggttgaaaaagggtggcaaatattcgtccttcgataaacatcgacaatttctccctgctgaccatccattccgcatagacatcaagaactttacgaaaggtgtcgtagtgacagaccgcccacctgcaacgatgactggtgccgaaattcgtcaacagatagatggcctagtggccaatacagaaggtggttttgtgggatatggtgagcaacatatgtggacacataagtctggcttgactcggctcccctattatgacgacctgctccttccacacaacattgacgtgatgcacactgaaaagaatgttgctgaggcactatgggcaacaattatggacattcctgataagtcaaaggataacgtgaaggcaagagtggatctggcagcgttatgtgatacaccaaacctagagatgacgggcccagccttcaccttcgaccactacgccatcgcccccgatgcagtagaccgggacgaccgggaattcaataacaaggcagagcgagtgaagcaagagctatgggtaagtcttagtataatgtaaaatatgtcgcattcgttgcaaattcttgaaataatgtatggatacatcgtttttgtctgcaggatttcttcagatgcgaggctggatacgaggctagggcggatgtggtggccagcacgagctgcaagaagctcgtcgtggacatgcactatgaggcccgaatccaggccatcgtcacctaccacggctccgtccttggggagacggtgaccaaaactcaagcccgaaccatgtcgttgaccagggaccagtacctgcaggtaaagtcatgcatgtttggtaccagtactccatgcatgaattttattttatcttctgatatgcactttacgtgtttactttgtagatgattccacattggtgcgccgcacatcctctgtgctgggagcagatggtggataggtggtgttcggctgagtgggacgaggcgcacaccgctagccgggaacgacgtttgatgatgcaaggcccctcccaccaccaaggcagccggagcctgggccaatatgccgaagcatgggtacgccaccttttttatttagatatatagcactaagttagatattatttgtaactatctcgttggtttttgttgcagtcggcgtcacatggtggccgaccttgctctaccttctcggcctatgctatggcccataagggtaaggcaacgtccgacgtcacctacaacctggatgacgggcccgaggcctacaccaaccccaccgtctacagccgcctccatgactacactgccatggcgcaggaggtccatggaccatactatgatccgagcaccgagccgatcgaccccgatgtgctcatgagggtcggaggaggcaagagacatgggcggtactggattgccaacgaggcaatagactcatcctccactcccactctgtctcaggtgagagcaaggagcacgggctcgagtccagccatacgacctcggcacgacagctcacagcagcgcatacaacaactcgaggttagtgcttctgtaactcgtccttccttgagttttataccttctatttgagttactataacgttggcttttaatattacagacccaactagaagagatgcaggcgaggataatggtggagcgggcggcgactgatcagaggatggcagatgttccagtacatgcagagccttagcgcggcacagggtttcgctccgccacctccattgttccctgtagttgaccctgctgtgttccatactcctgtgagtatcaaaattgtagttagatgttggtaatgcatctggtataacacatgcaatctcttctctgtgcagggtcaatctggtgccgcatccaacaaccctcgtgaagggttcagcccaacacagcaccagaccaaccgcccacctccatgagttttatgttttcagtgttgaatacttatgtctgtgtgtttaaagacttcaaaacttgtgttagtcacttatgtttgcgttggatacttatgtcacagcttgagacgcatgagacatgtttgtgttggatacttgtgttaaacacttatgtttgtgatgtatatttatgtttgtgttggctatttatgtttgtgatgatatctatgatgtatatatgtgatatatatgtgatatcttttgtttgtgtggatggaatacaaaaaacaaataaaaaggtgcatactggtcactttgccgagtgtaacactcgacaaagaggttctttgccgagtgtcaagaccatagcactcagcaaagaaccaagatctgggcaccggtataggttctttgccgagtgtaatgtgtctgacactcgacaaagagccacgctttgccgagtgtcgtacgcagcactcgacaaagaacctgacatgaggaccctccctagcgggttctttgccgagtgtcccaggtggcactcagcaaagattggttctttgccgagtgtctgctgggcagacactcggcaaaggtaactcctttgccgagtgccatccgggacactcggaaaagacgccgtctccgtcacccgtcgccgtaacggctgcttttctttgtcgagtgctccctggcactcggcaaacctctttgccgagtgaccgagaaaaagtactcggcaaagcctttgccgagtgtttttaaggctttgccgagtgcttcgggcactcggcaaagcgctcgtttccggtagtgccttttaataacttgtctttaacatgtggtggtatcaaagactagacaagcctatcactacttgctagcacccacaaggccacaacccatccatgcaacaaacaataaccaaagacaagatagtataagcatcacacttctacctatactcactacttctagtgtacaaatagaccaactagagcacctaataaaaggcgataatcatacacaagcgtgtgtcctagatgatcaatctactatataacaattatatgctaatattaaccgtaatagaactataactagtataacgttgcataaagtaaataataattaaagtaagtattaactaaaggaaacaaacagtaatatattaaataaattgaagcattaaaaaggaaaaggtaaaatagttatggtagatcagaagaccaacttcgaaaacttggcaaagctcagtctaattataactcccacaatatactatcctattaaaaattaagttgaactaaactagagagctttcgttgcttcttccattcttccatgaatgggaagaggggtgtacgcctctatttacacttctccaagtggatctatggatccatgggatctaccttgtaagccatagaatcaaaccatcatagatttgaatgctaggatgcacccaagtcaagctttcatgcatgcctctatgcttgaggtggtggagtgtggggccaaggtggttttcgactgacctagggggttggtcgatctccctctctgggctataggccctccactaccatgtggggctagtaaggatgttccttgttgggtatatgatgatgtgagtccactttgatgtcgtctaccttacatgtgggccattaaatccataggtgttcatctttcaacattgagagaaagtataagattgtaatggaaacattcttgtgtgttggtctttgtgaaaaactagaaaataatattttttgattttttattaaatttctaataagtagcttataaatcacttggttcctaaaagagtggaacaagttggcgaaggaatatgacctaagcaggatgaaagtgatggtgttaaagatgttttaatggctaaccaactggtcataatggtttaaccgaggttttggttaaagctttttatgtttctactacattggtggttgtgaaggagtcttcttttgtggtatgaacttttggcttttaggtgcttttcgagattgtttgtagaggttcagtgttgttttggctttgttactttgtaagctactaacctcagctatatctctattaagcttttaatagaagctaggcaagaagaatttagtcaaaacaacttttacgcctaacttcataacttattttgtaatatattttctatatatggtatgtaatataagataacctatgatatctaccatatcaatactagcatatagctcgtgctaaaactatgatcccggagaggggagagaggggtcgatggcggtggcagcggggagggagaggggaagagatgatgaatgattcaaataatattgttcattagatttgaatgagtaagggaggagctatgcagcgatctgaaccgttgattttgatggttaaatctaggtgcaatttgtttagatgttatgggtgtgtgtgagtgatttggttaggtgcgttttacaatgtttaaattggtggattatatagtgttatagattatatatttgagatagttaattaatatataccttcaatatttgaggtagttaattaatatacacctttatttgtagtgatggttatagatttctatattttttttacttctataggaaatttaacatttcttattctagctaataaaaactaaatataatagctcattatgtgttattgcttgatggtatacagctcatacaaatagcatcatatttattaggtagctcatattagacgacatatgaatccacgtaatcctccattcacatcttccttttcttcctccctctttcacctttcctctctttttaaaacaaatctagggtttgtacacaacgttaaaatctcaaaggccaaaagtttaagaacaaggagcaaatccattct

SEQ ID NO: 1105 - DNA, 5641 bp, Zea mays
  Intron number 11 from transcript GRMZM2G131443_T03 (locus GRMZM2G131443) derived from phytozome v7.0 (chr-ID 2; pos 230290914 to 230296554 reverse strand)
acaacagaaagttgtattacaataaaggcgaaaaggtgactagtcaatttctgtggtatcatattttcactttaataaatttgttaatgactggcagtgttatcaagttgtcccattaatcatgattagtcgttgtagtcagtatcctagacttgattagggactatgactcgattaggccgattagtttcctggtcgactaggtggtggacggccagaaacagaatggaattgcggggcagctgaagacatgggctgcatatgtgatggccagtgttttcttagacggaaaacggtagacggacggtgaggagctgtctaaggtttagacgtgtttagacgtgtttagacggaattaaacggcctaaacggtatgttactgtagcatagtttcagcaggataaaaaagattttttcctaaccttttttgaagcaaacatgaagcttttgttgtccttgtcccaatttgagatatgtacctgaaaaagaagcgagatttgttagtatgtgcccatgtgatatgtataagggtccatttgatagttgatacactgaacaaggacaactttcagcacaaatggtaggttgatagacacaatagagaacaaacactttcacaaagcacaaatagaaatagttctcacaaatgccaaacaaagcataaaagcaatagtccataagttcattttcaacatagacaaatagataagataattagatagtgctaatataagatagatgatggcagctaaagcctcccatcagccatcattgtcttcctccgcatctagctcatagtcatatccagctgtgatcacatcatcttgatccgactcaaagtcaacatcttcctcttgtggtgcttcttcttcactttcagtttcagacaacggtgtgtcttcaacctctctttcaacagtcaatcttgcactcctacgtagttttgtgacctcttcagcaccacatgtctcagcaatcaatttccatgtgagaccggtcaccggctcaacatcagacccttcttcatccttctcagcaccatcaaccatccatccttgagcaaaagttgcatcggttgctacaagaggatctgcctttttattcttttgggctctaattcttctctttgcatgaatatggttgaatctaacatacacaagcttgtcaactctgtcacatgtgagtctattccttttctttgtatggatctacaaggtatcaagtaaatttgcaagcaattagtatggcagaaacttgacatatgctgaaatgaacaagtaaaaagaaaggcttagttacgtaccccttcaaaacagctccaactcctttcacaacctgaagcacttgatgtcaaagagagaattctaacagcaaacttttgaagtaatggaacttgtgttccataatttgcccaccacttagctatataacaaaaatattaagatttcttgatcatataatttatacaacagccaactaccaaatctgattcaaatacaaataacaaaatacctggattgaattcaggatccttgcagccaaacaaagctacttttttcccaaaatgtccaagtttgtccttaaacttgtgaaagtcattattgatcacttcattttgcttctgaaaatcaccatggtagaatgtttcaatagctgcataaaacccatctaccacatcctcattgtcaaagattgagggactattgtagctataataagggtttaaacaatatgcagccatgtgaataggacaatccaatcttttcttcatttttccctccacaacttccataaggttcttgtacaaaccagtccctgtcttgtctaagtttcctacagccactctaatttcttccttggctttaagaatttcaccatacacccaaggcattgatggtttaatgtctccatcaacaaggcgaagaactttaactaatggctcaaatactctcaaacaaagagaaacaccattccaaaaggttggcttcaccaatgtggctgtggctgttacacctttagcacttttcttcacatgactaattttacaccattcctcactttgggacatcatccttagctgctctttcttctcatacaagctttgtaaagtgagaaaagcggaggcaaatcttgtcacacctggcctaataatatctcttttctttgtgaacttcctcattagagacaaagtgctgtggtgtgcataaataaatatggtcaatccttttgctgaatcaattacattcttgaaccttttcatctttccaattccttcaagcattaggttaattgtatgggttgcacaggaagtccaaaataggttgggtctcttgacataaagcaaatcctttgctgccatattatttgatgcattatctgtgaccacttgcacaagatggtccttaccagcatccaatttctcaataaagttatccacaaactgaaaaatcatttcccccgtgtgtaactcagctgaaacctcttttgactcaagaaaatatgtaccgatggcagaattgatacatatgttcattatgctcctcctcttttggtctgtccaagcatcagtcataagagagcaaccggtttttttccattcttgtgcatgatctttaatcatcttctttgtatcctccacttcctcatgcaacagtttctcccgcagctcatgttgataaggtttctttgcacctggaccgaagcggccagcagcttccaacacttggtcaaactcatcacagtttatggcattgaaaggtattcctgaaaataaagtacagtagcagcttagccccttcaaaagttagaaagcaagataaagaatgcaagataacacgtaaaaagataacaaatcatttaccttgcacatacatccacctagcaacatatctcttcaatatatgcaacctttctttcattacatgttcagaaatcttttgttggcgaaggtttttttgtgtggaacccaaagaattggagtcaagagacattgtgaacttgtccataggacccattgtccttggttgagagctgccaatgtcatcaaggcccgtgtcatcattaacatccatctcatctgcaactgcatcaataacctcttgtttttctgttagcctagctattttaactttcctagaatcatcaagagctttactgcacttgtctctatcctcttgagttgcattggggcatgctcggacttgcccttttctaccagcaatatgcagcttaagcctataaatcccagccttgacaaccataggacataacttgcattttatgacattccaatcatttggattgacaatagttccatactcccaccctatgtcatcgctattccgcttaagtggttgcttgtccactgctggttgagctgatggattggaagccgccgatgacatcctacatgttgcaatgcagaatgcacaatcaatcatttgcatgaagtacactgtctgacccatgaactaacatttaacgacaagaaatagagagccatgaagattgaagcatgaactactatgcataatcaggagcaaacagcaaactataaaatagaggaagcaagaggcatccatacctggcaacaaacaaaggatggggagtccctgcttcagcttcctgctagcgcgccccctctatccctgggcgtgcgtgcctctcttccactgcagaaccactgctgagatgagaggagattgagaggagaggagaaggaggagccctgggcgagcagaggagaggagggaggagccctacctgggcggctgggtgagcagaggagaggagggaggagccctacctgggcggctgggtgagcagaggagaggatggaggaggcagcgccggcggctgggcgcgcagaggagaggaagcagcgccggcggctgggcgcgcgcagaggagaggaagtccctggcggtggctgggcgcgcagaggagaggaaccctagctttggcgcgaaaaaggcccgccagaggcctggtttcagtttccccgcgtaaaataacaccatactctaaacgggccttaaaacggcctgaacgccgtccaaaaccgtctacaagccgtcccgttcagcccgttcaggccgtttagacgccgagttgaccgtttagacggttgacccgtttaggaaaccgcccaggccctaaactggacggtggggtgccgttcaccgtttagaccggtctaaacggccgtttaataccatttaggataacactggtgatggcttaggctacttcggctcatgtttctcagcctaatttgcaaccgtacatgcagctaccatctctagaattatcttcaattcttcatgcttgatttgtactctagaacatatagtatattagtatatatttggtatgttagtcctggtatatacgaggatgactaggggacaactaggaccgaccagggacgactagttgccctgtcctatgagtaattgtgactagtcgcctggttggtcccatggcgattaggatcgactagatggcttgctaacattgatgattgatagttctattcttgatgatttatggcattgcctcgttagtgttgtttattccagttccagcttaggagatgttatgctccatttggatgtcgatattgaaaggcatggaattgaattgggttcaataccaaatcagccatggtattgaaataagatgtaattccaaatctcaattccatgtgcaaccaaacaatagaattctggaaagctgattccaattcctaattccgtgatccaattcctacatccaaacggggttataggtcttcaagcattccattcagaaactactttaattttgttaaagactgacaatgtcttccatttagtccaggaataaatattcggtttgaatagataaatgattatgtaggtaatattagttgtataagctaatcttctgaacttcaggatatctcttaggtattccttacttttttaagtagttctgggtaagccagtttggttgtgtaattgtcatctgtgttcggtttagggttgaatcagtctgcttctaggtgcagatggcctgacatgtatgctggttgcaagagagcagggtccctgtaattttggttgaacatgcagcccgttggtgtatattgacagttctgctactagctaacccaaacctaaccagcataaacagtctggtctggtttagtctgggtgggttggtttagcttaacctgtgaacatcccttgttactgctgtaactgctaacaccagcttgttgaaaatgtaatgcatctgaataggcaggcttctctggattagttaaatgttaaacagtaaacacattaattaatttattgaatacaaactttgttcttctgatcttgtggaaaatattttttgttagaagtaattagatcctacgggcttgtacttaattactttctgcagtgtcctttccccttgaaggctgcatcttctaattgtgttattttcagattcttcctgatcaacttctggttaaatattttgctcatgtcattaatgttctttaaaaatcaatatacacttgactttgtgcaatgtttttagtgctatttctcaaacctaaaagtattttacaggaaatattggaaaataacaggcgtgaaataacaag

SEQ ID NO: 1106 - DNA, 3162 bp, Zea mays
  Intron number 4 from transcript GRMZM2G011141_T01 (locus G RMZM2G011141) derived from phytozome v7.0 (chr-ID 10; pos 22750713 to 22753874)
gctggcatcatccacttgtattgcatttgggccaggtactgcactgaggagtatagtttactttgaacaacataagttgagaaaaatcattacatttagagcaaacagtatattttacacattattggcatgctgccacactactatgtcttgtaaggctatctccagcagcttgccatccgcatatccatattcgaacttcaatctataaacagtgcaaaaacagtgttttagatggtcatatgagtgcacggtctaatgactgctcactggttcacctgctggtatttgcattcacacttttcgttttgtagagggtattagtcatattaaaaattaaaagaatggcaaaagataattatgttgtatttatgcttaatgataactggcgtcgaaaaaatttcattcattgcctcaaagaccaaaatggctcgacaacaacacatgaatgcaaggccgcgaaaatacaatctcactttgaaaatatgttgagtcgtccacccgctccgagaatagacttcaactgggcgacgcttggattacgacaccatgatctctcttctttagttactccattctcagaggaggagatcaaaagagccattgatctgttgcccattgacaaggcgccgggacctgatggtttcactgggttattttttaagacgtgctggagcataataaaaggggatgtcataagggcggccaacgctttccatgctctacgttgtggcagcttatcactcatcaacaccgctaatgtaatcctaatcccaaaaaaagaaggggccgaagaagtgggtgattttagaccgataagcttaatacattccttcataaagcttatttccaagatactggcattacgacttcagccccatatgaacgcgatcgtctccacttgtcaaagcgccttcatcaagaacaggagcatacatgataacttcttggcagtgcgtactgcggcacgtcgttttcatacaaacaagaccccaacactcttgttcaaattggacatagcaaaagcctttgattcgatatgttgggagtatatcctcaccctccttgagcacctaggcttccctataaggtggcgggaatggattgcggcaattctctccacctcaacctcaagagtcatccttaacggcgtaccaaacccccctatctggcacgggcgaggcctaaggcaaggcgaccccctatctcctcttctttttgtcattgcaatagatcccctgcaaagactcctcgaagtagcaactgaattcggaatgctcaccaagctccgtggtcgctcgtccgacctgcgcatatcgatgtttgcggatgatgcggtcatatttgtcacgcccacaaaaggtgaggtatctatgctcgcaaggattctggaactttttggtgaaaccacaggcctaaaaacaaatttccacaagtccacagtagtgccaatccagtgtaacaacatcaacctctctgacgttctatctggtctaccggcctcgaggacttccttccccctcaaataccttggactacctttgtccatgaacagactcaaacgggtggacttccagccatggattgacaaagtctctgcaaagctgagtacatggagcgggaaaaacctttcggcggctggccgcctcacactagtcaatgcagtgctaacctcgcaggtcacctatctgctcctagccctaaaaccgccccaaagggtgttggatttcattgactcaaaacgtaagcaatttctttgggctggttcagagagattaaccggcggtaaatgcaaagtcaactgggtctgtgcagcaagaccaaaacaatacggtggtttaggcattctgcaccttggttttttctcgcgggccttacgcctcagatggttgtggcaggaggccaaactgttaaatactcagaggatggcgaaagatataccttgcaatatgttggacaggagactgtttgcagcagcaacctcagtcagggtgggggatggtaagtcttctttgttctgggaaagtgcctggcctaaggggtacgacacctagagacaccttccctttgacctactccatttctaacggcaaaaatagatccatccatgaggctctctcaaacaaccgatggattcaggacctacattttaatcacaatgatttttctgccgcgcacatacatgaatattgtcaattatggtgcgaggtaaatcagcttcgcttaatgcacaatacccccgaccttatcaagtggaagtttactatgagtggccagtacacaactcagtcagcctaccaagcgcaattttatggctccacatgcaggaattttaatagtataatttggagagcttgggcgccaccaaagtgcaaattcttcagttggcttgctgttcaaaatagagtttggacaacagacaggttggcaagaaggggatggcctcataatccgcgttgtgtcctatgcgcctcatgcccagaatctggactacatctttttgctgaatgttgcttcaccagacatatttgggctgatttgagtatttgggctgcaattacggagatccaccattcttcttggcaacctgtagattcggtgcaccaatggtggtcgaatcttgcaacatccgcagtgagaagcgtgaagggattgcgaaccctcatcatcctcgtgtcttggacaatttggtgtgagagaaactcgcgaatctttgagcacaaagagaagaccgtgacacagactatagcgatgattaaggagcaaattcgcctgtggattctaggaggagcaaaacacttagcaaggctggtgtaggttttggggaaggagaggggttggttttggaacatttgtgtcaccatacttaatgtctccttccctagtgtgatgtacttgtatattttagccctcgctggctctcaccttctttttaatataacaggcaattctcttgccagttttcaaaaaaaaaaaaactgacgttttaagatggctttattgagttttctatcactagaacacattcttccgaattatccctaagcctagatcattactataatctatcatctctggaaagtttctctgttgtctgaaaattctctttgattgcttcgtttgatatatttacatttccactgtcactattcagctgcttgc

SEQ ID NO: 1107 - DNA, 13475 bp, Zea mays
  Intron number 1 from transcript GRMZM2G143525_T03 (locus G RMZM2G143525) derived from phytozome v7.0 (chr-ID 6; pos 1 21763646 to 121777120 reverse strand)
cacagtgagattgcttccctccttgctatggtggtcgcttttggttgtgttgaaaacggagtggtttcctatcatatatcttggagtctattagtgtggtgcggataaattttactgttgaggtttagatgcttaatgttaacaattagagctacgatggatagaagttgattctgggagaagacttgctattagtgggatatttgttccaaagaagcatttgtgtttagttccaagtattttttaattaacaatagcactaaataacagaatgtgaggaaattctgttttaaacaaacgaagtgtaactgaaccagcattggtggagttacaccccagttttgcttaagttggtaattacaatatgtcgagcagcatgtaggaatgctggaattaggtgttgctctagttttaatcagattcgcgtaggatgctagccagggaattccttgtcaatttgagttgctattataacatgttttttcgtatgatatagtactaatagttacatggagtgctgacactgctaaatggttttttatttaagaatggtagtaaatcacaatccaacattcagatgagtgaattcctatatacagtatacactgtaggattcttgtaccatatgaattcaccaagaaagaataatttgcttgctgtttaaatgtccacaaaactaaaagtagaagctcctgagacgcttcatatgaattgctaacaagtcagatagatttgttactctttgttttgcgagcccaacttatcgagtaacatttagattatctttgggcaacattgaacgaccttggtgaaaataagaatgttttgcaggttaatcttcattttttctaggaaaatagctaggtaaaatctcctctcaaactgtgtgacattgacatgccaggacaaaaatccaggtgagaagaatgagctgtctgcacacctctctaccagatcatagcccctctcccttcagcaattgtgtcccttagaggatacgatctccatagaccacctcaaagacatccatcttatcctccacataggccagccaattctggctgcattgtctacatcgcagctatcatcgctggctcgctgctatactatcgaaagctatgtagttggttgtcaatgaacgatatatgcttcagtaaataattcaatacttcaactaatcatgctagaacaaaagaagacaatagatgaatagaataaaagatccttttcctattctataagtacaatgggtcaccctgcatcctccgctcggactccgatacaattgcgactggggccgcgcagtcattcggggcaggtggatgctattctcccgtttgttcaggttgttgatctggtggcgcccatgtctccggatcttgtggaggtgggatcagttgatgccccggctctcccggttgcttcggttgaggagctggaggcgcctggtcacccacccaatttggcattgggtctggcagtggatttgggtgagaacttccagtgtggcggctcgttgacaggcgatttatctcctgctaagctaagttctgaggatctcatagaagtggttcaggagaatgctatggaggaggttatctcagcagggcagcatggttccggaatctctcatttggtggctggtggtatttctgatatatgctctgtcagggtgaggaaacattgtccctgtcagtcctcgggggtagacagatggaaagctaagccgcctgttttcaaagtttattccagaagatggttgaccccggttcagcttgtccaggaagaccttatgttgcaatctgtggttgaaatggatccacctttgcaagagttcaagtctgggtctctaaaccacctgatggcctgttaccacccctcccccccggagtaccaaaagaaggaaaaagacaatgccgagtaattttcaaccaaggagaagtaggagagtggccagattccctccggagttgggttccaattcggctgctcatgtgtgcagacatctgggattttgtgatgataatgagaatatttcattcaaggatgccagcaattatgcaaaattatttgatactgggctttcgagtgagcatatcgctgctttggcgtctttgtttggttgggaggtgcctcaggttggacatgcttagttggtggtctgtaaggcagtgatggtagtggtagtttttttttgtttttttcatggagaatagctgttttcttatctggaatttgaggggtctcaatgatcgtgccaagagggactgggttaaaactctggttctggatatcaagccttccattgtttgtctccaggagaccaaattatgttccatctctgattttgatattctgtctattcttgggactggattcagtaattttgtttatagctccgctcaggggactagaggaggggtgttaattgtttggcgtgatgggtcttttgtctctgtggattcgattgtgaagaacttctctgtctcagtccagtttcaggaggagtctggttcttgctggtggttcacaggtgtgtacggacctcatcaggatagccttaagcaagcttttctccatgaattaagatcggtcagggaggagtgtgcggggccatggttattatgtggtgattttaacctgattttcaaataagaggataagaataattccaacataaacaggacaatgttgggtaacttcagaggtcttgttaattccttggagctaaaggagattcctttgattggtagaaggttcacttggtcgaatcagagggatgtgcctacccttgtgaaattggatcatgttttctgcactacagttgggaagattattttcctgattgttctcttcacagtaatgctacctcagtttcggatcactgtcccttaactcttaaagtcagagaggtgtgcttgggtaagagacagtttcattttgggagtttttggcctaagatccctggttttttggaggtggtggctgcattgtggaatcagctattacaggattcttgcactatggagaagatatcattgaaattaaaaatatgagctaagtctctgcaatcctgggggcataaagaagtgggcaatgtgaatgtccagttgggtcttgctcgtgaggcaatgcatagagtggaaatggcgcgagataacagaattttgtccagggaggaaatttggttatttttttttgacaatgggataccccctatttcattaagaaatagaaaccaaacatagttcttacaggaatcacgacaaaccaacagacacaagccgataagcctaccacaatatcagctacacaaaacattaaacccagcagaagtaatacggtcaaccaacaaaagaccgacagtctaacagataacactgaatatctacaaaggatatgccccaaaagcagccgggaacatcacatcaccaggaatgacaagaacactagtttttctctaccaaaagcagacacgctgtatacatccagaagcaaaagatgcatgagcagcagcaaaatgtcactggagacgcctgtcaaccggcttccaaccatgggccttgctgtagatatcacttgttatctttcgaattctgcggcttccttgttccaccagtctttttcccttctttgtctgtcgaatagaccaagcatcaatccaataacagcaggagaaaatcacattagatggatcatcaatcagtctagcattgaagcagcaatcattacgagtacgccaaatagcccaaataacagcaccacatccaaaaagaatcagcttcttttcaggattatgaaaactgtcaatccagggaccaaagaggtcagctgagttttttggggtagaagacaatttgaaagcaatttggatgattctccaaatgaatctggccacaggacaatgaaaaaataggtgatctatggattctaataatccacaaaagttacaggccgtattcccatgccagtgcctttttaccaaattgtctttggtcaaaatcttattatttctgaccaaccataagaacactttaattttttgcggaagtctggttttccacataaaattcacaggaaccacaattctggaattatttaacattttgtaaaaagattttaccgaataacctttgcaacccaacaaccaatttgaagaatcagcatttccagaaagcgaggcctggctacactgatccataaggtcactataggcctcacctaaagcaccaataagtcttcttctgaaagtcagcaactgaaaattagaggagacaaccttatgaacagtgatatctttgtcataagccacctcaaacaaattagggtatttgtcagccagcgtcatattgccacaccaaatatttttccaaaaactggaactcttaccatcaccaatctttattttacagtatttataatatttgtctcgaaccgagagaatacctttccagaaatgagaatctgaaggtctatccttcaccgaaataataggtttattcttaatgtatttgctttttataatggattgccacaaaccactagtattttctagtctccaaatccatttagccaacaaagcttcattcattttttgcaaatccaaaacaccaagaccgcccatatttttaggggagcagactaagttccaagcagccaaatgaaattttttctgatcatgccctccctgccataataatcttttcctgaagatatccattttttttaacacagctttggggcatttataaagagagagcatatacaagggaacgttggtgagactgctgttaagcaagactaaccggccacccaaactaaggaaccgaccttgccaggagcccaatttattctcaacctttccaacaatgggatcccacaaagatttgcacaattttttgttatcaataggaacccctaagtatttcataggaagaccactgggaggacaagtgaagatatcagcatatagatgttctctattgcaggcatttcccaggcaaataatttcacttttatgaaaattaatttttaagccagaaatctgttcaaagatgcaaagaataaacttcaaatttctagcattttccaaatcatcctgaaacagaaaaatggtgtcatctgcatattgaagacaacagcagccaccagtgacaatatgaggaataaggcctttgataacaccttcatccttggctttttggatcagacaagcaagaccatcagcagccacattaaaaaggagaggggagaaaggatcaccttggcgaacacctttatgagttttaaagtagggcccaaccacatcattagttcggatagcaactttgccacctttcacagtcttcaaaacccaatcactccataaatctccaaaccctttttttatcatcattttatgaagaaaattccaattaaccttgtcataggctttttcaaaatcgactttgaaaataaccccattctgtttcttccgtttaacttcatgaataatctcatgcaaagaaagaacaccatccataatatatcttccttttataaacccatattgaaggtcactaatcacagaagtaatgcaacgagccaatctgttagtaagaactttggtaatgattttgtagcaaacattaagcaagcaaattgggcgaaaagctttaatatcagtcgcatcagggaccttaggaataagagtgacaataccaaaattaagtctttcaatgttgagagagccatcatgaaaatctttaaagagattgaacagatcactttttatcacatcccaaaattcctgaaaaaattcagaagggaagccatcggggcccggagcactattgtgtttcaaagcaaacaccacatccttgatctcttccaaagaaaaggggttggtgagcagaatttttcagagaaatattcgaatcacgggaaggaccaaagagatttttgtaaaaggaagtcgccagctgattaatgccatggtcatcatgagccacaatatcaccgtgagaaagagtcgagattttcaacttcctttttttgtgtctagccatcaaatgaaaatacttggaattcacatcaccctctaataagaatttatccctagctttggcttctttgcaaaggacaattgcacgtctgaggtcacgtattcaatttttaaaagaaggtgatgccaatactcaattcttccaccgacatgcttgttaccgtaagaagcggaagtttatttcaaaactagaggatgatggaagggtgattacaaatcatgatgacatacaagaagttctggatggtttcttttccaaccttctgggcgctgattttcagaggcgtgttactattgatctatcaagctgtcatagggatgcggtggatcttagtgcgctagataatcctttcctggagaaagaggtaagagatactgttgcaggcctcccttctgataaagctcttggggttgatgggtttacggggaggttttacaagacatgttggaacattattaaggaggatctgctggctgccctgaattctttgcatcaaggaaatgctcataaacttgggttgctgaattcggactatcttatccttctccctaagaggttggatgttatgtcggcaagcgattataggcctattagtcttatccacagttttgctaagttggtcaccaagcttcttgccaacaggttgggccctcgtcttcatgagttggaaggaagaatgtaaacgatggaagctgtcttgttccatgggagatagttacaaggcctctaaaatttggcgggcttggagtttctaatttacaattcaaaagttgggctttacaggctaaatggttatggctgcaaaaaattgatccgtccagaccttggcatgggatgagtcttcctatacaacaacatgtcagacagttctttaatctgtcggttttttctgtggtcggaaatgggaccaatactctattttggttagataaatggttgaatgagaatgctatcaatgatattgcgccagccgttgtctatatggttgatcgtagagtcatctctaccaggactgttgctcaggctcttgataactggcagtgggttagtgatattgggagtcatctttcgctgtttggtatgcaatagtatttaaagttatgggatgttcttggggaggtaacgctttcacaggaggcggacagacatgtatggatgcacactgcttctggacaattctcatctaagtcttgctacatggctttcttcatggggtccatctcctttgagccatggaaaagattgtggaagacttgggctcccccaaaatgcaagtttttcctttggttagcaataaggaataagtgtcgtaccgctgacaggctacaaaggagaggaatgcagtacccggtgtgttgtcccctatgtgatcaagagcaagaaacatcctagcatatcctctacacctgcagttttgctagacaattttggcatcacattttgtcgtccatagggctaggtgatctcactccggttgatgacgaacaatcctttgctgtgtggtggggaaaggctcttaaaaaagtgtacaggtgcaagaggaagggtttcaatagtgtcataattcttggggcttggtgcatatggcttactcataataaggctgtttttgatggagtgaacccttccattagctcggttaaaaggttgtttttagatgagttgagcagttgggataaggcgggaagcatatagacaatctgggacttattgtcgccttaaatagggtctagtcgggcctgtcagccctctcctttgctttgtttcgccttattgggtgttggagaggaggcatgagtgttaggtcttggtgatcgggtccagtgtttttgtttttttctgccctatagggcgttgtatttcggtccactttggacctttcctctcttaatataatgatgcgcagctctcctgcgcgttcgagaaaaagtgtgtcaaatttttacaatattatacccataatatatagtctatgctttggtagaccctggaatctccaaatgttccaagatgtcgctaaactaccaaactgacaaacaagtactagcagaaggtaaacatataaaaagtcgacaacatctttgtaatttaagcaaaacgagggcatcacagtatataaatcagatccataacataacataacataagtatcattaatataaatcgactatatcaaaagtaaataaacattggtttgatttttagggtattagtctatctccagcagatcccctatcccatcccctatcttatcccctatttcaaactttactctacaaacagtgtcatctacagttccgcatcccctattttacactacctgctggagacattcttacagagagatacgagttgatctcttagaaacacataggtgtgtttccctgaaattttagatgtttgatattgttaatgtgagcttcatagaagtatgaaacatatgttaaattagttttgaacttggtggcaccgtggcactttgtaatttcattgcttttaagtaacgaaactcagacatggcccatggtgggagaatgtttaatttctcaattacttttgcattcttgataatttgatctatgtgcaccttaaatagtatatattattttctcgaatgctcgattagtcatgattactgtccaaggctacactttacaattgttcttaccgtgtacaacatgagtatcataatatcatttggactcgtacttttgagcatgaataggacaattatatagagctaaatgcgtttttacatttttattatattatattgttagtttatatatacaccggttatcccaccgagtcaccaggatgcgggttcgaagcagtctctccgcatttgtagggggagagattgtctcggtgtcgttttatttgtttcccagcccactcatgtgggagcctccgacactgggtctgctctttttacaaatgcactagctcttacctttatggtaaaatgatttcaaacactttagtagccttctatttttgatccatttgcagttgaatatttttatccttgtcttattgagcgaaatattgttgttttagctgttaaatgttgtaactaaccttggggatttgagagaataatcactccatttgtgaaggcaactatatatacagagcctcattggccatactggcctatatttgttagatgagccttcatatgcttaataaatgttacactaattatttttggtatatatacacacacacacacacttaaacttgtttaactgtgtcatctcggtttataaacttttaaagtatgtctcttaaagccttaatcactgttcgggtctctgttaggtccaaaacggatcaaaacagacccatctttcactttttcttccccaatctgaacgtaccacactagcaatcttattgcggattcactcgtgcacattttttttctttggccagccccctttccaaaatgcatgtatggttgtgtgcacttagttgtaggcttgcgtgtagcttttgtgcgtagggttggtctcccctaatctctgcttttgtgccctacgtcaaagtccaataccccattgtttcccatctctctagctgtacacacacacacatggaagctttctcacaacattctatgacgagaagattgtttgtgaagaaagcctagataaagtgagacaagcaagcaacgagagcatccaatagagagactgaggtcaacttcacaagagttacaataccaaatacaccgtagggtcacattctgtcgccgcgttcttacacgcttacaatagggacccaaccggtgttggcagtcgcgctcgtgtaccggtcaacatggccgcctccgcgagggaagcgcggagtggtctggagtggcgggtggccgtgccggagggtgcgtcggtgaccatggagcacgaggtgggcccctgcatgagggtgtgggcgtggctggtggctcgctttgccaaggcatggagcaatgtcgtcggggtcgcaaggaaggtgtggaggatcggtgccgaggtagacgttgtccgcggaacactgggtacgctctgcttgccgccgcctgcacctctcctgtgtcggctcgaggaagaagggaaagacatcctcctacccggtttgttttgatccgttttgtctctaatagagacccgaacaaggattaaggctttaagagacatactttaaaaagtttatggaccgggatgacacagccagacatgtttaaggaccggaagtgctctttactctctctctctctctctctagagagagagatgttattagtcaccctaggtgatgatcacccaccctgcgaaagggcctctagcgtaatggttaaggcttccgagtagcacctccaggtctcgggttcgatccccctcgggggcgaattttgggcttggttaaaaaaaatccactcgttgtgccccgcccgctctcggggatcgatatcctgcgcgccgccctctggctgggccgttgcagagtgggcaattgatcgacccgctagtgatgggggctagggtccgggggttttctcggccgggaccaatgtttcggtctcttcttaatataataccgccataccgggagggcggtctttccctccccggccgagtttttttatgatcacccaccctgaaatgacttaacaaatttaagttattggtgatctttgtaagtcattatttaagtcatttctgggtgggtgctcatcacctaggtgacgaatagcgctgctctatgtatgtatatatacatagtcttatgtagttaaagattttaatacttatcttaactagcaaagcactattgtaactaaatattttagttcttcagatgaatgatgcaatgcatctggagaagttcagtcacaatttgaagatggaccttccagtgaatgcatcagccacagataaatccaagcctcagaaactggaatatttattgattcttgatttggagggtagggttgaaatccttgagttcccagtcatgatgattgatgctcaaaacagagaatttgttgattcatttcataggtattacctcatttgtaattactgataagagattgccactgttactcgtgctgtatataacttttatataagtgattaacactacccagacatatgcaagcttcgaaggcttgtaacattgttctctctattgtttttgtataaatgatttggtagtatgatctcagattgttcaagaatgtaaggttcatatttaacgattaatgcacatactcatataaataagttggtccacaccgtattgtacacttaagtggattctgatactattgctgtacttctattatttttctgaattggcctctgtcctctcttgtttgttgaccataggtttgtgcgtccaactgcaatgagtgagcaaagaacaacagaatacatagaagggaaatatggaaaatttggggttgaccggtatgtttagcatttgttactattatgctgctttgttgagtgtgatttatatgatgcaaaactatttcaacaactgatactcgacttcttttttcaaattaggtaacttggttcacttaagaactacaccatcatagtacaatcttagtatttggttttgaaaaaaacttcaaggtcgatcttttcataacatttggaatcatgagcaggcatcgactttctcagctgcagtgaattgcagtcacatgatccaattagcctctactatgtgcatacatctcttttctccactacagcacaaccaataatttactatgctaaatggctaggagataaaaagagaggtatgcaaatggagaatgatggcttgcatacagcaattgttgtgtttttatgggattttgccaagcttgaatgaggttttgttgctcataaaacacgagccacatctttggtgttctgctagccctttaggggtttctcatctccgctcccttgcaccaaataatatttgacgtctggttgaggtcgtttttagttttatttacaggtgaaacatgtaattttttgttgctgtgtgtctagttgtttggtgtatgtgttataacccatttacttcttaatataataatgatacacagctctcctgcgtgcccgtgaaaaaaagaacagaacagtttcagccaaactgtttgatttgcaatatttatttatgttcccttcactgttaccttccggcactctcactgccatttgccatatatatgattcagaactcactttgttcatttgtcaacgtggagaaccaaggtcttgttagtttcttgtggattatagccagcgcccccctcctcccgcgcaaaatgtagatcttataatatgcatgctgcttttcacaatgtacaagctgaaacaaacaggttctaatcgtctatcagttatgatcacattgagtatgtgcaaaacccaaacatataggaaacactttcttgttacatgaatttatttttctcctttaatagttaaagtttagaccttcaattgttaagaatacttgctactcccaagttcaccactttcacaatgaccttgctactatcatggaaaaggaattgaagtgagcattcacaagtagtcaagtacaataagatatctttaattgacatgcttatattcatggcaacatgaaaattgagatctttggttatatggtaaatctttttttttccgtacacgcaggagaactatgtatcattattattaagaagaatccatggtaaatttaaaatacagtacaatgcgacttaagatattcattgtgatttttttgatgccaacccaaacagtttcattctaaatgatgtttagtgatacttttccatattttcctgttctttatttggtccccgtttcttttgaactataatacccattcctctttgaacacaaaggtatgaagtagtctagaatctcttgccattgcagtgtgccacagctcttgtaactgtgccaatccacaagtgatgctggtgttcacaaatattataggcaagcaacagcaggcgggtagcgtgagctttttgagatagagtatgcaggacgggccaggtcttggagagaaatgtaatgtgttaggaaattcttaaagagaagttcaaaattgttggcccccttgtggttctggatggccagtgccatgccctccatagctccacgcaacatgtgtatgcgacccttgcacatggagttactagaatttattatgatagtatcgatgactagggcaatatcaccaaataaaaaagctagaagaattttaaaaagcaaaagaaaaataaaatgaatcataaccagagacaacattttatatgggtgcttgcaccataataatctggaactgaaatatattccttaactctggttattttttatccgggcacactaacaactcctttgttacataacagtgtttggc

SEQ ID NO: 1108 - DNA, 6334 bp, Zea mays
  Intron number 2 from transcript GRMZM2G174619_T01 (locus G RMZM2G174619) derived from phytozome v7.0 (chr-ID 6; pos 1 12810643 to 112816976 reverse strand)
aggggtgaccgtaaggttgcagggtttatattcatgtgcaatgcaaagactaagaaggagtgctaccagagtcgcttgtttgggatgcctagtgggaagattgaaatggtcaagaagattaggccaggggtcaagctgttcctgtatgattttgacttgaagcttctgtatggcgtgtacaaggcagcatcacatggtgggctgaaccttgtccatgaagcatttaatgggaagttccctgcacaggtaattctgctcttccacttcatagatttgtttgcacagaatgtagtaatctggaatgtattttgttttgatcggttgtatgagggatgtgctaggatagggttcacatgtggtttcagtgtgataaagaatagtggagatgagtatatatgttctgctggggcaatggcatgcatggattataggtattggtgaacttgtaaagcattagaaatagcagtagtgagaggtgtttacccttgttagaaaattcagtgtttttaaatgtcgtagatgggtgtcactctttattaaaatagtatggtgctatacactcatgtccatataattgagaaaatttgttgtgtgcctggtatatgtagttataagggttaattgtgattctacctggtcattatcaaataacacttcactcttccaatcatcgaaatatatgtttgtagaaaaatgcctccctttcaaatttagtgtcccttgtacataacacgagcttgtcatgtttttgaaacgagaatggagcaaggcctaccaactggtgaatttccatattgctcttagtttctagagatagagatattttgggctatttttttcttcaatcgataaaggttgtggattttctctctcaagcttttctcattttgtcatttattgtaccaaaaatagaaggctatcatactttgggaaaatcttttcaacttttttggacaatcgaacccaatatgcgctagcccaccttcattcttcttttgggtcattttgacttcttatcaatggtaacttcatcgtgaattaatgtattttaactgtttgtagatacaaacattgttttcaagtcggacaacttgctagtcgttctggctgatcgatttgggcgattaatcacgattagtcggacgacttaggtgattaatcgcgattggtccaaatagagttggatgactaatcgtgattaatcggatgacttgaaaacggttgatacgaatgcttttagcattgatgtctcccattttaataaacattttagtaactttccatttagtaacatcattgtcttatgctgatagacacgaacctgttgattctttttggagtttacatattatcctagtctagtatgatgcatatgccctcacgagcaactcacaattacaagtttataggtacttggtgtaaactcatttttgggtgcttggggggggtgttatgggtatttggtgtcaactcatttttgattgacatgctaatgatggagtcatttttggtaaggcagctagttccttataacaaggcctcagaaattagctaccgttcaaacatgattccaacgttcatcccaaattagcatctttagcgacatcgaccactagttatgttagcggacattggaatgtagatggtggtgaacacaacattgttaggatcaagatcctaggtaggctctattgtatgatgatagtggtagtggtaggatcaacccaaaaaaactatcatcctaacaacctggaatctgactataggtacctaaatagggatgaaaccgggatgggtaccagatacggatatgaaaacaggacggattttcggttacggatacaagtattttttgttgtcgggacggatacgggtactactcggataatgaacacctgatacgggtaggatacagaatcattgatacccgataagtacccgtatatatcaggtcggatacgggtacccgacggtcgggtactcggtggctacatgacagcgtactctaccgtcagtcttggcgtcttgcgcatgcggcctgctagcccaagcgccctggcccattacgcacaacagctacagctagcaagcatacccatgctaattatgtttgtggacttgttaatttatttcctagcagctagcaagcatcatctggtagctagcaagaacacttgaacatgataattaattttatctatctactatctgttactccctccgtttctttttagttgtcgctggatagttcaattttgcactatccagcgacaactaaaacgaaacagagggagtatatatttgtggacttgtgaattatgcctaaaagaggtgatatgctaccattttttttaaattgtgctggttctataatgaccttatgattattaactttaaactacatgatgtcaatttttttgttttacttttctatatttgagctatcatgtacatgattatgtatctcttactccctccgttccaaaatattatttgttttagatcttcacttttgtgtccatattcaaatggatgacaatgaatctagacacatatataaaatacatacgtcaaatattgtatgaattcactaacactctaaaacgaatactattttgtgatggagtattttatttgttcgttcgacggttgggcaattaatattatcgggacaaactacccgacaaatatccgatatctattcgagtaatatccgttatctgtttcctactctcccgaattattacctggtcttgtcatgtatccatcccgaattttaactatccgtctatccgtatccggtcccgtaaccgagagaaatacattagggtgtaggatatgggatgaactagtatttgactgtatccgccctgttttcatccctatacctaaatatgaattgaattttgaacaatcattaataattgaatatgttgggatatgatagttaaaaaaacttggccggtaggggaaagaccgccgccacgatattaaattaagaagaagatcaatcggagccccgaccgagaaaggccaccaaagatagtccacgaaagatagtccctcgtgcaacatgaaggttcgccccctataggccagatctttactcgtgctttgagccctcccagcccctacacgaggattcccccccccccccccccccgcccccataggtcagtccatctcgtgtgcacatgaccaggggaaccattgagtgattgagatatggtagttgagttggtatgttatatagttgaatgcaaggaattcatctttaatgctaactggttttttggtaatttggcccttattaattttcaaaattgcatggatatgaaatgctcaattttctgcttggttgcctttcactagatttattttcattcagatcttgaattccgttttttggtcatgtccacacagtgatcactctactcaattcaaattggaactctatttttagtttgagaaccattatgcagtacttagtttttttacacaataatgcttacaccaatttttttgcactcctaatacttagttttttttcacaacaatgcttacaccaacttttttttgcatttctaatttgatgattgaaaggttatgagtaagattgtaaagcagactaactattttttcaagttttattggggaaattactgaactgtcttaagactatatccaaaagcttacccatcctcatacctatattcaaactccactctgcgaacagtgcagtctacagtgcaaaacagtgcatatggttaaactttgggtaatctactgcagtcccgcctaagtctttatggtctaacacctgcagtaccccattccatattttctcattttcgctgaccgagaaacagtactaccgtctggctttcaccattacttgggtcatccgacgtattattgggatgtgtaagaggtgtgaacatgagcggggaatagcagaggtgttatgatcctagatatgggggtaaccctgccaggctaaattgacttgagggagactagactattggtgaggggtaacactgccagactaaatcggcttggatggagactagactattggggaacttggattagttcctctacattgcttgattcaaatttaatactgtcccattctatccttacatagatgaggccattaagaatctaatctttatgattaaggaacaacctgatataatctaatctctccctgatctttatccctggtatgagaggtagatgggctggctctcgggccatccataacacttctgtcccctttctgagcagcttgttctcaagctgcaggagaccctccttaggggaatcacttgacttaacagttaacacaaaaataaaccatttttacatcttggcttaatttcgttattagtgacaaattgcaaaataaaggcatactcattataattggtgcatctccaattgtgggtggcccacatccataagcacaaacagtggtggacccagcccaataatggaaagtaaggggcaaatcaccagccatcaccatcaccagatcgaaatgcccaaataaaaaataacaaaatgcacacccatctgtctaactccctcaacaccagccataaccaaattcagttgcccaaataataatatcaccacagttcactccataggccaaattggcaaatcattgcgcatggcagaccggcagaggcagagcatgttctacagggcctggcttcgtgtgcagcctagctgccagcctgctgaggtgctgcctgccacacgtggggtgctgtggcaccagccaggagtaggagcgcggaggccgggagggttagagtgtggaaggcaggactccgagtctgggagggggagccactaccacacacggggcatcctgtctttgggtttggagattggcgagtgacaagcggtgtgaatgcctaataccctccctcggatgtcccacacgagagctctaggacatcccaattcacctgaggaggttatgtcgagcagtcggcctgctgcagctcccgtcttcttcctcggacagttgcactcggacgcttgacaacctcactctggtctccgagggctggggcagtgctctgagcacaaagacaaaggataaagggaagcttccttggctcacaaccttgtatgctatatagaagatgagtgaatttttgctgaggctgcagtgaactcagagacacttgttggctagcttgtcttggcaagttaaaggagacgaaggttgggtatgtagatgccactgtgtttaatcattgagtactatgagggatttgaaaatgcgtagaacttgcaattgctagacgggtaaggaatgaattgatatgtaggtgagttttgaaagtacacctaacttgcaagctgggttttcaatccctgggtatgtattggtatttagttgacttcattaacctggacctataaaccttttgacacagaattggattctaggctgtggtgtctctatttttccccctttctagagctttcatgatcaagagtggtgtttctcagttcaatcccagcttctgcttccccacaaaattgcagatagtcttagttcttggcagtacttgccttttttcatatggagaagctaaaacagaaaatgttctaaacaggcctcagaaagaccattctgttgaatatgcatcatcattctggtattaaaactatgttatatgtgtaatgcaggttaagtttaagattgataaagattgccgtcctctccctgagagtagtctcaagcaagccatcaaggaaaattacaatgcaaagagcaaatttgatccagagctcaccacaaaacaagtgagggttttggactcatgctgcaaatattagtcaaatagtggttcagggatttcaagcattaacataatgctagtttatattctatataatactatgaatatgtgatacatgcaggtccaaaggttacttttgctgtttaagcctgttagtgcacctcaatctgtttcaaataatcaccttggagaaaggcgccactatgaaaaacgaaggaagccacgccattttgaagaaaggcggcctattgaagcagcgcgtcggccacgatttgatgaggaaaggcgccctgcggttagacatgttccttttgaggatccatacagggcaccacgctatgctccagttcctgttgactctcagcatggccattctttggctagtgatcaccacagatattatcaaccagcacttacacctgagcctcggcagcttcctcttgttctagagcctcgatatgttccgccggccctagatcatcatcatgtgccagagcttcgac

SEQ ID NO: 1109 - DNA, 5603 bp, Zea mays
  Intron number 2 from transcript GRMZM2G101932_T01 (locus G RMZM2G101932) derived from phytozome v7.0 (chr-ID 10; pos 85173313 to 85178915)
tcactttgacccagaatttgttaaaacactcaaaggtacgaccgtttgtacatttaatccgttaaatatttacattactaggtatagttcgctatctttcataatttgtgaaaagtaggagaccaaaagaaaaaaaaatatcattattttctattcatattccactatctttcctaacttgcgcgccaaaatgcagcttcatatcattctcgatcctactatggagcaccatcataccagtgtagtcactgctctgctcttttctggtataatgaaagaataggatcatcagttggatcccgcgccatcatctacaacaattgttgtaaaaatggcaaagtctgtcttcctccttatagccctagacctgagccattactatcgttagcacgatttgatggagattcgatatctaaggccttcatgcaaaatattaggcaatacaactgcttgtttgcatttacatccatgggtgctcatattgatagatcaatgaatgatggccacggtccacccatttttaaagtatgtggtcaggtccaccatcgaataggatcattgctacctatgactaatgagcccccgaagtttcttcagctttacgtgtatgatacaacacatgaggttaacaatcgaatacaatcgttatctagtactgatgctcctgcttctcctatccgaccagaaattgttcatgaattgctaaagatgttagatgagcacaatccctttgctaaaaaatttagacttgctagagaaagacttaatgaacacacaaacgaagaattcatcatcagaattgttggagctagagagggagatcccgtgcaatacaatatgccaacaactgatgatttagccatgcttgttattggtgacttctcacttgatacctttaaacgagacattatcatagagacaaggaattcggaattgaggcgcatttcatcattgcatccagcatatatggcccttcaatatccacttttattcccatatggagaacgtggattccaagttggtgttctgtatagtggtctagacaccagaaaaacaaattcaagaacacatatgaccatgcaagactactattgctatcaatttcattacaagtctggccaaccaaatccatttctgtcctatgggacattgtcaaaccaagctaaggttgatgctcgtgcctgcattgatgagaatagacttacatacattttgcacaatcaggatagattgcgaatagaaaacttgcagggtatatcagatgctgttagcaaaggttgcataaatggcgatgaaatgggaaaaacaattgtacttccggcttcacatatcggtggaagacgatatatgattcaaaattatcatgatagcatagccatatgtagagtccatgcaccaccagattttttcgtaacattcacatgtaatgcaaaatggcctgaaattgttgaaattttttatcactctggccaaaaaacttcagatgcacccgatattgctgtaagaatattccatatgaagttggaggagttgttacaagacataaaatccggtaaatatatttggtccatgcaaagcaggtgcggatatcgttctgccatgttttcatgactaaaaagtttatttaatctcctttacttctttttttcacatatttgtacacaaacactacctactaataacaattccatttgtaaaattttggatggtacgttattgatcatactatgagtactggtttctgttctatatcttatgtttatgttgactcctttgacattttgtttatcaactaatattaatcatactgctcatcaactgaatcattgatcgaactataaacattggtttaatatctacaatatgttttaaaaaggctcgttcctgtagcattgtgtttttccaattgagattcagacataactgtttgcataataccgtccatgctgctcattcgcacatctcttttacaagtttttgtgattagctttccggaacacatttgttgacatctttctctttgcttcgttggttcttatggcattttatttttctttggctggaattgctattgcataatttatactatattttgtcaattgcaatgtaatggccattttatatataacatcataaattccttttacaacaagagagatatgctattacacacaattagtaactaaaaacatgtttttttggtcaaattattgcttatattgcctgtccacagttttattgtttaaattaattaaagatacataccctcttcttcctatgggagaataaataatgggcttacaaaacattgacaacaggtttttcatagatatttgtaggatcacaatggaaaaatattgtttgcttaccttccctactaatatgttgttactttagtgcactcgccaccttaattattaaaattttatcctttttcaactcaacttattctttgcccgatgcatttttgtacacggtggagttccagaaacgtggattgccccatgcacatattattttctgggtttccaccagtactgcacaaccaactactgaatttatagactctttaatcactgctgagataccagatccagccattgatcccttaggatacactttgattgcggagcatatggttcacgggccatgtggatcttacaatcagagctcaccttgcatgaaaaaaagtcaatgttcaaaacactatccaaaaaaatttcaaaatgaaactgtggttgatacaaatggatttgcggtctacaaaagatcaaacaataatagatttgttatgaagtctaacatcaaactagataacagatggattgttccatataacttgacattgctcaagaaatatcaagcacacatcaatgtagaatggtgtaacaaaagcatattcatcaaatatctgttcaagtacgtgacaaaaggtccggaccggagcaaactatacctacaacgagttttagatggtcaagacactcctattgacgaggaaacaaacacaaggaatgaggtcaaagaatacttagatgctagattcatatgcccatatgattcatgttggagaattcttggttacgaaatccatcggcactttcctcctgttactagattgccagttcatttgcctaatgagaattacattacatatcatgccagcgccaatatgtcacaaatcttgtcacaagaattcgtacgccgaacaatgctaacagagtggtttgttgctaaccaattacatgaaggtgctaggtctctaacttaccctgattttccatccgagtggaggtgggacgaaaaaaaaagatcatgggaacaaagacatagacaaggtaacataggccgcatacactttgtacacccatctgcgggggaaagatattatcttagaatgcttttaatggttgcaaaaggagcccagaattttgaatcattgcgaacatacaataatgttttataccctagcttcaaagagacgtgtagagctcatgggcttcttgaggatgaccaagagtggtataatgcctttgatgaggccgcttcgtgggcgacgtccagtcaactccgtgatctatttgtcacaatgcttctttttgtgaggtaggtgatgaatttactttctttgaaaaagtctggacgttactggctgatgatattcagtataacacgagacaaatactaaatcatccagcctatcaaatgagtgatgaggccctaaaaaatcagctgatagaagaactcactacattattcagcagaagaggaagtcgaatacaggatttcaatttaccaactagatctgactcaccttgtttagtgaattcaaatcgctttattgatgatgaactatcatatgacatttctattatgcaaactgaatccgaaatgttgacatcaagattaaataatgaccaattgcatgcattcaagactattacagaaactgttttggcaaacaaagcaggcttttatttcgtgtcgggttatggtggtacagggaaaacatatttatggaattccatcataacattcctacgtagtcgcaaacaaatagttctatctgtagcatcatctggtgtggcctctttacttctaccaggaggacgaaccgcacgctctcgttttaaaattccatgtgaattagaagaaacaacagtatgtgacatcaaatgtggcacgatgctttctgagttagttcaggttgcatcattaataatatgggatgaagcgctaatgacacatagatttgcttttgaagctctagacaggtccttccgtgatatcttggcatcttcgtcacctatggctaagaacttaccctttggtggaaaggttgttgttctaggtggtgatctcagacaaacattgcctgtgattgaaggaggcacccgctcacaaattgttaattcagcaataatcaattcttctctttggtctcatgtgcacatcctgcatcttacacagaatatgagacttctaatgccatcgttgtcacaagaagaacgacaagaactatcacaatttagcaagtggatgctcgatgttggggaaggcaaaatagacgctacatcacaagaaggtgaagatgagccaacatggatagaaattccacaagacttgctcctaatgcctgaaggtgacaaaatcgcttgtatagttcatactatttatgaaaaactcaatgaaaattatatgagacttgagtatttaaaaagtcgtgccatattaactccaacaaatgatacagttgactcgataaatgagtacattgtctctcttaaccctgaagacgcaaaagagtatctaagttgtgacaagataatcaaagcacccaatactcatgaatcatatgatcttttatatcctgttgaatttttaaatacattgaatgggaacagctttccacagcatcgaataattctcaaaaaaggtacaccagtcatgcttctcagaaatttgaaccaatcagaaggtctatgcaatggtacaagattgctcataacttccttgtgtgacaaagtgattgaaggtcaaattatgacaggtattcacaggtcaaaaaatgtgcttattccccgtatatcattaacactgaagaatacaaaatggccattcgttcttcaaagacgccaataccctataaaggtatgctatgcaatgacaattaacaaaagtcaagggcaaacactttcaaatgttggtgtatacttgaaaaaacctgttttcacacatggacaactttatgttgccatatcaagagttacatctaaaaaaggtctttcaatccttattgaagatgactcaggcaaatgcagttctaagacccgaaacatagtatacaaagagattttcacacgtattgctgagcaaagctccgatcaatagcaagacgtgttcctaatgttatatatgtacatatatatatatatatatatatatatacagaccattatatatatgataggtatgccttgtaccacatacattatcaatcttgttatccgctttatgcaatgccaaattgtatctatcactatacattgtcaatgacttgctaagcagttctacttctctatgtgcagatataccaagtaaca

SEQ ID NO: 1110 - DNA, 21268 bp, Zea mays
  Intron number 3 from transcript GRMZM2G702176_T01 (locus G RMZM2G702176) derived from phytozome v7.0 (chr-ID 5; pos 1 99940295 to 199961562 reverse strand)
acttgcccccgaggttcgccggctttgaccagctcgtgaagatgttcgccgacaaaggtgtcggtaccctggaacaggggtaccccttactacagtatgaaggcacggtacctgtgggggatagatatcccctgggtccactaaagaagtaaaaggcctcacgaaaggcccaagggcccaataattcgtaaggtcattctttcgtgggcctagggaaaggcaaccaacaaagaagacgtgagactgattagtgcaaacacaggcggcccacaacgtcgaacgaatggatgacaacagagacccgactttcccgcgctgaagccctcatgcaacagagccatgcgaggataagtcggcgaaggttacgtagggataaactcaagaggttcactatcttttagctacttgttgttatcgtatcacatgtactgctccacggccgagtatataaggcctagggggcaccccttcagatcgatcgaccctgttctacttagccacccacaaaaactctctgcgccctctatccagagaatcctcttgtaaccacgctcatatactcaccaggacgtagggtgttacgcacttctaagcggcccgaacctgtaaatcttgtccattgtccctcgtgcgatcggcacgaaccattttgctacagtcgtcgacaccgtcctactcctaaaaacactttgaggggccaccccgggtgtgcggtcggacccaaaacaccgacagctggcgcgccaggtagggggtgtgtcgacgatccaagctagctcaatggccgtcaccttccacagcaagatcaccatgcgtcccggatccatattctgcttcgggacaatctcatccgtggcggacgaagaaggaatcctacaccgcctcgcggatctgccggaacagaagtctcctccaacaaactctgaaaatgctggaaaaacgctacctccggctcttcggaacaagatcgtctccggggaggctggagctagaagctcgctgacccggaagactccgctgtctacttccccgacgaaagaatggacacaggtcatgagaaggaaggagatcagggagaggccagtcgttcttcccgttcctccgacctcaaaggagaacggaaagaaagtcgccgcggcagcaataccgttctaccccgacgtcctcttcatcgggagggcagagtcgcccgccgtctccgacgatgaaccgaccgcgcccggagaagaaccgcctcagcgagaatcccgccgacgaaggaaccgacgcagaaacgttcgacgacatcacgcagctggagaacgggatccggagcagcctgtctcgcgagacgaggtctcagagataggagaaactccggaagaacgcgtcttcagggaacgaaggaactcccgacgacgtgatcgccgtcggactcaggagcaagccgagcaagatgcaaggcaacgacgcgagaatccgctcttcgggcgcaacttgaaccctgacttcgcccgagctatgaacacgccgagcgaggtcggaggcgttctagcccggatagctgacggacttcctcggacccccgacgccgagggataccggcgcctgttcactcaggcagccaaccatcttctaccgctcgctcacccgccgaacgatctgcgacacgccatcaacagtcgccgagacgcgcggagctctatcaatgcttcgcgcgaacggcgacacgagaacgaaattcgccgtcgggaggagtatgaccgagatcatggcttcccgactcaaagccaggccacccgaactgagtcggcaacagcttcaactggtggaaccacccggggacggtcgaggaaccatcaccgccactcccctccccgggacagacgacatcctcgacgacaggaggacacgtgcggagtatctgcccttactctgcgccttagggccatccaatggcctcccaacttcaaggtatccaatgtcgacaaatatgaacctaagcaggatccagggggctggttggccgtctacaccaccgctgctcgggctgccggggcatccgaggacgtcatgactgcgtatctgcccatcgtcctcgggcaagacgcgctgcagtggctacgacatctaccccgacactgcatcgacgactggggagacttcagtcgacgtttcaccgccaacttccagtctctctccgacaagccagcgcaaccatgggacctcaaatccatcaagcgccggggggatgagactctccggtcataccttaaaaggttccacaccatgagaaaccgcatcctcgaggacttctacagaggatctaacgactcggctttcgtccgagccatactgcaaaaggcgccgactacctccgaggagctgttccgggaagccgacctctacatcaccgctgacgagcgggcccaggacctcatcggaggagcaaagcccgcaccggcggcaccacgacgcgacgcgaaccagccgcccgacaagcgctgggagaagaggcctcgcgaagaggtacacgccgccggaccacccgcctctcgcgccccgaggaggacctcgtggaggcgaacgcacgctggacgacatcctcgacgcccagtgcccgtaccacaaggacatgcgacacactctccgcaactgccgggatttcaagcactccgtcgggcatggccgaccctttcaacctctaccacctcctccgccgaggggaggaccagatgaaccacgacagccccatcagccggaggaggggggaggaggagctttcccgcgcgttgacagggaggtcaacgtcatcttcggcggacatgggtcgcaggagaacaagagacaacaaaagctcaacgaccgccagatactggtggcgaccaccggccctcccgccccgtaccggtggtcggagcacccaatcacgttcactcgggaggatcaatggctcaacttcgaccacccgggcaaatacccgctcctcgtcgatccggtgatccgagagagccgggtgaagaaggtgctagtggacgggggggagcagcatcaacgtcaccttcccccgtacgcttcaaggcttgggagttcacctcaaagagctccacgagtcagacactcctttcttcggcatcgtgccgacggaaggggaatacccgctgggccacatctacatgccggtcaccttcgggactccggataactacagaaccgagttcctgaggttcgaggtggcgaacttcgactgcgggtacaacgccatcatcgggaggccggggctggccaaattcatggccatcccacactatacgtacatgatactgaagatgccagggccgcaaggaatcataactgtacgcgccgacttccaaggcgccgcagaatgtttccgagtggccatccaagcagccctcaccaccaagccgtcagcggttccttctacaccggcgaactctaagcctgaagaagacctcgctgtgccggcaaacgaagctcaggccgcgacctctatgcggccgactgaggacaccaagcggatcaacttgggatttgctgatgagcgcaaggcggccatcatcagctccagtttaaatgacaaataggaaagcgcgctcgtccagttcctgcaagataaccgagatgtattcgcatggcaacctgcggatatgccgggagtcccgagggagttggccgagcacaaattgaaagtctatcctcaggcgaggccgatacggcaaaagctgcgtcgtttcacgcccgacaagagagaggccattcgtgccgagttagcccgcttggtcgcggccggatttattagagaagtattacaccccgagtggttagccaaccctgttcttgtactcaaaaagaataaagtggattggcgcatgtgcgtcgactatactgatctcaacaaacactgtccgaaggatcccttcgggctcccgaggatagatcaggtggtggattccaccgctggatgttcgatgctgtctttcttagattgctattccgggtatcatcagattagtttggcaaaagaagacgaggaaaaaacggcgttcatcaccccgtttggtgctttctgttatacctccatgccgttcggcctcaaaaacgctggagcgacttatcagagagctattcaaacatgcttagccgatcactggggcaagcgtgtggaggcttacatagacgacgtggtgattaaaacggagaatccggaaaacttcattgaagatttacagctggttttcaacagcctgagaagatatagatggaagctcaatcctgagaaatgcgtcttcggggtaccagcaggaaagttactcggatttattgtcagccaccggggaattgaagctaatccagataagattgaagctatcatgaagatggaagctcctcgatcgcaaaagaaggttcagcgactcactggatgtatggcagccctgagcagattcatatccaggctgggagaaaaaggtctgccattctataaactgctgaagaaggtggataagtttcaatggacttcagaggcacaagaagctctagacgcactgaagaaattcctgacaacaccgccagtattgaaaccgccccggcgagctacgccgactcaaccggctgaagatctgctgttatatatctcttgcacgactcacgtggtgagcactgcgttggtagtcgagcgagtggaagaagggcatgcctacccggtacaacatcctgtctacttcatcagtgaggttctaggcccatcaaagaaaaagtatcctcaagttcagaagctattatatgcagtacttctaactgcccgcaagctgcgccactactttgacgatcacaaagtcacagtagttactggttttccaataggggacattcttcacaacaaggaagccattggccgaatagccaagtgggcttgcgagttggggtcccatgatatcgagttccgacctcgcactgccatcaaaactcaagcactggtcgacttcgtatcagagtggacagaacagcaagtgccggataatccagaaaccgcagaagtatggcgaatgtattttgatggctcgctgaagctgcagggagcaggagcaggaattctcttcactgcacctggaggcgaacacctcaagtatgctctccaattgctattcccggcctctaacaacgcagccgagtatgaagctttgatacacggattaaacatcgatatatcactgggtgtcaagagactgatggtgtacggagattctctggtagtcatcagtcagataaacaaggaatgggattgttcaagtgattcaatgggaagatactgcgccgccgtccgaaagctagaagataaattcgaaggtctggagtttcatcatatagaaagagatcggaacacggcggctgacgtactgtccaagcttggatccggtcggactcaagtcccgcccggggtcttcgtgcaagaaattctccagccaagcatctcgacggatcaaatagaagagtgcattatcatagatcaacccgagtcagactctgatgactggaggcaaccgattattaaatatataaaaaatgaagaagagccagatgacaagaactcggcagagcgcattgccagacaatcagctcactatacactcattggggaggtattatacaggaggggcgcgtcaggcgtcctcatgaagtgcgttctcccgtccaccgggaagcaacttctggaggaagtccacgcagggcagtgtggagtacacgcagcatccagaacattagtcgggaaggttttcaggtcaggattctattggccgacggcgaagaatgatgcagccaagttagttcagagatgcgaagcttgccaatacctgtcaaagcaacagcacatgccagcacagcagctacaaaccataccagtaacttggcctttcgcatgctggggattggatatgattggacctttcaagaaagctcaaggaggatacacccatgtattggtggcaattgacaaattcactaaatggatagagttccagctcattgcctctttaacctctgctaaagccgtggaattcatacaaagcataatattcagatttgggataccaaacagtatcatcactgacttgggatccaacttcaccagttcagaattctttgacttctgcgagcaaaaaagcattcagatcaagtatgcatctgtagcccatccaagagccaacgggcaggttgagcgagccaacggaatgatattggaggcacttagaaaaagggtctttgataaaaatgaaaaattcgcaggaaaatggataagagaattgccttatgttgtttggagcttgagaacccaacctagccgggccctgcatggaaacactcctttcttcatggtctatgggtcggaagcagtgctacctgctgatctcaagtttggggcgccaagattgatcttcgaaagcatagcagaagccgaagccactaggctggaggatattgacgtacttgaggaagaacgactgaacgcagtgattcaatcagcacgataccagcagactctaaggcgctaccacgacaaagctgtgcggcaacgtttcttttcgatgggagacctcgtcctccgccgaattctaacgggggagggacggcacaagttatcacccttatgggaaggacctttcatagtagcagaagtcactcgtctcggatcatatcgcctcacccaaatggatggcacagaagtcgggaactcctggaacatagagcacctccgaaagttttacccctagctgtatctcaaaacagccagggcgaccatgtattctgtatagaggaaatacgtcatcaataaagagagatttcaaagatacttggctcatttatgattgacttgcattcttacttaactcggggtgaccactatgccctacaaacggagcaatcgacttaagtcggcaacgacttaaggcggtgcaacatgctcacgcttacttaactcggggtgaccactatgccctacaaacggagcaatcgacttaagtcggcaacgatttaaggcggtgcaacatgctcacgcttacttaactcggggtgaccactatgccctacaaacggagcaatcgacttaagtcggcaacgacttaaggcggtgcaacatgctcacgcttactttactcggggtgaccactatgccctacaaacggagcaatcgacttaagtcggcaacgacttaaggcggtgcaacatgctcacgcttactttactcggggtgaccactatgccctacaaacggagcaatcgacttaagtcggcaacgacttaaggtgatgcaacatgctcacgcttactccaccgggggtgaccactatgccctactaacggaagttaccggctaaaagtcattgacggtctaaaccagtatagcatactcgcgcttatgcagttcaagggatgatctccatatcccacaaacaaacttcataatcatcgggcagcgttaccacaaacttgcgaactaataaattctgatacaataagggagtaatcatgtcattcgaatgataagccgataacctctagcgagtacttgattatgctaactgcgcgctcagagcacgcgaactgtttctttattttccaatgtctttctcaggaacgaccgacgaagaagggcgattcgaggaatcaggggcagcattcacgtcggctcttatatcttcagggacaaccacgccgggtcttctcatcaagattcgtcccgcccgaatggccttgtccagggccttatcgcgctgagctttgaaagtgacagcagcttcttcagcaactttaacagcctgctgagcagtttctaactcctgagcaatggatttcttagaagctcggagtcccttgatggtggcgtcctttgccgatagcaactgtgtaaggcgggccacttcgtccgaggattcttgcagttgacggcgctgattgtcaagctcctccatcgtaaaacggtggctcctctccaagatggtcagcgagttgctggaatctcggtacaatctgtccaagttgtcgcgagaagcggcaaggatgcgtttttcttcctacaagcaaaaatcaactcattcggaatccaagagcatgataaggcgaaacacaggttcgtaagctaccttctcagagtcaagctgagcatgaagagaagaactcagagcgttggcatcatccaaagccgcagagacctgactcaactcgatctgactttgagaatacttctcctcgaagtcagcgcatcgtcgagccatttcagcttgatcttgagagtgtttttcttcaagaactgtgatctgccgagtcatccctatcaagaggtattcaaacaaaatgaggtcagaaggtaaaacaacccacgggcaagaacaaagaagaagaagaaaggacactaaccagcattggtggcctacaactcagatacacgaccccgaagcaacaccggattccaacgctcaagagatgaagccatctccgggatggaagcaccctgcgacttcagctggccgaccattccatccaccaaagcctgataagaagagcggatgagcataatggcaacaattcatgcaacataaagatcaaactaaagcacagcacagcacctggaggttggagaaaagcgaagggatccccaagtcaggagaaatcagctgatgaccaggtgccagaccaccactcgaggcagcttgcagtagaccagcaggaacgagctcagtacattcagcagagcttaacgccagaccagtggggatgctgccctccaaagcgaccccctgatccggagtttgagccaccatcatgccgccagagtgtggaggtgaacccacatgaacatccatggaagtgcaggagggagaccccgctcggacaccctcgggggctgggtcaaggttggcactgcccacttgagccgggtcacccccggcaacaccctcgggggctgggtagtggcctacactcctcacctgagctgagtcctccccggcgacaccctcgggggctgggcacatgtcagcgctattcaagggatccaagctctctgccgtgaccacctctaaggttgacgggccttcagctacttccataggatcaggacgatccaaatcatcatcccgaccctcgagatcgtgctctaaggtcgacgaggcacgggacgacctcaacccagcatctggcacggctgcacaagtttctgttgcatcaacgtctgcaggttccaacaacaagttctcagggaccatatcctctagagcttgatcaaaattagccatggacagttcttgcagaccaataagagcagacaaggcaggagaaggaaccccactactaccaccgctagcgacgaactgccgactgtttttccgagttaatggagtttcattctcttcctcctcatcttccacagcaacagcacaaacagcatcctcattggggtcagcagcaggcggagcacacccattgggatcaatgtcagcaaggccagttgcagtcatttcttcggcagcaggagctaaggtgctggcatcctcgtcaaagctggacactcgccggaggcgtcttcttttcttcttctgctcatcagcagaaggctcgggctgactggttcggctaggacgcctcgggcgagtattgacaggtttcgagacatccaaggtcgcatcaacctctggaaggggcaccactgccaatgtaccatcaggagcagtatcagatgaatcctcagctagcagatcgagcatgtcatttatgtctgcatcactagggttcaggggcacttcaaaataaatctgccgttcatcatcaggtatttccccgagcgaagcaactaaggaacggacctcttcagcagaaggtcgcactctaagacccaaattgctatctgtcacgggcggattggacacaaaaagagtgaaatctttgggagaaggcaggttccaagccgagtatgccactggagctccaacgtttgaaactttacccctgaggatcatttcgagtcggctcaccaaatcaacagaaggaattctcctattagtaactcgggttgagtcggccagccctcggtaaagatatgccggataggccctgtccttcagcggctgaatgtttttgaaaacaaaatctgtgaccacagcttcggcagtcagacctctttctttcagtaatccaacttcagtaagcaacacgcctgcctcggccacttcttggtccgtgggagactcagtccaactcggagtacgaacgtccggctgtcttcctgagcgggaagggagagaatttccataattatccattataaaccactccagacgccaacctttaatgctgtctttgaggggtatctcgagatactcggtcttccgcccccggcgcatctctaaactagcacccccgaccaattgatgttgccccccggccatcccaggacggcagtgatacagatacttccataagccaaaatgcggcagcacgccaagataagcttcgcaaaggtgaacgaaaatagagatttggagaatggagttagggttcaagtgagtcaggttgatgtgataaaaatcaaggatgccacggaaaaaaggagatatgggaaggccgaggccgcgaagaaggaaaggagtgtaaaccactgactcgtgggtatcttcggttgggacagtagtcccgtggcaagcacgccaagaacagagttcccgtggagggagaaccccgatggagacaaggcggagaagctcaacctcagaaatcacagacatatggttacctgcgaagggtaactgactgttggggtcgatggcggggatcactgcggcagacgagttcgcagtcttcctcttgggcgccatcttgcttctcgctggcgaaacagagcaggaggcgagtggcagagaagactcagatgcggaaatgcaagaactagggcacggaaagcaaaggcggctaaaagcgcgactcttaagggatattcttgagccagataccttttcaaaagtgcccagtcatcacccggcggtcatctccgaaatcccagcatgccacgtggatatccaacagttatttccaagaaagccaatgtgccacctcatcactcggtcattttcctcaaagtaacttgagaagctggctatcactcggcgctgcctccgaaacgccgaccacgtgctcaatcgctcggcattacttctaaaatgccgacgccgaccttcaatcactcggcgctgcctctaaaacgccgaccacgtgctcaatcgctcggcattacttctaaaatgccgacgccgaccttcaatcactcggcgctgcctccaaaacgccgaccacgtgctcgatcgctcggcattacttctaaaatgccgacgccgaccttcaatcactcggtgttgcctctaaaacgccgaccacgtgctcaatcgctcggcgttgcctttaaaatgccgaagccgactttcaatcactcagcatgtcctttaacacgccgaccacgtgttcaaacgctcagcattacttctaaaatgctgatgccgacatttaatcactcggcgttatttctaaaatgccagccccgtattttgtcgcttggcattacttctaaaatgccgatgccgaccttctatcattcggcattgcctctaaaacgctggttttgtgttcgattgctcagtgttacttctaaaacgctgatgtcaatcttcacatcgctcggcgttgtttctactatatcaaaagaatcagttcaacattcagcaaaagcaatgacaagtcatcaaaaagaggggataaacgacagacttcattaaagggaagttaacaagcttacaaaccaactctttacgagttggtacttccctaattctactctacattactactactactaaactacaatatactactctacattactactactactaaattacactaattactactacattattctagctatactaaactatactaatatctaagaagaccagtggcgtctagccactggccctgcccctgccgccgccgccgcccttggtgctgcccctgctgctgtcgcccttggtgctgtccctgctgccgtcgccgccgcccctgccactgccgtcgccgtcgtcgtcgtcgtcgtcgtcgtcgtcttcaccctcgtcgccgccgtccgagccctcctcatccgaggagtactccgactcatccgagccttcgagcccggcgcgctcgacggcccggatgtacgtccagacctccgcggctatcccctgggagtcgtccgagtcatcggacgacgccgggggagagacgggagccggagacccctcgggctcggaggagaactcctcctccgagtattccgagtcaccaaactcctccgatggaggagtcggctcacgcttgcgcttgttgttcttgcccatggttgaagctttgggagagaagaaagggaagaggcagtaaggagcagcgaagagatgtgaagaaaccagagaagcaaaggggttatttatagaagggaaaggcaaccgctcacttctaaccgcggtcactgaacagtcgcaaggcattcaataaacacttccacccacccgaagacacgtcagacggcggacgccgtttcatgcaacactacacccattgggactccagtcaaacagcgcaaaggatatgattacactagccgtcccatcgcattactactcagaggcaaccggctaaaacactcagcgtaccaaagccgtcccttgcccacacccattggggggggacgcccaggaattatcagtatatttttcaaacggtcacatccatgcagggcatgcaatgaatacctcaagacaaaaatgagatatcagtaaggatcagaggaaagccaaatataaccagcaaagtacaagatatggccgacagaagcgacgtgaagactagacagagaacgtccgtcaaacgtccaatcaatcgcagaagcaaataaattgcattacctagcaagatatggatggattgcaaactcggctgctaaagacaaaatatacgctgacctgggcagcaaaatattgatgacataatgctgacctccaaagcataatgcaaaatagcctcatgccagtttccgcaagtgaaaggaagaccttcgaatggattatccttaaaaaatccatttgaaggtcgggggctacacccattgggtgcacctccggtgcaccccatggaatattattctaaaccggtatagcgccgacttctaaggcgtagagcaagattgaaaagactaatcctcaaccgagatgcaggagcgcgaatggagataacctttggaagaagaccttcgagtagattatcttctaaaatctactcaaaggtcgggggctacacccattgggtgcacctccggtgcacccaatgaattccagagtcttacaatccaaaatgccgacctccaaggcacaagcacaaagccaaactttggtcggacgagtgatcagagccagagaagacagcagggaatcatttttttttggaccttggatctttgagttgattacctctaaattaacccaaagatcgggggcttgtgggggatagatatcccctgggtccactaaagaagtaaaaggcctcacgaaaggcccaagggcccaataattcgtaaggtcattctttcgtgggcctagggaaaggcaaccaacaaagaagacgtgagactgattagtgcaaacacaggcggcccacaacgtcgaacgaatggatgacaacagagacccgactttcccgcgctgaagccctcatgcaacagagccatgcgaggataagtcggcgaaggttacgtagggataaactcaagaggttcactatcttttagctacttgttgttatcgtatcacatgtactgctccacggccgagtatataaggcctagggggcaccccttcagatcgatcgaccctgttctacttagccacccacaaaaactctctgcgccctctatccagagaatcctcttgtaaccacgctcatatactcaccaggacgtagggtgttacgcacttctaagcggcccgaacctgtaaatcttgtccattgtccctcgtgcgatcgacacgaaccattttgctacagtcgtcgacaccgtcctactcctaaaaacactttgaggggccaccccgggtgtgcggtcggacccaaaacaccgacagtacccacacaactatctttagtcgcgcgggaaacaacgcccaaccccaccacgtgggcggctccggggccaccacgtggccagaggagacaatctactctaaggtgtcaacggtgggtccggacccctagatacacaaaccagaccctgggatgggtcccgggcccctcaggaggggtccgggctactcacagtagggtcccaggattccaacgaaaagaatacccaagccttaatcaaggccaggcgggggtccggtgctgacacgtgtccaaaccataccgcgagcgctcccactccccgctcagacagagactcgatgctgccacgtgacctactgcccgtgacgtaagctagcgggtggagccagacgtaaggcctctggaccgcgcatttattgcggaggaggcgcgccgcctgacaagctggcaggtgatgtgtcgcctcagcattaaatacgccatgtctactccagtgacaagcgatgtgccgcctcaacatttaatgtgccatgtccactctgctggcgggcggcggccaggccatcctgcaggcggcgtgcccgtccgctccggtggcagacaatacgcccgtgttgcagcatacactgtgctcatcatcactcatacgttgccagtgaagcttccgctgcacgccgatactacgcaggctgcggatatcaggacgcaaggagaatgcactggcaaccagcattagtggttccatgtattacatccgttgtgtctctgggctcgcatgtcggtgctcagcacccttgtacgtgccccccttcagctataaaaggggaggcacgcaacgttacgacctaagctcactcaagctcactcaagctcaatacatcacacagtggagtagggtattatgctccggcagcccgaaccactctaaactcttgtgtgttcttgtgttcattcatcgtttagcagacagacaaaactcttaggcccctcctcatcttaggatttagggcgggtgcattccgccacccggccggagaatttcctcttcgacatttggcgcgccaggtaggggcttaggctttaagtttttgcttgttttcttgctcagcacgatggtgcaaatcgtggagcaccgcgtcgagacttcgatggatttcttggtggaggaggaagctgcttcttccacgccgcagattcccaaccacccaatgccgggcactgctgttgtgcacgctgcgcagcagcatacagctgtgcaggcatctcggactccgtcaagggcagctccgggggcgttgtctgcggccagggagctgctgcgccacccccaagctccacggcatcacagggggccatgaagcagtggcatgatgacatagaccgactgctcggcatggagcactccggctcgaccaggtcgaggccgcggtcatctcggcgccagcatgaggcgacagcgtctgtgcgctcaccctcgatgaggggtgcacagaccaacgacctccgggcagagctcaaccgcaggcgtgtgggagaggatgcccgggtctctctagagagggcacgtgagcgtcgtctaaacatcaagggtcgcaacctcgatcaagactttgttgtggtagcaccacagaccccaacgggtgcctggatccaggcgggtgtcccattggctagcgtgggtcgtgccgcgctcgcggatcatctccgcgcgacgacctggcccccaagttccggccgcacctgccagaaaagtacgacggtacgtccaacccgttggaattcttgcaggtgtatgtcaccgccattacggcagcaggtggagacaccaccgtaatggcaacatattttcatgttgccttgtctgggcctgcccggacttggctcatgaaccttaccccatgatcaatctactcctaggaagagctctgcgtgaggttcgcagcgaacttcaccagtgcttatcagcggcatggcgtggaggctcacctccatgcagtgaggcaagagcccagagaaactctctggaccttcatctcccacttcactagattacgagggactataccccgtatctccgacgcttccatcatcaccgccttcccccagggggtgcgtgatgaaaaaatgttggagaagttggccacgcatgatgtggaaactgtcaccacgctcttcgctctggccgacaagtgcgccagggccgctgaggtccgggcatggcactcggacccacaaaacggggttgtccagacgggtggctcgggtgccgtcccctgggacggtaaaaagaaaaggaagaagggccgcgaccatgagaggccgcagtctaccgcgctggtcgttgcatctgcgactgggggccagggcgaccgcaacaaacgcccacggccgcagaggggtaacagcggctcatgccctatgcaccccaatagtcgccacaacgccgcggagtgtcgcgagatcatcgacctcgcgaaatgcgtcagcgagcggcgcgagcagacctccaaggacggctcccctcctcgacgccgacctggcaaggaaagggtcgacagtggcgaggtggccgcgggagaaccggacctcgggtatgagtcgcccgagggggtcctaaaggacgttttcaccggaaactccaactctggcgatgacaactagtcaggccatcggggagaccccgtccttcctagtctacgaggccgaagcatgtcttcccccagaaacctttatgggctcctcacgggtccagtattctaacgaatctgtgcaggagcggccacagcgtaaggatgtggactctttccttgcacgcagggggcaagcagcgacctaaaatgcacgttgcaaccaggcgcccaggctactcacggttcgtgcatagtagggaaccctgggtcgggacctagccctatggcgagtactgaaccaagaagggtcccgtaaactctcccccagctggaaggacccttcaaggtgacggaaatgtgccgactcaggggtaaccaccttgctacagctggagtacctctccctaacccctggagcatctctgtaagttctatccataggagcaagtctgaggggttgagtttttctcccttttgtaactaggttgtgcatacgtatgcaccagcccggagaggtccgccctcataagcccatcatgttggcctgcacccatgcatgtcgagttacaaagggaagatttaccccctcagatgtgctctatgacagttttatcctcctgagtccatggttttatcctgcagtttctggatattattttttatctaacccacccgtgcagttcccatctgttccggcatgatgacatctgaattgagtagccagacctacagtttaggacccctctacaaaagcagggggtccggtagcctgggggctggttctaaagaacaggagctcattccatggggtggtccggagcagtgtagccgcttagcctggttccgtacccaaagcctgcacactccatcactctgtgacgagcaccctagtacttggagctatagtcttgtgggtccgacaacctggggtctggctctagagaatggatacttgtctcctggggtggtccggagccgtgtagccgcttagcctggtcccgtaccgtaagcctgcacactccaccactctacgacgggtgtcctagcatttggaaccacggtccagggggtccggactcacaacttggcttcccagactaaaacctgcatgtcccgtgcatgtatcaaaggatggctaatgtcagacgatgggtcctatgggtgtgctactaacgctccctagctgaagctatgttcaggtctaggccccagtcgaggctgcctcctgagggtcgttgacaactcttttaggtatgctggtgtccagcctcgacacgtcgagcctacatcctaggggggccaggtaccagggaggagtcggcagcgccacacacaacagggacaaatagtatgcagataagtgctaatactactcgataaatagtactcaaaaagtaccttacaaaaacaaagtattacatctgccttcaagtggggccctagccttatgtctacaggtatgacctactcgacatcagtagggtcgcgctggaagcacgcggccgccatctccacggcgtacgacgtcttgtacgaccctctgggcgacgtcttcagcatccggcagcaccgaagccatccaagccgaagatatggagccgcagcatggctcgcttcccaccccaaagatttgggggcgcgagggatggagccacagctcagcctgttgtccaccttcacaaggctggtgaacatccttccctccgaatgctggaggaagaagcggaaaggagcgtcgcccccacggacatcctgtggaggtaggcgatgatggccgcctgaaggatgaagcagggcgcgaagtgctgaggttggaggccaagcccctccagcagcagcacgaagaaagacgaaatcggcagcgccaacctgctggggaggttagagacaaagaacacaaactctccggtggtgagattgccgtgaggagaggcaccgacacagatccttccggcgaacgccggcacaccccatccgagcaggttgcgcaccaagttgagtgccacctcgggctggaagcgctcgggaggatctagcaaggccacggtggctacggcggcagaagagcgcgaagaactcaagggcgaaagggcgctgcgagtgatgagaatggctaccacgctcgggggagtccttttttaaagagagattcccccaactgatgccccgaagtgacgcagaagacctcgcccaacgcgcatcgaggtgacctagtctcagacacgggggcccaggcccacgagtcatactcattgggcgtcgccctccatgtgcggagaaggcgaaccgccgcatgaagagcacgccaccgcctgcggtagtgcgcctcttcatctccgccgaaagcagcggactagtacctgacacgggggtcggggctgacaagtcatactcttcgggcgtcgaccttcgtgtgcgaagaaggcgaaccgccgcgtgaggagcacgccaccgcctgcggtagtgtgtctcttcacctccgctgaaaccaacagcctagtctctgacgcgagggcccaggcccacgagtcatcctccttgggcgccggttcctgggtgcagagaagtcgaaccgccgctcgcgctagtaccgtgcctcctcggggccgccgtagaagacagagaaagtgaattttcaaaaccaatgcagcggtatcgaggcaccccgcgcatggccctgtaaagccatcaagtgcggagaccatgggtcagtcaaccgcggggacaggcgtgatagttggcatgaccagaagcgggctggcagtaattgtgtcagcaagcgcacagaagcagcgtgccaatcgcaaagtacaagttttggccccacctgcaggctcgtatcctcccctgaggtgggcccggggccattgtcgggaccctggaacaggggtaccccttcctacttcctcagcaacgacgacatcaacttcaccatacccgcggggcgctacgatgggaccatctccatcaccagcgagatcctgtcgaacctgcccccgacgttcgccggcttcgaccagctcgtgaagatgttcgccgacaaaggtgtcggtaccctagaataggggtaccccttactacagtatgaaggcacggtacccacacagctatctttagtcgcgcgggaaacagcgcccaaccccaccacgtgggcggctccggggccgccacatggccagaggagacaatctactctaaggtgtcaatggtgggtccagacccctacgagaagtgtcagacccctaggtacacaaaccagacccctgggacgggtcccagacccctcaggaggggtccgagctactcacagtagggtcctgagattccaaggaaaagaatacccaagccttaatcaaggtcaggcgggggtccggtgctgacacgtgtccggaccataccgcgagcgctcccactccccgctcaggtggagacccgatgctgaaacgtgacctactgcccgtgaagtaagccagcgggcggagctagatgtaaggcctctaggccgcacatttattgcggaggaggcgcgccacctgacaagctggcaggtgatgtgtcgcctcagcattaaatacaccctgtctactccactgacaagcgatgtgtcgcctcagcatttaatgtgccctgtccactctactggcggacggcggccaggccatcctgcaggcggcgtgcccgtccgctccggtggcaggcagtacgcccgtgttgctgcatacattgtgctcatcatcactcatacgtttccagtgaagcttccgctgcacgctgatactacgcaggctgcggatatcaggacgtaaggagaatgcactggcgaccagcattagtggttccaagtattacatccgttgtgtcactaggcccgcatgtcggggctcagcacccttgtacgtgcccccttcagctataaaaggggagacacgcaacattacgacctaagctcactcaagctcactcagacacacttagacccagctcaggctcacaagctcactcaagctcactcagacacacttagacccagctcaggctcacaagctcactcaagctcaatacatcacacagtggagtagggtattacgctccgacggcctgaaccactctaaactcttgtgtgttcttgtgttcgttcatcgcttaggagacaggcaaaacgcttaggcccctcctcatcttaggatttagggcgggtgcattccgccacccggccggagaatttcctctccgacaaaagggttcgacgccttcgacaggatcacgtcatcgagcacgcacaacatcgggcactcatactgctcatccttcactagggatcacctgccgtccagcaacacctctgatatggacccgtcgtttgccgccatgctgcaaaccaaatgcaagtcgatgaatgacgacaacaacatggtgatgtaggacttcaagacccccgacatccttgataaccgcta

SEQ ID NO: 1111 - DNA, 20191 bp, Zea mays
  Intron number 1 from transcript GRMZM2G020663_T01 (locus G RMZM2G020663) derived from phytozome v7.0 (chr-ID 4; pos 1 17952672 to 117972862 reverse strand)
gtgttggcggcggtcagggaggtgcatgtcgagatggagcccactgcggaggagcaggcgcttccggtcgacgcacgagagacgccgtccgtcgactttgaggggcctgaggatctgttttcggggagggggtgcacgcggccgtcgaggatctcaggctcaaccatgcccaggacatagctatggggttttcaccagtggcggaggacggaaaagattgaaggtatggctaaatctagcaattttttttaccaaattagcttattatatgattatgatcgtcgttgtataaataaaaaaaatttatgataaaatacaaagatacaaatgaagtttaactgactaaccgagtgataacacgctttaatttcatctaggagagtaaaagtttgcagctcctctatcaccgccatcggaccaaaatgttagcaaatctacaatcagccaccatcaattgtttaccgaagtatattaaactattaaacacacatgccaattaatttgtaacacagttcgtggcaattgacacttgtttctgttcaggtcattagtcattccaggagataggagatgcgctggcgcgctggccagctgccaccgtcacggactcgatgacaatttcagtactcgtgcttggcagtgaatggacaatcgtggtgtcgtgagagacgagtgcaggcaactaaacgattacgtagagtagcagctctcgaggcctagtaacttgtaacactctaggttccacaaacaacccggtatgctactgtactacacttccgacgtccatatataaaatttcggcaacatcccctttgcaagattgcataaaagagggagcaacagagtataaacatatatcatgactaaaacatactaagtattattactcggctagcaaggaaagataaacatacgacctgaactgaattaaccagtgcgcacgaccatataaaaaaataaacaaacttcctttgacaataagtttctaattaaatcatggctgcacctgggcagcgttattgtgagagtgaaagtggacgtgctgctactcccctcattcccaacatgtatcaagtacctgcattgagtaatgcaagagtgagatgacacatctcagcaagtaaaataatatcaaacagtttaaccacataagaacattgttttaccaccacttaattccacaacctccttattacgaaggtgcagcacgtatacaacgtacaacgcacctagttaccacacctcgcaggtagaaaccacaatagtaacatagtaatgtcacacttcatatattcctcatgagtgcaaatgtctgcaaatgcaaggatgacttctgccttcatacctctaaggatatgaagccgcatcgtacccctcctcgggcaacgtacgatgctaaaaatgtaccggtacggtcggaccataagatcacgacataacttcaaaatgcaagatggatgatacgatgtgcatgtcatgcctacaacacttcatataacatgattcaaaaagacacttcaacttcatccagatgggaatcaaccacatatatcattaccaaattatgatcatccacaatattagacaattgagaattaatacttccaaacaaataaacttcatcatagaattcaatgattaacataattaaaacttatgcatactcaatgacagggaataggatgcaaaccaaacggtagcaaccaccactgcatttacttgcctttaccggaagttcgggcaaatccctaagtacgatccggaagtccaccacctgtttttgacacccaatttagtacaccaatttcacataatcaggctcataagtgacaccgcacctacgcacaaactcaaaccccgccgcgggttacatctctccctacacccaccaaactgcagcggcgctgcttaataatttcataactttaaaattatgacagcagtggtaacaaacaaaaactccagaggcatctacataaaattccccacaagttttgtatacaatttataattaaattccaatatctaattagcccaaaacagtccacaagatgaaccctgtaatctgtttttctttgtcttttggacagcgacatacccagattcaaacagcgatatcttttaaaatataattccaaataaagcacataagtactcattggaaagataagacaaatccctacatgattaccatactggttaacactaattacccacgaaaaattcccagaaactgctaataccactgctgttcacccacctgaaaaatctgtttttttggacagcaacataaccggattcaaacaacgatatctcctgaattataactccgaatcgagcgcataagtacttgttggaaagataacataaagccctacatgattctcatactgattaacactaattactcccgaaaaatccccagaaactgctaatactgctgctgttcatccccctgaaaatctgtttttttgacagccacgtacccggattcaaacggtgataactttcaatttataactccaaattgagcgcataaatactcgttggaaaggtaaggtaaagttctacatgatccccaaactgatttcccttaattcctcacgaaaaaaacacagaaactgctagactactgctgttcacccaccacctaaaattctggacagccccctctacccaatcgcaaacgcaacctctaatcaattaaattgcagcgcaaatgaacaagggatgaacacaaaaatcaccttggattctccccctttccttcctcccttcttccctccaccaaaacgattgaagactcgcaccacgacgacgatgatccgagcggcaaggattgacaccttgggaggaggggattgagagggggggcggctagggtttggtggctgcaagaattgagagaggaggagatgggcagggggggcggtggccaaggggaaagagaagtggggggggggggcggctgcacatggggggagggggttaggagggaggcggctagggtttgggagggttaatgggccgaaactccaattgcggcccaactaacccacgcgacagctcccgaccgcaacgcaagcgtcaaaccaaataaattctactgccctagttgtgaatgttttccacaaaatcccaaatccccaaaacaacaaccggatgaggaaaaaaaacaaaaagaacaacccccaatttctcttctttgcaaaccgggtatcacactctacccctcttaaaaagaattcgacctcgaattctgacgcttctatcggaacaacaaaagaatggttaatgaatcaacaaaactcacacataaagaaaagttcgagtatttctgccgcatcagctcctcaagctcctaggattctaagatacgcagcagacgacactctagagtctgctcttgctacacaggaatcggctctagctcgatttgatggtctggattccgcaaatacttcctcaacaaaaagacatggaatacttggtgtactctgatcacagattccgacaattacatgtgctaagcccagctgccaactcggccaagatagcagacggtcctatatacctcggaccaagctttcctgacaccaaatcaatcattgacatatgaaagtacttcaaggaatgtatatatgaatgcaaggcatataatgttcctataggctaaaccaaacttagccacacaagagcaacttcaagagagcaacttaatgcttgcatatttctagatagcagcacagcggttaattgttttgctcctaactcacaaaaatatgcatcgaaaattagtaaactaggactttatggaaaacttataaagtccactatacccttggtattatcatcacaacaagatttgacacttagaaaggtcaaacagtgctaaacgtaaattctgtccagacttggacataattcaactactcaattcaaaaatccataattggagtctcaatcatccaattcaggtgctcccagactttttagaaagctagtagaattgtctataattcatttataaacatatcaagttaattcaatgcatattaaggtcaaaagacacgagaaaggctctgctgtccaaatttggacagattcagagatcacacttaaaacagctgtaacttaacttatagatctccaaaaaaaattaatccaaaatttgttgtaacgattaaggaaagtactacaacttatttataatttataataagttattcgaagtttaaattgggcaaacaaggtcagcttcgaaatctgtatagaatctgcacagatttcaagactggatttgagaaaatcataactcccaaactactagacctatggtcatgaaatttttacacaagtaagataaataagttggctacaacttttatatataacatctctacagaaaagatggtttacttcactgaactagctgcataactaaaactggtcatgcagtcccaatagcaagcaatagattttatcaggttcattactcttctaagattaagcgttcattgaaagactaataactttaggttcttcattacgagacacctagaacaaatataagtatagaagcaatatgataactttttaaatcatttaagcctaatctcacatcatgcaaacaagaatcaatttaagcatgttatgtctgcccacatattcatccaagcaaattctatacatgatatcataactccctgcagctaacaaaattttgcaaatataaactcactaaaaagattataacattccctagaacttttattataatgagtgtctcggaattggtttccaaaccgataaaacaatgcaactcttttgtttcaaaactgataagattgaaacaatggacaactaaaattcaaaaacctataactcctgctatactcaacttaaactacaacgaacacgcgttggaaaagttttgaaaattgtccatgacttttgcaataaagttgcacccaaatttatccttatagcccacaactctgcatgacctacagctaaactcagcctgagatactgcacattagagattcgacttatatccgggcaaccacctctccaaatctatttaacagacagttacaagtaaatacccattaaaaaggtactgaaaatacctacaagttttgcttaaagagaattcgcaaatttgtgctctgcaactatcaaaacgcggtcgatttattggtgattataacgacgcctaaagttcacacacaacagtgcaacaacttcagagcaacctaactccaattatatgcaatgagaattagaaacccatactctttgaaaagatcatgaaattactaaaactttcataatccacaaagaccaaattataccgtcttcaatgtctactattccgtacaaaattaaagactcactctgctagagacaccaacaaagatgttttaagaaacccatatctctcaaatgtttagaccaaacatggtgattaagcatcctatggaaagatggagaaacatactacaaaacattctagataagtgaagcctgattcagcctccaactaatttaaaatgcctcccgaaaccaaacaacacattatcaacaataaaaaaacaatataaaatgaaacccaagtcattgacaggtgccatcaacactaggattttccactaccaaactgggatgcaactccacaaagtctttaaataacactctaccaaataggttagaacactaagcacaacaatcaatgaattcaacaacctcgtttgctaatgccactaaggtcaaacatccatgtaccgacaatgtatgaaacacctgacatacccgtctccagctctataaaacatggttgttattacactagaatccaactactagaaatctccaaaactattctgttgacgtgaagcaaatggtgctcatgtcatataacatcttttccccctctcaaaagagataaaatttgcaatactcataaagcaatggagggataacaacaagaaaaaaactaatgtacttcttgacacagactcatgcaaaagcttcataaatattactttcaacactaaaataataacacgatactatgctcaacaggagtaattggacttcaataagataatccacctaacccaactactttgattaacctcacatacaacaatactgttggggtcgtgcttcggtgcgccgaaggtctcacacgaagaagcagcttcggctgaagtcgtctccaagagatggctggaggtccctttttatggagcttcggcgttttaaaccgacatagagatagaatgacctttttatacatataggtctgagtcaatgctgtaaactttcgcaaggggcataattgtaatttgtcacaggctgcgacctgtgcctataaatagatgaacagtacctctgtactgttcacgtgaacctgtcatttgctttcacatcacgcttgtacttttgccttccgcaggaccgaaggtacatttgtaattcaaagtcatttatattcattaatacaagtagagataattctatgacaatatttaaatgtttatttcatattctatgatttatgtgaatgcttcattcttcgttgttatgcttacgaaggtatgtccttcgtaaccttcgtccgagatgctttatatcccaaagggatatatcgttatggaggacgaaggaccttaacacttaacattttttgtgttgccttgttcttaattcttagcatttgagaacaagtccccaacattggcgcccacctccggtcaactcacttccacctttctgagctgatggcttcgttcaacactcaagctggagctgcttcggcttcgaagctggtgctcccgataacaggcggttcttgctcagagccagctaacaaaaagcagaagaaggaggctcagagaagggtgcagcatgttggagtgcagggaccctttattaagtcaaaatggtctcacattccaattaccttctctcaggaagatcttcagctcaaggactatcctcacaatgatgctatggtcatttcttgtgtgatcaaagggtttctggttcacaatgtcctagttgacacaggcagtgcagctgacattatatttgccaaagccttcagacagatgcaagagcctgaagacaagattcatgatgctacgcaccctctttgtggcttcggagggcggcagattgtggcactcgggaagattaccatgccggtaaccttcggatttgttaataacacaaggactgagcaaattgtgtttgatattgttgacatggaatacccctacaacgccatcattggtcgtggtaccctaaatgcttttgaagcaattcttcacccagcttatctctgcatgaagataccttcggaccaagggcctattgctattcatgggagtcaggaagctgccagaagggccgaaggaagctggactgattccaaggcaatccataatatagatggagttgaagcttgtgaacagtacaagttcaggagggaaaaagcagcttcggctgatcagccgaagcccatgctgctgtgtgaggatatagcagagcagaaggtgctattgggctcgcaattatctgaagatcaagagaaaaccttgataaggtttttattcaacaataaagatgtttttgcatggtcagccaatgatctttgtggagtgaatcgggatgttattgaacattcgctcaatgttgacccatccttcagaccccgcaagcagaggcttcggaaaatgtctgatgacaaggccgaaggggctcgcaacgaagtaaaaagactcctaagtgcaggagttatcagagaagtgaagtatccagaatggctagctaacactgttatggtgaagaaggccaatggaaagtggagaatgtgtattgatttcacagatctcaacaaggcttgtccgaaggatgagttcccgctgccaaggatagactctttagttgatgcagcagcttcttcggaactcatgagtctcctggattgttactcaggctatcatcaaatctggatgaaaaaggaggatgagccgaagactagtttcataaccccaagtggtacatattgctatcttcggatgcctgaggggcttaagaatgctggagggagtttcagcaggatgactgcgaaggttctccaatctcagataggcagaaatgtgttgacctatgttgatgacattattgtaaaaagcacgaagcaagaagaccatattgctgatctgcaggagaccttcgccagcttcagacaagctggtctgaagctgaatccagaaaaatgtgtcttcggagtaaagaagggtaagttccttggatgcttggtttcaacaaagggaattgaagctaacccaaataaaatcgaagctatacttcgaatggagccaccaaccacaagaaagggggcccaaagattgacaggaagactggcttctcttaacagatttatatccagatcagcggaaagaaatctacccttcttcgaggtgctaaaatcagctgaagtctttcaatggggcccagctcaacaaaaagctttcgaagaactcaagcaatacctgatagatctaacaacattaactccaccaatgccaggggctcctctgttgttgtatgtggcagcttcgcactcagcagtaagtgcggcacttgtgcaggagaagtttaatggacaaatcaagaagcaggtcccagtatattttgtatctgaggtccttagtgtctcaaagaaaaattatacagaactggagaaggtgttgtatgccgttctaatggcatccaggaagcttcggcattattttcaggcatataatattattgttccttcttcgcagccgttgaaagatatcatgagaaataaagaagctactggccgaattggaaaatgggctgcggagcttaatgaattttacattgattatgtgcacagatcctcgatccagtctcaagcattggcagattttattgccgactggacgccaggggctcagggcgaagaagcgaataaagatgccgaagcatggacagtgttttgtgatggctcctggggaaccttcggagcaggagcagctgctgttttggtttcaccgtccaaggttaaaacttgctatgcagcaagactggacttcagctgcacaaataatattgctgagtacgaagccttgctcctgggtcttcggaaactaaaggcgatggggatcaggagggcgatccttaaaactgattctcagattgtttcgggtcatattgacaaaagttgcaaggctaaagacccgaagcttgaaaaatacctagacacagtccgaaggatcgaagcttccttcgaaggattttctgttaagaatatccctcgagggcaaaatgaacatgctgatttgttagccaggtctgcagcacaggggctgccgttaccttcggatgtattcttcgaaacaataaaggcaccttcagtggagttacttgaaagagcagttcttactatttctcctgtgtacagtgaagattggagaactgaaataatttcttaccttcagggcaacttcctatcagatgacgaagcttataataaaagaatagaggcaagagctcgtccatatatcattatagaaggggagttatacaagcatggagtttgtgccccgctgctcaagtgcttgtctagagccgaaggtatagagttgatgaaggagatacatgcaggcctttgtggatcccatatcggatccaggccgttacttggaaaagtgttccgtcaaggattttattggccgaaggcagcttcggatgcagctgagttagttcaaaagtgcgaaggttgtcagaaatgtgcaagagatcaaaaacaaccttcgtctttgacacagctaatacaacccatctggccattgcaaaggtggggcctcgatttgctgggcccattaccaccggctcaaggcaatctgaaatatgttgtagttgctgtggaatatttttccaagtggattgaggcgaagccattagctacaataacttcggccactgtccaaaaatttttctggcagaatattgtctgtcgcttcggagtgccgaaggctataactgtagataatggaacacaatttgactccgaagaattcagaaatttttgcgatcaaattggcacgaagatccactttgcgtcagtcaggcacccggagtcgaatgggcttgttgaaagggccaacggcatcataatgacaggaataatgaagttaatctttaatcaaccaaggggaaagtggccagatcagcttaccaaagtggtatggagccataacacaacaacatcaagatctacaggctttaccccatttaagttgttatttggtgacgaagcaataaccccggaagaagccaaagctggatcaataagagtggtagcttcggcagaatcaggtcccgaagatacttgtctcgtggaaaaagatgccttagaagggatcaggcttcaggccgtggagaatatcaataagtaccaggctgaaacagttaaatggcgagatagaaaggtccggctaaaaaatattgagccaggacacttggtgcttcggagagtggccaatccggatacagtgggcaaattgcaactgaaatgggaagggcctttcttagtagcatcttcgtcaaggcctggttcgtacagactgaaggacatggatggcaatgaaattccaagatcttggaatgcggatgagcttcggcggttttatgtataattcgatgtaattttgacttttcttttctttttcatggcacccttttcctttctaaagggggagaaaggtttttaatggggccatcttatgtaatttcctttttagttttataagagcaaaatcccccaaagaatgtaaatgtaaaagctgagagcgcaccatcgagtgccgaaactaaaaaagagaagaagctccaaagacgtccctaaggggatgcagagcttacagcgaaaagtcaacgctgattccgccgaaagtaaaaggcgaagaagctccaaagtcgttcctaagggaatgcagagcttataccgtctaagtaaaagacgaagaagctccaaagacgtccctagggggatgcagagcttacagcgaaaagtcaacgctgatactgcctaagtaaaaggcaaagatgctccaaagtcgttcctaagggaatgcagagctgacgtgtgtttgctcctaagaaaatgatggatgagtgtggcttcggacatacgcttcggacattcatttgcacattacatcatggcatttgcatgcataagcattcattcatagcatttgtgttcctaaatggttgcttcggcacagagaaaagtttcggataaatggtttgttatgtaaaagaaaggtttcgaagaagtggttttttatgaatcgttgtgtataagagtagcagtcttttatgttttgctatgtaaaagctttggcagaaagaagaagtagtcttttatgtcttgctatgtaaaagcttcggcagaaggaagaagtagtcttttatgttttgctatgtaaaagcttcggcagaaagaagaagtagttttttatgttttgctatgtgaagaaaagctttggcaaaaagaggaagcgaccgtttaggcttcgttgtgtacgaaaagaagggaaggtgttttttcgccttcggctcaaaatactgatttcgtccacatcaaagcgactcaatcgaagggtaaggatatattacaaggtatgtacaaagttccttgagaacagttcaattgtatttacaaaacttgttacaaaagtatcctgagttttttcctatagtacatttctactgatcttcattaagcttcagcttcggcgacagtttcggcgacataacttaggcatcatcttcaccttcgtcatcctacataaatcaaggaatcgtgagtaaaaatcaagtgcaaagaaaaaggtaagtacgaagtattatctcttactggttcaagatgacttcgtgcttcatctccagccttctcccgcccgccttttgtccatatcatttttataaatctattggagatacttcgggcaaggtcaggcatatcatccaggattgatggagataaggtgaagttgggcctgttgacaacttttccatgttcgcagccggccttcagaaatgcagcagctgtaccccgagaagctacccaggcacagaagtcgccgtgcccagctataacttcgtcaagctcttcgatttcagcttcaatatgatcgaaggcctggggtaaattttccgccgaagggttaaatttcccactgctggctccaacagagtaaaatatcttctttaatcgtccaatacaattattgccaaagttcaagcatttgtcttgaaggcttgttaatgctttcttcaattctgagctggtctggacttcggctttaagcttcgaattcagttctagcttctcctgatcaaattgttttgattgattgataagcttcgaatttaactctaatattttagcctcagtttcagccagcaagccttcggtcgattggagctcgaagtctttcttttcaatgatggcagtttgctcttttattttgctttccaagttttcaattatagcttcgtgctttttgtcctccaagtcttgttgcatcttcagagctttgctcagtagcatgctctgaacagaaacaacttatgttaagtaatattttcattgttaacggcaataaaaaccagagaaaaaggttgtttaccttgaagttagaataaaacaagctgccgacgatatgttgtcgtcggtagcggctgatgtctgtctctagcttcggaaaaccgatactcttcgatagagtaccgattaccttagctccagtctggtctcgaatacagcctagtttttcgtcatctacacccccaaataggagggcacctgacttgtagccgcaagacttggcgtagtctttaagttcttctatttcgtccttcgtcagtttttgcccaactaagtgctggaaagagtaggcttcgtcgtccgaagggtcttcggctatttcttttcctttctcaggcactgtggccatggttttttcagtagtagcaccagcttcttccgcagccatgtcttccaaaatcttgttgatattctcaatcgtggattttaagtttgtatcttcggctgtagcggcttcggtagccgcgacccccgaagctacgccttcgacgattgctgtaccttcggcagctgccgttttttggattgacgcccttggcggcgtcttatcgataacttcagttaccgcaatgattctttgccgcttgggtttgcttgtcttcgtctgatccggctcgtccacctttcgaaaaagcttcgtcagttggagccctagtggacttagcttcgtgggcatgggttcagtcattacctttaaaatttcatccacgtcgctggtagaaggcggtgtgggggacccctcttcttcgggtgatttgcgcttcggagcagatatttttccttttttgagaattttcttctcctttgctggtctttcttcatccgtgatcggagtttcggctattctttttcttttaaggccctcggcacccttgttcaattgttcatagtctgggtattcgaagcctagggcgtcaagcactcggttcaaccttcgtttcggtcgggcaccgaaggctgccgtcattagttgatcctcttttttggagtagttccccaggatttcgttgcacatcacttcaacagtctctaaccattctttgcagggttttttgaagaatttcttgaacttgaaataatagggaagccggacaagctccccctccttcttctctccctccagcttcggcatttcccactcttttagagtagggaaaactctgaatgccaagaattcctgaaccagatccctggtgccaatatgttttgagataatttcaaattcacccagagcagcccaggtgggaccttttaggtcgccaatgtggcatcgtggccttgtctctccgaagattaactctaaagggctttgtaccagtttttctttgtcttcgtcaacttttacataaaaccactctgatttccaacctgctggccatttgctccggtagctgatgacaggacattttgttgtcttccggtaggcaaaattataacagccgaaattatcatgtagcccatcttgtctggccttcgtttggtaatgtaattcgtgaactcggcagaagctgtcggcaaatggttccatagcctggcttcggagagcccagatataaacattgagcctaacgatggcgttaggagtcaattgatgaaaatagatgccaaacttcttcagtatctctgcaataataccgtggagagggaatctaagcccagcttttaaaaaactcttgaaaataacaatctcatccttccttggcttcggggtggtttcttcttccccgaagcggagtagcttcttctggtccttattgaaataacctgctttcaccatcttcgaaaggtcagctttggaaacagttgatttcccaaaatccaggtgactgggcttgctgggcatagcaaagtgatagtcatcttcggagtcagtcccttcaatgttttcttttccttcggcagttgttgggcctgcttcagcagcaggcatttcttctgtagtcagcagaccggaacgctgcattgcttcggagatgggcacagtgtctgaaccttcggcttcgtctccctcacgtacaactttggcagtagatcgtattctcgccatttgattctaagtttgggaagtcaaaaactttttccttttttcttttctccgaagctcttctttctgacgaagcagacgttgagaagcaccttcgttcgattttgggacttaagcttcggctatgatggaaaatttcggcagcaaaacagtgcaaatagcaatgaatgctgtggtaacttcacaactacttgtcagtttatatagtgctgcaggtaagaaggcgaagcggcggaattgttacaccaggcgcgcagtaacttgtacccgctgcgcagtggaccgcaaggatcaaacagtaactctgcaaggtgggaccgacacgcgctcggaaatcggatcgtttctccgcaacgagctcagggaaggtgttttttggaccttcggcttcccgaagctgaagaggcttttttcacgggtcaagctcgttacgaagaacgatctagcaccgcgaaaggggctactgttggggtcgtgcttcggtgcgccgaaggtctcacacgaagaagcagcttcggctgaagtcgtctccaagagatggccggaggtccctttttatggagcttcggcgttttaaaccgacatagagatagaatgacctttttatacatataggtctgagtcaatgctgtaaactttcgcaaggggcataattgtaatttgtcacaggctgcgacctgtgcctataaatagatgaacagtacctctgtactgttcacgtgaacctgtcatttgctttcacatcacgcttgtacttttgccttccgcaggaccgaaggtacatttgtaattcaaagtcatttatattcattaatacaagtagagataattctatgacaatatttaaatgtttatttcatattctatgatttatgtgaatgcttcattcttcgttgttatgcttacgaaggtatgtccttcgtaaccttcgtccgagatgctttatatcccaaagggatatatcgttatggaggacgaaggaccttaacacttaacattttttgtgttgccttgttcttaattcttagcatttgagaacaagtccccaacaaatacctcctattattacacttgaacaatttgtacctagtgatgtcataggatgaattcaaagtagtagacatacatgatctatcaaaccatcattcatataataaaaatctccatctaatgcaacaaccacatcattatagagatagatgactaacaaacataagcaacttccagttaaacattttgtttaagataaagcggtccaaataataattccacaagcatgcatagagaactgatcatataaaaaaactaccatgtatcatcggcgattaaaaacaatataaaacgggttgtccatatcgtccgcatgactagcctccaacaaataaaaattatgcataacctttttggctatagaaacaaaccatagaaggaaaacatgcatgcctcttcaactataatatagacataaaatccacttgaaatcaccctatttattattaaagataaggttgcacacaataagaaaacctatcatgtaaacatggttggacttatctacccacgtcatcttgcaaattcagttgagttcttctagtctcaagatttcatagacagtacaacattgcctttgcactatggagacaaacctattgtactctaagatcaagttggcaagtagccacactagccaaaaaaaaggtgaggtgtaaagcactgcacccatggaaatattacattgataagttgggttgtaacccaacagtcaatccaactcaacaacaccataaaacttcattgtatagtgttttcacactacaccaagtcggattagatcctctatacacaagctcaataaacaatcggtcctacaagtactagaacccaagaatccttttggaaaaaaaacatccacagtcaagcatatagaaatatatgatggtaatagctcagagattagtaaacattgcatcccaaaaaacatcatgacgatatgtatataaaacaagtacattagtagcttcactcgcataataatttcaataacaaccacatcaagaaaccaatattaaatagaagtaacatttcatatcaagcattacgtcgttaacgacatacctcatcaaaccataaaggggtttggagtaaggaaattctagtcatctatacaataaaatactaatatgaaagatatatgaacccatacccttcctatatgtgcaagtgtgtcaaatttatcttcaaattgcgtagaatctaaagcctatcctctgataccaactgtaacactctaggttccacaaacaacccggtatgctactgtactacacttccgacgtccatatataaaatttcggcagcatcccctttgcaagattgcataaaagagggagcaacagagtataaacatatatcatgactaaaacatactaagtattattactcggctagcaaggaaagataaacatacgacctgaactgaattaaccagtgcgcacgaccatataaaaaaataaacaaacttcctttgacaataagtttctaattaaatcatggctgcacctgttgggtctatgcttcgtcgccgaaggtcttgtaaaaagaagtggtcctcggatgaagctgtttgtataagatagccgaaggttcatcttcgtaaagcttcggcattacaaaccgacttaaagatagaatgaccttttagtccataaaggtctgagtcaatgttgtaagtttttataaggggcatacttgtaattcttcacaggctgcgtcctgtgcctataaatagtgaacagtattccgttactgttcagggattcaattaattgcaatcgcatctctcggaattcaattctttgccaaggcaaaggtattattgtattcaatgattttgtatattaagtaaatgcagtgtaattcatctatgacatatttattcctcttataccttttattttatgtcattttataatctttaccggaattttattacgaaggttcgagcttcgtaattatgcttttatcaaccttcgtccaggaaccattattctcaaagagaataatgtttcatagacgaaggacattaacatttaacattttatgttgccttgttcttaattctaagcatttgagaacaagtccccaacagcacctgggcagcgttattgtgagagtgaaagtggacgtgctactactcccctcattcccaacatgtatcaagtacctgcattgagtaatgcaagagtgagatgacacatctcagcaagtaaaataatatcaaacagtttaaccacataagaacattgttttaccaccacttaattccacaacctccttattacgaaggtgcagcacgtatacaacgtacaacgcacctagttaccacacctcgcaggtagaaaccacaatagtaacatagtaatgtcacacttcatatattcctcatgagtgcaaatgtctgcaaatgcaaggatgacttctgccttcatacctctaaggatatgaagccgcatcgtacccctcctcgggcaacgtacgatgctaaaaatgtaccggtacggtcggaccataagatcacgacataacttcaaaatgcaagatggatgatgcgatgtgcatgtcatgcctacaacacttcatataacatgattcaaaaagacacttcaacttcatccagatgggaatcaaccacatatatcattaccaaattatgatcatccacaatattagacaattgagaattaatacttccaaacaaataaacttcatcatagaattcaatgattaacataattaaaacttatgcatactcaatgacagggaataggatgcaaaccaaacggtagcaaccaccactgtatttacttgcctttaccggaagttcgggcaaatccctaagtacgatccggaagtccaccacctgtttttgacacccaatttagtacaccaatttcacataatcaggctcataagcgacaccgcacctacgcacaaactcaaaccccgccgcgggttacatctctccctacacccaccaaactgcagcggcgctgcttaataatttcataactttaaaattatgacagcagtggtaacaaacaaaaactccagaggcatctacataaaattccccacaagttttgtatacaatttataattaaattccaatatctaattagcccaaaacagtccacaagatgaaccctgtaatctgtttttctttgtcttttggacagcgacatacccagattcaaacagcgatatcttttaaaatataattccaaataaagcacataagtactcattggaaagataagacaaatccctacatgattaccatactggttaacactaattacccacgaaaaattcccagaaactgctaataccactgctgttcacccacctgaaaaatctgtttttttggacagcaacataaccggattcaaacaacgatatctcctgaattataactccgaatcgagcgcataagtacttgttggaaagataacataaagccctacaggattctcatactgattaacactaattactcccgaaaaatccccagaaactgctaatactgctgctgttcatccccctgaaaatctgtttttttggacagccacatacccggattcaaacggtgataactttcaatttataactccaaattgagcgcataaatactcgttggaaaggtaaggtaaagttctacatgatccccaaactgatttcccttaattcctcacgaaaaaaacacagaaactgctagactactgctgttcacccaccacctaaaattctggacagccccctctacccaatcgcaaacgcaacctctaatcaattaaattgcagcgcaaatgaacaagggatgaacacaaaaatcaccttggattctccccctttccttcctcccttcttccctccaccaaaacgattgaagactcgcaccacgacgacgatgatccgagcggcaaggattggcaccttgggaggaggggattgagaggggggcggctagggtttggtggctgcaagaattgagagaggaggagatgggcaggggggcggtggccaagggggaagagaagcggggggggggggggggggggcggctgcacatgcggggggggggttaggagggaggcggctagggtttgggagggttaatgggccgaaactccaattgcggcccaactaacccacgcgacagctcccgaccgcaacgcaagcgtcaaaccaaataaattctactgccctagttgtgaatgttttccacaaaatcccaaatccccaaaacaacaaccggatgaggaaaaaaacaaaaagaacaaccccccaatttctcttctttgcaaaccgggtatcacataactggtaatagttcctaacatgtgtttttgttcattctgtagccaccg

SEQ ID NO: 1112 - DNA, 1873 bp, Zea mays
  Intron number 2 from transcript GRMZM2G425647_T02 (locus G RMZM2G425647) derived from phytozome v7.0 (chr-ID 6; pos 1 14471882 to 114473754)
ttggtggctttgtccagcgccttgtacaccaccccgtacgtgccctccttgatcttctccaccttctcgtactgcagcaacacacacgcaggtggacagacgagcacactcaatcggagaaactgaatcaaaaaccctcaagcccaaatcgggccagattgctcgcttacctgctccattgcatccctcctcagcaggcagcgtgcatggatctcaccgcagtccccgcaccgtctattccccaccggatgcgcgcatggatctcaccgtagtccccgcctcgcagcgcgcatcgatggaaggcgcatcccacagtccccacctccgcacatcaggcccaacccgcatccttgacgaaaactttcattcacctcccatggatgcgccaacctaccatcgacgtcgaggatgccggggctttaagatgtctaaacagatgctccactccattccaaatcctccccagacagcaactgcaactgcaacttcgacctgattctggtacatcttctctactactcatacctgagtatgtacctgttactactcatacatgttagtatctactactcaatcagttcgtgcacacatccataatttcaatcgcagccgggtactttcctacttacaatacaattattatgtttgggtaatcagttttattctttaattttgattttgattttggctagatgttttggtaaccagacatagcatagcttcagtgacttattttcttcccctctaaaacgcatggctatgatatccctttttatagtgtaacacccaaacccatgttcattttaccagtccgcaaaacagttgctgggaggcatgtatttttttcaaagtaatcatccccagtccgcaatttagactaaatcaaaactgtcgttgggatgcattttcatttttcaaagtaatcatccccagtctgcaatttagacaaaatcaaaatagttgctcacttcagctctattagacagtagttgaaagttttttttaacatgcctcaacatagatgacgtcccattactactgaagcaaaaaaaaatattgcaaggttaaacactcgggttaattgctatgtctcggtaatcagttttttgtttaaatttgatttagtctatatgttttggtaaccatacatagcacccttagttgaatcagttttttttgtttaatttcatgaaacttgacagatgatctacaaagccatgaccaatatctttcatgttaattgaattacaaatattgcatttaaccctttcacaaaacataagtattgttgctgggaggtggtctgtttttgccaaccgaatggtctctgttgtgtgctccatggcactgcagctgtccattatattttggatctctgaaaattttggatgtgatctgccagctaactgcttgaactttatatttgtgatagggtaataagtgctactggtttatgtgtctggttaatactatgaatcattgtatgtgtaataaatatgtttaaagtaaatatctgcgcgctcttatatttttacttctcaatatgggctcttatcagttgcttacatatgtgtgtatgcaccaaaacaactggatatttgacaagtgattcacgtgtggtcatcatttgtcgagatcgctagcgctcgctatatcttcaaaggaagcctcacaacgcgccataggtaatgtaatcatccctgtcagttcaatctgtctaatctgttaaaaatgtttagttagatttgggtaacttatcaaatgtgaattgactgttcaattctatttgagtagtcttatcatagttgaagttttgcatattccatccttgcttcgaggagcagtgggtgatattccgtggaaaagacggaag

SEQ ID NO: 1113 - DNA, 3608 bp, Zea mays
  Intron number 1 from transcript GRMZM2G067511_T01 (locus G RMZM2G067511) derived from phytozome v7.0 (chr-ID 3; pos 3 8428467 to 38432074)
ggaggccttcagcctcttcgacaaggacggcgacggtattcgccacgcccccgctctctctctccctgtgtcccgacgtgcgcggcttgatgtggtatagtagattcgcgtcacggaagcgacgggggatctcacatgaccactggtgtgtcagtggcaactcgcatcaagcggatcgcggggtaggtttttttttggtctcggagtatctcgacatgcagatgcagatctcacgccctctttatctcccgcgggttatatcacgttacgactagtgcttgcaatttctgagtcggatccccaacggggagacaaattgcttttgaccccggagccgcgtggaggtgacatatgtgtgatcttgtggaaatttggacgcagatcgaccggatggccgggtgggtgtagtacccgacgattggaggttctgtagaatcccagccaaggaatcattccacatcatgagagttccctcattatggtaaaccggcatagggatactaggaaacattgaatcatgtgaggaggtggtagaaagcattcgatcgtgtgaggaggtggaaccagtgcgggtagcatggacatggtggcggcggatgctgctgtctgcagcttggatgtagcgcagggcgcactgttttgtgatcctaattgtgggaagttatgagaacatgtggagtcactagttagtcggcaggaatagcttgaaggtggtgaactctgcaacatggtgcaatcatatggcaccatgggggttgtaggggcatgatgagtcacttgccagtgggcatgtgcatggcagggaagatgatgtgtggtgtgtcatcggcgcaaggcatatagaatgaattagcaggtattggagctagccactgggtttcggttacatcacgtcgcattatgatgtaaaggtgttagcacctttgatgttttgtgggtaaaaggtgcaagttccattaggctatgaccagcagatcgtgcatatgaccgtgcaaaatactgttttgtacgtagactatactgtttatagagtgaagtttgaaatagtggatggggatgagtaagatgctggagatagccttacgagtttatggttcatcccctcacaatttgttgtaccgtgattgtgtgctcaaagcgaattgttcattttactgttggactaattggcaaaaaaaacttagaactattgctttgtgctaaagaactgatggttgcaagatttgctaaagttagcaaattttgccatccaccatttgcatgttgtaagcaaacaacaccataggcttttgttccccgtcatgctaattgatgggcatggctgtaggagtaaatgacatctatatggatttattgcagaagtaatactccctctattccaaaaagaatgcaactatggttgtgtgccagttaaagattaagtttttagttaatagtatttaatttatagctccaaattactttattatgaaaatgtgttttataattaatctagttgtatttatttgatatcataaacactgatactttttttaaatataactggtcaaacttaagatattaaaaacatgacattgtgttacagttgcattctttctgggatggagggagtatcgtctaatgcttattgattttaaattgtgaagatattgagtggactgatgaaaatagtaagatcaatattgcatcaaagaagtatagcttacatctagatagaaaaatcctctttgaagtttgttgcttgttaagtaccgctctcctactgattggttttacctggattttgttcatttctctttcatgtaacatatcgaagttgcatttaggttaagaaaaaagttatctagctgagaaatgcactatcaagacctataaaactttggtaacatttgttttattgggagcataactgtttggtttcatgctatcactgactagttaaactcgtttgctgatgtatagaattcccatgtttcatgttcaccaggttctgaatggatttagttagatctggattaacacataatgttaccaagttctttgactgtccctagccctagtcaatagctaagaacaagaacatgcagagaattgacaagcctagtaattttccggttgggttattttcttatttgtgatcatgcccttagtttctacagtcttgtatgatgctttgaattgtcgaatctatatgctataaacatagcaggtagcagcagaagcccttaagattatagaatacttcaaattcttaggaaatctggctcagtgagtttaccagtcaaatgaatcttgtccgtttctttttttgagctgccttgatggggcatatgctagcataataagaagatgaaaaaaatcaaggcaagaggaaatagatggacttttaactaagaagaactaggcactcaaattcaagttgaagaggactaaaacctaggtttggtagtgtgcagtcactgagtctgcttgcataacgtggaaaaagggtggttcatatggcacccttgctgccttaaaaatttaggagttctgttgctcatctagtatggcattaaataagtactattcttcatacagtaggtattgattagcatgcttaatatattgaactgtagcaacttttcaatgcgaagatagtcaaacattcattgcctcttcaaatctctatggatatttatatgtgcactaatgttattgaaatcatggagttccgttgtagtttgtatcccagtataatatgaaccaaaactcttagcatgttatcaataagtgcttgataaatttgagttaatgtttttatttaaaatagtttttcatgaattctaacacctgcaaactgtaactcaaataattatgccttgggtgaaattcattcctagaaattctaggttccatttgggtttccttttcatctcttgaacatttccttccattctgataaagaaaagctaagtagatccctatgttatttaggttgttgactaactccattcctctaactgtgttagagaagttctgttggatggcacagttaatttcttcatggtttgctctcaactgttatattgctgcctactcgtagaacaatagaagtgatctgtacctcttaaatacatcaatttaaaatgtcagataaagaaaagtaggacatttatccttataataacgttggtacctgtttgtcagtttgtagaggtgttatcctgtagcaccagtagtctcctggtacttttctgcctgtgggcaggtacatgtatttgcctatcgattgtaataactctcagatcacattgatgattaatactttttgacatgtttgttagtctttatagtataagaaaccatgttaaagttgaattttttagaggacattgataacatgattgctattactgttgagtgttggcaccatatcatgattagaatgccgcttcagaaaatggtttaaatctttaagctgacttcctcagacattttacctgttagtattatttatcattacttgattgtttattattatatcaatttaagtaatttgtgatagtagtgagtactgtttggctcatttaacaggctgcatcaccaccaaggaacttggcactgtg

SEQ ID NO: 1114 - DNA, 3780 bp, Zea mays
  Intron number 1 from transcript GRMZM2G476933_T01 (locus G RMZM2G476933) derived from phytozome v7.0 (chr-ID 3; pos 8 8529914 to 88533693 reverse strand)
cccgcacccgacgggtggaccaagaaggtagggggtcacgacgacctgctgcccgaccgcctgactgcctgtctctctgctcgctcgctcgctcgagttgcctcgtccgcgtccaattcgggggtcaataagcttccggggagcggaattccggttcccggccgctaattcgcgccgagttctagggttcccgcggtgccggtctggcgttcgagagcctcccagttccggatttggggctctagggtttgcgacgctgcccccggcctaccaccgccatccagctgggattcgtggccccgtgaggttctggacctcgatttcagctcggagtaggtgcgtccagagctcggccacgaggcccacgactgcttgagctctctgctccgtgttgggtgtaggtccgtaggtgagctacggaccccatgcccggtctgtactgtgaagattcgtaactggggcgctcgattaggattagggactgtcggggggctagctgaaccgggggaagattcctaaatctggccgtgatatgtcgctgtttactttctttgtttgctcgctgcactacgtttgctgctagtgtcttgctacttgtaggctggggctcttgcaattaggggtggtagggtttggcccatcggtttccaaatttcatattggtcatttgatgattggttaggagttacagctctttcgtttggactgaaatgctgcagttcctttttcgtacagaaggtattacttcagatttaggcggttgattctgcttgagtagttgtgtgctttgtagtgaggctggaatggggaatccccttcagcttggagctgattctgtctgagtagttgtgtgcttgtaatgaggctggaatggggaatcccctgcggcttagagctatagcaaacgctgccaataggagctttagcctacccatttcgagttggaccttgttttctttatgataggttatatgatccagtgttttcttctgtttcggcttgaaatgcttcatccattactttagattaatggttgatgttacttgagtagcagtatgttcgtagtgaaagctggaatggggaatctcctgcagcttggaactttggcaatcagccagtcacttctactagagctttagcccctgatttctaattggatcttcgattgttcgttattagatggtgggttaactttttttcgtcctgacttccaatgcttcagcaattacttcggattcaggtggttagcattgctttactagtagtatatgtgtagagaatctggaatggagaatgttctgcagctttaagctgttgatttgctgtaattggggtttgtcctacacaattccagtttgatgttgattattagatgatctgtgcttagtgaatctggtcatatcatggtctgtgagtttaattttactgtggttagttccagtattgctagaccaagtgcttgttgagctatttcatgcaagaaatgaaagcttgatgcaacagaacacggtgctgccacattaatatgagctccatctgatcagatgtacatgtaatatcacatgaatgcccacttgaaaatcttaaatactcaagctttgagtttaggctgttaatttttcattatcggatgtatttttatggttgtcttagtatcctttttcaacaggatgacagaaaagtgccaaacaaacttattagcctaggagatacctgttctgcatagtttaacattattagtttttattcctagctggagactgatggtgcttcataggatttactgttggtattctgcattattggttgttgggatgcattgtttcatgctattattggctgcaatatcttgttccttattggagggaagcattgaatatctcagacagttgatataacttgtggtctaggtgtctagcatgatctatttctgtttctagctgggcaaaaccgaactttgaatgctggataaagttcaatgttggaatcatctaaaaacaggcttttatctggaaatagttcttgtggattgcacctttaatgccttatgttatcgcgttagtttgaccatttaagatgacgttctaattcttgttggttacctatttttttatttagttgttaactgtttgcatgcttatccttctgctggtcacatagcaaccggacacgtggtgttcctaaatcagccactaggttggctcttgtttgttgtgtccaatttttgttattgttcaaacttcctaataccaatagatgttatgatcaattttcttgcattattttgtgcacatttccattttttgttggttttgcatctctgttatgtttattaaattagtttctatataatgtgatgttcaaaattaacaacatatttgttaacggaaatgtatctgaagtgggtggtaagggttttagaacactgtataaccctgctttagagtttgctaaggcattcaaattctccattataaggccgttattttatttctgctgatgaccttctacaaaactaattttgctagttagggcaacgactaatatgtaagcaggtactaggtgcaagtgtgcaagcagacattttgatctgttagatctagatccaacggtatgtcatatttagcacttaaacccttccaccaccacctggtgtagctttataaaaaaaaccctaacaaaccacagttgtaccccccgttggattcagatctaacagaccaaaaagtctgcttgcacgcttgcacctagtatttgcttgcatattagtcgttgccgctagttagataccaacaaagcagtatcacttctattaagctgtgagattaactgtttttcctgtccatttctgtaaccattgtgaaaatcaatctgctagtggtgacaccttatctctggtaagctgtctcataagtttcacactaatattcatatgaaaccttgagtgggttgaaattggtttctggctaattttccatttactttagccattttttttggtcgtttgagtcacattgactgtagtgcaaaaataatgtaactgtctttctgcttcttaggtcactaaatctgaaagcacttcctgttgagtctaggttctgcctgttttcaagttctattcctgttagggcaatgcctagtacttggcacagttagcatacttccagtctagttcatgtgagaggaagatgcaactgattatgatggtgaaaaccaagaatgtaatgtgaagctaaaactctaatactatctctgtatcagtgtaactgtcctgttcttctttgttgtttgtgatgcatttgactgtctctaagcattctgccttttactgacccacctgtgccctagtcgttcttctgcttcgcgatatttacatcagtacagttttcccacgcgttgttaatgtgtacctggttgtggagccagcagttttcccagttagtggtgcctctgtctgttgttcaatacataatcctctgttaatgactacctgattatgatgaatatctgaacattaggtggtcctgaggctattaccattccacaaaacattgttttcctagtagcatgtccatgtgttaccctatctttttttccctaatgtttcaaaggaatacttctccttttctctttgcaaggaattacaaagagctgttagtaggcacacatttctttcattagttaatgtgtattttatggggatatctgattgggaactaatatacattcctttttaatgttacagtttactcccttgagaggggggagatctgagattgt

SEQ ID NO: 1115 - DNA, 26042 bp, Zea mays
  Intron number 8 from transcript GRMZM5G851815_T02 (locus G RMZM5G851815) derived from phytozome v7.0 (chr-ID 4; pos 7 9077699 to 79103740)
gagctgggaattcaggagtacagctcttttgggaggtaattgtttcactccgaacttataacacaaagatatctgaacttctcgtgttcttcatattattgtgcttttcctctataacatacaacataatcatgatttcttaaaaaaacaaaagtgcttctatcatttgttttctatcacagctgtgaaagagcttctagctgagttggttaggtggtctcaatagcactcctcaggttctaagttcgagtccccatgggagcaaatttcaggttgaggtttaaaaaaatcctctcgtttgtcccacgccaaagcataggactaaagcctgaccctgatcgtggtcgttgtcacatgggctacggtgccactgtgtatgagtgagatagagatttgggggtttcttaatctgtgtgagaaggtcttcttctcgatataatgcccgagatctgtcttacccccgcaggttgaggtttcttttttctaccacaattgatatctattcagtgttattctcagtcaccacttctttttccaacattggctatctcctgtgaactagttaaaaaaaagcttgtcccttgaactccttgttggaatgcgaacccatgaccctaaacagggttgggagtggtattaatagacttagtaaatgggtcaggcccattacagtgagggtgagacggtaattacaaggggaacaccccaaaccctagacgggtagtctaacaccccccacagtcacaactctatcctgtacagatgttgagactggatcgaaagtctaagaatacactcgacggtagccccttggtgaagatgccggcgaactgcagcgtggtggggacgctgagaacccgaacgtcaccggcagcgacacgctcgcggacgaagtgcaggtcgatctctacgtgcttcgtgcgctgatgctgcacggggttggtggagaggtagaccgcactgacgttgtcgcagtagacgagagtggcgcgctgaaggggactgtggagctcgtggaggagctggcgcagccaggaggcctctgccacaccgttggccacgacacggtactcgacctcagcgctggagtgagagacgacgggctgccgcttggcggcccaagagacgaggttggcgcccaggaacacggcgtagccggaggtggccggcgcgtgtcgggacagccagcccagtcagcgtcggtgtagaccacgagctccgacgtcggggatgggcggagtaggaggccgtagtcgagggagccgcggaggtagcgcagaatccgcttgagcgcagtgagatggggctcccgcggagtgtgcatatgcaggcacacctgctggacggcgtaagcgatgtcgggcctggagaacgtgaggtactggagcgcgccggtgagactccggtatgacgtcgcgtcggcaaccggaggcccgtcgtcctcagagagcttcgcctgagtgtcgacaggcgtggagcagggcttgtagtcagacatgccagcccactccaggatgtcgatggcgtactggcgctggtggaggaagagaccctgaggccgtcattcggcggtgatgccgaggaagtggtgtaggggccccaggtccttcatcgcgaactcccactgaagggcgacgatcgtgtggtgtagaaggtcggcggtggatgccgtgagcacaatgtcatcgacgtagagcaggaggtagacggtgtcgtcaccgcgccggtagatgaacagggacgtgtccgacttggcctcgacgaagccgatggaggccaggtagtaggcgaagcgactgtaccaagcccgtggcgcctgcttgaggccgtacagggaccgattcagccggcaaaccagatccggacggtcagcgtcgatgaagccggtgggctggctgcagtagacagtctccgtcagagtgccatggaggaaggcattcttgacatcgagctgatggatcgcccagtcgcaggagagggcgagggagaggacggcgcgaacagtggcgaacttgacgacggggctgaaggtctcgtcgtagtccactccggggcgctgggtgaagccccgaaggacccaacgggccttgtagcggtcgagggagccgtccgaggtcagcttgtggcgaaatagccacttgccggtgaccacgttggtgcctggtggacgcggcaccaggtcccaggtgtggttggccaagagggccgcgtactcctccatagcacgacgccaattgggtcggcgagggcagtgcggacggaggagggcaccggggaagcgtcgggtggagtgctagacgtagcagctgccaggatcagccggtcgacggggcggagaacgccagcagcgcgccgagtcaccatcgggtggacgtgcccggggtcgcggtggatggcgaccgggtggtaaacggacgactcggagtgaaccgccggaacgtcgagagcggcgggtgtggccggctcgcggcggtgatagacgacggcagggtcggcgaagcgggccgcgctcgtcgacgggcccgagtcgggggggcgccgaggtagtggcgtggccgcggcgatggtagacgagtgcggggttggcgaagcgagctggggtcgacggggccgcgcgtggcgcaggcggggtcgacggggccgcgctgggcgcaggtatgattgacgtggccgcgcgtggcgcggaagaggtcgtcgtggccgcacgaggagcaggtaacggcgcaagacggggagccggaggtgggggaggaatcggatcggactcgaggagggagtcaagatcggtgggtggggtggagccagcatggggaaacacatcttcatcgaagatgacatgacgagagatgatgatgcggtgggaggtgaggtccagacaccggtaccccttgtggtcaggagagtagccaaggaatagacagcgggtggaatgaggagaaagcttatgaggagcggtagcggaagtgttagggtagcaggcacagccgaacacgcgaaggtggtcataggaagggcctgtgtcgtatagggcaaagtgaggggtagggtggtgcaccgccttcgagggaagacggttgaggaggtgggtggcagtgtgcagggcctctgcccagtagctggcagggagagacgcctggaagagaaggcagcagagcatattggtggtggtgcggatcatgcgttcggctcggccgttctgtgcagaggtgtaggggcacgagagacgcaactggacgccatgagtgaggaagaaagaacaagaggcgttgttgtcgaactcgcggccattgtcacactgcagagcacggaccgagcgacgaaactgagtggatacccaggtgaagaagtgtgtgagggtggggaatgtgtccgacttcaaccgaagcgggaaggtctagagaaaatgggaaaaatcatccaaaatcaccaaatagtatttataaccagaaagactgagtacaggggaggtccaaagatcacagtgaaccaggtcaaaagcctgctcagcccgagaagaggaagtagtaaatgggagacgagtgtgtcggcctaactgacaagcatgacagaggccctcaaaatgtcccctactacatgaaggatctagactactggtaatcttggtcaagacgtcgggtccaggatggccgagacgacgatgccaagtggtggaggaggtggtggagaccaggacgggaggtggagacacgccggcggtggagggctggagcgtgtagagcggtcccgagatgtcacagcgggcgagaggggtcctggtggccagatccttcacagaaaaaccagaggggtcaaactcaatggaacaggagttgtcagtggtgaaacgacggacggaaaggagattgtgagtgatgtggggagctacgagaacatcgttgaggtaaaacggcccagggagaaccgaggcacctactgaggtgactggcagagtggaaccgtttccaacgacgatcgaggatgggtgagaggaaaggggggaatgagagcgggagagcatgcctgcagtgggagtggtatggtaggaggcaccggagtcgatcacccagtcggaggagggaggggtcatcgccatggtgctgaaagcagcagtgagggaggcgttgtcccaacctccagctggcagggaccaagtcgtcgaggtgggggtccccgagggcaggagcgcgggcggagcctggggcacgacaggcacaccgtacggaggcggcgggggcatgccgtagtgaggtgcagtcaggagggtcggcgccgagggacggggggcactcggtgcctggcccggccacatggcgatggtcccggtccaggggttgtagaaggacggccacgcgtggccgccaccccggccggagggaccaccacgagagggtccgccacccccacggccgcccttgctggagcgacgacctccgtcggtcgtggaagtcggacgaggggttgtcgggacggcgggtggaggggggggcaggagccccggtcgacggaggacgggtggcctggcccccccgaaggcggctgaccgctggtaggagcgctgtagagagccgaggcaggagtgggcgcctcatgcgccatggtgagctcctcgaggagaagctcattcctcgcggcgtggaaggtggggaagggcacgctcctcttgatgagagccttcaggtggccgtagcgagggctgaggccacgcaggaggttcagcaccaaggtacgatcggcaactggctcgccgagatcgcggagggagttagccaggccctttcatctggcggcagtattctcccacggagaggtccccctgagagaacaggtggaactgggcgtcgaggtggagtgcccgagcatcccgattcccgaggaactggtcctcgagagcgagccacgcctggcgcgcagtgtccgcctggtcgcggatgatgtccggtagctcaacggtgatggtgccatggagccacgagaggacaacgctgtccatgaggcaccaggagcgaggcgacggagtgtcgtggtcgacgaggacgtgatcgtcaaggacgaaccgccgcagcgtgagaaggacctgtcctcgccaacgggggtagtgggaagacgcctgaaagtcgcctagagggggggtgaatagggcgaaactgaaattctcaaaaataatcacaactacaagccaggttagcgttagaaatataatcgagtccgcgagagagagtgcaaaacaaatcgcaagcgaataaggagtgagacacgtggatttgttttaccgaggttcggttctcgcaaacctactccccgttgaggtggtcacgaagacagggtctctttcaaccatttccctctctcaaacggtctctcggaccgagtgagcttttcttctcaatcacttagaacacaaagttcccacaaggaccaccacaagattggtgtctcttgcctcaattacaagtgagtttgatcgcaatgaagaatcaaagaaaaaagaaagcaatccaagcgcaagagctcgaaagaacacaagcaaatctctctcactaatcactagggtgttgtgtggagtttggagaggatttgatcacttgggtgtgtctagaattgaatgctagagctcttgtaagtagttgaagtaggaaaacttggatgacttgaatgtggggtggttggggtatttatagccccaaccaccaaactagccgtttggtggtggctgactgtcgtatggtgcaccggacagtccggtgcacaccggacatgtccggtgcgccagccacgtcaccaggccgttgggattcgaccgttggagcttctgacttctgggcccgcctggctgtccggtgtacaccggacaagtactgtagattgtccggtaccgtctcgcgcgtgcctgacttctacgcgcttctggcgcgcattaaatgcgtctgcaggtgaccgttggcgcgaagtagccgttgctctgctggttcaccggacagtccggtgtacaccggacagtccggtgaattatagcggagcaatttcccgaggctggcgagttccagagccgctcttccttgggcactggacactgtccggtgtacagcggacagtccggtgaattatagcggagcgcctctggattttcccgaaggtgaggagttcagcgtgaagtcccctggtgcaccggacactgtccggtggcacaccggacagtccggtgcgccagaccagggcacacttcggttatcccttgctctctttgttgaacccaacttttggtctttttattggctaagtgtgaacctttgacacctgtataacttatacactagagcaaactagttagtccatttatttgtgttgggcaattcaaccaccaaaatcaattaggaactaggtgtaagcctaattccctttcaatctccccctttttggtgattgatgccaacacaaaccaaagcaaatatagaagtgcataattgaactagtttgcataatgtaagtgcaaaggtcgcttggaattgagccaatataaatacttataagatatgcatggattgtttatttaatttttgacattttggaccatgcttgcaccacatgttttgtttttgcaaattcttttctaaatccttttcaaagttcttttgcaaatagtcaaaggtaaatgaataagattttgcgaagcattttcaagatttgaaattttctccccctgttttaaatgcttttcctttgactaaacaaaactccccctaaataaaattcttctcttagtgttcaagagggttttgatatatcaattttgaaatactacttttctcccccttttgaacacaataagataacaattttaaatttatcaattgagaatcataccaaggggatgggtccgcgcgtctcctcggtgcccggcccgcgcgtctcctcgcctcccgcgcgcgatccctcatcccatgcgcgcgacccctccactttccatggcgccgcgccccccaccaacggtccggcgacccacctgcctacgccggccaccgcccacaccatatacggcggcgccgcggcttccccccgtccatcgtcctctgcccgttcctccccttccctggtttcgtccacctccgccacccaaggacggtccaagttccagcggtggagcgggagtgctcgagatcccctgttgacggtcttcctcctcggtcctgggccggccggcccctgttccgcgacgtgttgcttctccagcgcgcgccacctgctccagcaccgtgtgcctcgtctccgagggagccctccccacttgagaccgtgacgtcgtctcctcaccacaaggaacgacaccgtcggtttcgtggcctggagagagcgctggagacaacgctcggcggtgggtggaccagagtagaatcaagaaattcgaagaagcgccgcctacgcgcactgcgggcacgccgtccagtgccaggagacctcgccggtcgttgtttcaactgcctcgcggaggaccaccttgctgcatcctgccgccttgggccaagatgtttccgctgcaaggctcttggtcatcgctcctacgtctgccctgggccagtgaatggtgacaagatttttcctgtccttcgacgacggttgaagggggcggtctggagtatgctttcgacagtcgcgccagcaaacgtcgaccgtggggcgacggtgcctgtgtcgcagcaccagctagctcgggcctcggtctgggagcgacttgtgccaccaacacctcgtccttgtgagaagacgcgtgtcagtgtctggcgtcgaatctcccctccaggcgttgagaagggccaggcccattttgagaggatgaatggggcagtggatgcgcgcgcaattgttactccttccagcgacgttggagctgctgctgcttctgcctcgcaggtctccctcccgccccgcccgcgacgcagacgccatcgaaagcgcaagtcatcccctaggggtggttctgatccgggttgtggacaatctgatcaacctggaaatgaagagacccctcaggatgttcccagccctgtgcatcttcagcacccttgtgtgataggctggaatagtttgatggacaaagcagaagaagatttgaacgcagtctctatctttgtggtcagtgatgtgcttgtgccggtcgccgatatcgcagatgcagttgctcaaaagcttgaagtcaattctgattcgctaatcctgaggcaattggctcatggacattttctgctcatgctcccaccctccactccgttgaccagctgacatcgagatggagcactattcgtgcaggcgctttctccctgcactgtaaaagatggtccaggttttttggatcctcaggtgcaagtttacctatccctgtggaattcgagcttagtggcatcccaattcatgcctgggaactttccactgtccagcacattttgaaccctttcgcctgggttcagaaggtacatgaggagactcttgagctcaagaatttggaggcctttcgctgttatggttggtgttatgatttggcctcaatccctcattctagagatctctggattactgaaccgctgggaataggaccatgcgctgaaaggctatctcttgcctatcgtgttcagattaaggtgttggatggaccacgtgttgtccctgaccccatccaaatcccaacagatatgaatggttccacacgtcagaggcggcgtttccgttcgcgttcgccaccaggggaccgtgatggccgaaggggttctacggaagacagcgtacttttgggcagacgttctgctcttgaacgtctaggcccacggtccgaagttcagcctaggaaggaaggcgatgccagtcagtgtgtccagacagctggaaactatgagatattggaggagtcctcggcagtggagatcactgctggtatacctgcagatcttgttgctgtcccgaatttagctgctgtctggggtaccatggcttcggcctctgagcatatccagggtcccttggcccctgttgatgtactcgagaccgtggagcagctggtgcccaatgctgatgatgatgtgcatgctgattctattattccagccatcaaccgaccgctacttactttagaagaaagtggtcttcgcgctgctgtggttccagacactgtgcctgcccagggcacccctcaccctgttgacacgcctttgtccgttgagccgcaggacgttaccaattttagcggaggtggcacccctatccaccttcaagaccactctgacagcagattcaaagtaaagcctccctgtttcaaagtctactcgcgaagaaaagaagtccaggcagcggtggcccagatgacagatgttgagagggctgaaaaattacaagaattcatgcagattgttaccaagccagctacaaggctgttggctgccccccccccccccccccccccgattaccaagcgaaagaaagaggaagaccctgcccaatgacttcaatccaagaagaagcagaagggtggctaaactgccaccggaactgggcaatgaatctgcagctacaatctgcaggcagctgggattttgtgatgatcaggaacatatttccttcgaagacgcccaaaagtatgttcacctttttgatgcagcactttccagagagcatgttgctgccatggcagcattatttggctgggaattgcctggggaagaccgggctcaaaactgattggagggggtgtaggtcgtgcttcttttgtgtaccctgttataatgcagcctgtttttcttatctggaatgtaaggggcctaaatgacaggtctaggagagacattgttaagtccttggtcctgagcatcaaaccagcggttgtctgtttgcaggaaactaagctaggctctatctcagcctttgacatcctgtctattcttggtgctggttttagtgattttgtttactccccagcgcaaggaaccagaggtggtgttttggtggcttgtagagatggagtctattctgttattgagagtttggtgcatgatttcacagtttcagtcaagttgcaagaggaaggtggtgcccagtggtggttcactggtgtttatgggccacaccacgaccctctcaagctttcgttcctccaggagcttagggaggtcagggagacttgcgttggcccttgggtaatagctggagattttaatcagatccacagctcagaagacaagaacaataccaatataaacagggcaatgctgggcagattcaggagacttatccatgacctggagctaaaagaaatcccgttggtaggcaggaaattcacttggtcaaatgagagaaatgtccctacacttgttaaactcgatcatgttttctgtacagccagctgggaggagatccatccggattgtattctccatagcaactcttcagaactctctgaccattgtcccttagctctgcatcttaatgagaatgtcaaagggaagcgaagattccattttgagagtttttggaccaggtttccagattttttggagacggtggctacctcttgggagcagccagttatgatttcttgccccttggaaagattggctctaaagttgaaaaggcttgcaaaggctttgcagtcgtggagtcataaaaggatcggaaatgttaaatttcagcttagcttggccagggaaattttgcacagacttgagattgctcaagacaatagactgttgtgtggggacgagatatggctgaaaggaaggcttaagcatcactgcctggggcttgcatctctggaaaggacaattgctagacttagatcgcggatcaaatatttgaaagagggagatgccaacacttccttttttcatctacaggcttgctatcggaaaaagcgaaaatttatctctgaattagtgcatggggaccagatcgccacctcgcaagagcaaaagcaggaggtcttgtttgattttttctccaatctgttgggggtagcgaagcagcttgagttcactctggatttggaggtttgccacagtgctgatgttgatcttggggccttggaccttcccattacagaggaggaggtccgggccactattgctagccttccctcggacaaagccacggggccagacggatatacgggaagattttataaaacttgttggcacataattaaggctgatctgatggcggcagttatcaccctgcaccaaggtaacacacgcaaattgtggatgatgaattctgcgtacctaacacttatccctaagaaagttgatgccaaggcagccggggactacaggccaattagtcttattcacagcttcgccaagttggtatccaaagtcttggctaatcgcttagcaccgcaccttcaaaatttggtggctacaaatcaaagtgcctttgtcaagggtcgttccattcatgataactacatgttggttcagcattctatcaaggcctttcacaggaagaagatcgctggtctgtttctaaagctggatattacaaaagctttcgattcagtgtcctgggcctttctcctagaagttttatcccatcttggcttcgggcctaggtggtgtggtctcgtgtccaacttgttatccacttcttccacacaagtgcttttgaacggagctcctggggattatattcgtcattggagggggctgcgccaaggcgaccccttatctcctatgcttttcataatcgtgatggatgtgcttagtagcttattcaagcatgctgaggaaagaggattgctgcaggacctggccatcagaaacgtgaaatctaggctctcgatttacgcagatgacgtggttctttttgtcaagcctgcagttgatgatcttatttgtgtcaaaatgatcctggattgctttggagaggcctcgggcttagtggtgaatttgcgaaaaagttgtgctatccctctcagttgtgatgatcagactgttcaggacagttgtaacattttgcagtgcaacccggcttcctttccatgcaactatttggggctgcctgtttcggataagaagttagggaggagggaccttttgcagtgggttgacaagattgctaaccggctgccccgttggaaggctccactacttaaccttgcgggcagggcagccttggtcagattcgtgctctctgcaatcccagtatatcttctcatcgccatgaatgttcccaagtgggttatcagtgctattgacaaaattcggcgaggtttcttgtggaagggtagaaaagatgtgaaaggtgggcattgcctagtggcgtgggataaagtcaccagaccgttggaccttagtggacttggtatcccaaatctgatatataagagttgggcgttgcaagctaaatggctttggctctccaagactgacccgaataggccttggagtggattggatctccctgttcagtcacaagtaaggaaactagtggccagttcgatgtacactaatgtgggaaatggcaataacacccttttttggagggacagatggataaatgggtgctctatcgttgagctggcacctgaagtgatctcaaaggtggataaaaagtttgcctctaccaggacagtgcatcaagccttagagggcatgtcgtgggtcagggacatcaagccaaccctctcccttatagggatacaacaatatcttacgctttgggacaccctgggtgagatcgtgctcacttctcaggaggatcaccatgtgtggagattcgagtcttcgggccttttctcttctaggtcctgctacaaggttctgtttttgggctccatcaccttcgaaccttggaaaagactttggaaatcttgggctcctcctaagtgtaagacctttttatggttagccatgcagaataagtgttggacagctgacaggctgcaaaaaagaggtcttccccatccggaagcatgccctttatgtgatcaagagcaagaaacagttcagcatctgatgactggttgtgtcttcgccaggcagttttggcatagcatcctctccccctttggtatgggccacttaactccaggaccagaagatactaattttgctgattggtggggactagtgaccattcaggtgcacagaagcaagagaaagggagtcaacagtgccattattttgggagcatggtgcctttggttgcatagaaacaaagttattttcgatggagagttaccaaccattggcaaggtgcatagaagtttcatcgacgagctatccttatgggtgctggctggtgccaaacacctcggaagccttgggcttgctgctgctctaggcgcagcaggcccgacctaattttttccttggtcgtctttttgtatcctagtcctatggatagttttatttatgcttgttgctggccaccatagggtggttttttgtactggtcctcttggaccttaatttccccttcttaatataatgatgcgcagctctcctgcgtttttcgagaaaaaaaaagaatcataccaattgaaaaactctttttaaaattaggtggtggtgcggtccttttgctttgggctaatactttctccccctttggcatgaatcgctaaaaacggagtcattagagcccttataataactttctcccctttggtcataattaaataagtgaagactataccaaagacggagtccttatctccccaaagatggagagttgctcggagtgatggcgaaggatgagttacggagtggaagcctttgtcttcgccgaagactccaattccctttcaatacacctatgacttggtttgaaatagacttgaaaacacattagccatagcatatgaaagagacatgataaaaggtatataaaggagctatgtgtgcaaatcaacaaaagaagttcctagaatcaagaatatttagctcatgcctaagtttgttaaaagtttgttcatcaagtggcttggtaaaagatatcggctaattaatctttagtattaatgtaagaaatctcgatatctcccttttgttggtgatcccttaaaaagtgataccgaatggctatgtgtttagtgcggctatgctcaatgggattatccgccatgcggatggcactctcattatcacatagaagagggactttggttagtttgtaaccgtagtccctaagggtttgcctcatccaaagtagttgcgcgcaacaatgtcctgcggcaatgtactcggtctcggcagtagaaagagctacagaattttgcttttttgaagcccaagacaccaaggatcttcccaagaactggcaagtccccgatgtgctctttctattaatcttacaccccgcccaattagggatggcaacgggtcggattcggatcggatattgaaaatattcacccgcagtcatatccacggtcacatataatatccgcccgcgattatatccacggatagaaattcatatccatatccatgcccatcgggtttcggatatccatcggatatccatcggatatgataaaccattttcaacaattgaataacataattaatcaaaatgcttcctaattcaacatcatacacaacttaaaattgaataaaaatttaaatatacatgtccttcaacaagcaacattctcaacatgacaaaaatacatgtctacatgtaacatgtctcaacatgacaacaaatacatgtctgtttttggccttaagccttttgattctgatccgatccgagtgtagtgttgtgttgagcacttgagctagtcaatgatagtagaatcatgttcatcctggcaaacaacaaaatagataaatggttaaatcaatgatcagattcgataatcaaaatataagaacatactaaagagttgaatcatgttaccatttcttcctcttcatcctccaaacaagtcattagtgcatttataaaacaggattggtcgcctaacatgtcagctcgggcccaagcttgcatacacatcaacccttctactgtttttggagcaagtctactacgatgtgggctaattactctccccccagtactaaagacagactcagatgccactgttgtaacaggaattgccattacatctcgagcaatttttctcaaagttggatacttgatccctgcatattgccaccaattgataatgtcaagctcttgagttcttggcagtgttggctcctccaagtacaaatccaactcagtccgtacaaaggttgaatgctcttctggttcctcagacaagaatttgtcaaatatgccaaacataaggtcatcaccttcattgaggacaacatttctatttgatgtccctacaccatcagttgttgccatgccctccattgatacttgatattccaataccaactcatacaacaaagagcgaactctacacacttcattgttggttctttgattgtcttccccataaatggtgctatagaaagctttcacaaacttcaatttgtatctaggatctaaaacagtagctacctccataagcccatgaacatctgtccaatactttttaaatttttctttcatcaatgctgacatctcttctaccttagggattgcactagtcctccatttctcaatagccaaataaataccacatattttagggaaaaaaaggttggctgtgacataatttgttcctgacaatagctcagttgcatcaaaaaacatctttagtctactacaaagctccctagcaaattcccaatcctctgttgttggcttaaatgaagtacaaagtctttctttacttgcaaggcggtcaaatactatttgatactctagtgcagtgctaagcataatataagttgaattccatcttgtcttacaatctagagctatacttttatcatatttaacattcatttgagcagctgtgcgttcaaaacgctcatgtctttttggcgtggcacaccaaaatgcaacactatcacgtaccctttcaatgcctttatccataacagtcattccatctttcacaataagattaatgatgtgtgctgcacaacgcatgtgtaacaatttaccatctagcatgagggagacgaggggcaacttatcttgcatagaactcatcaaactatcattggtcgtgcaattatcaagagtcacagtcgacaccttcttttctattttccaatcttgtagtacctcataaaggacatcacttataacttcaccagtgtgtggggcgggcacatatatgaacctacaataacccaacatatcgatttaagcaacaccatcacaacaagattataagactacagtagagaacatgaaacgaaacaaaatattacctcaaaagaaaagatttcagcttccaattatcattgataaaatgtactgtaaccgacatgtatcctttcttttggtggtttgctgtccacatatcagtagttacagcaattcgagattggcactgttggaaggaattcactaaagaaagtctttgcacctcatacatatccaatatgtcttttttaatagtgtttctggacactactttgaaaaggggttgtagtgctgcacaaaatcttctgaacccaacatgatcaaccatagaaagtgggtactcatgcacacagatcattagcgcaagttcttttctagcaactacttgatcaaaaacatacttctcaaccacagctcctcccttctcatttttgcccaacttcaatattgattgctttaggcctttttgacactgcttagattgacaagtttttagatgactacgcaagtgagttgtgccagatttactatctccaacaaaatgctttttacaccaattgcattcagcttttaatttgcctcctactgtcacttgttcaaactctagccatacatcagatttgagctttcttttgcttccaacagttacattagcatcttccccagctacaaccacattatctgtacctccatctataggtgttggagtaccagcagcagcagcacttgaggacggtgtcggagtatcagtcgcaacaccagcacttgttggagtagtagcactagctctgtttgagatctgcctacttaaaccatcttgtgaggagggtggttgcgagccagagccaattctagacgtcatcctgctaatacatcacatgtcaaaactgaaccaaattggaaacatcaaacgcagggtgaaccaaactgaacctgaaggaactgacggcttgcctgggtgacggcgtgtaggcgtgtaggcgtagggatccggcggcggacacaggaaagaacgccctgctcggctgctcctgcttggccgcctgggtgacgggctgacggcagacaaagcgtaggggatccggcggcggggtcacggcgcgcgtaggggactaggggatctggcctgcccctgcctgggtgacggcgtccgtaggggatccggcctgccactgcctgggagacggcgcgcgtagggatccggcctccggcgtccgcgaccgcgcgtaggggatccggcctctggcgtcctgcgtccgcgcgtagggatggggatccggcctcaggccgtcaggcgtccgtgcgtgctgcgtaggggttggggtcttggggatctggctgcaggatgaaagcaggatgcctggccgcctgggtcctgggattcaagcagaaatagatcggtgccaacccaggcttcgtaaactgataagtgacaacgctattactactgctgaacggcccatgttctgacagtttcgatggatttgatagcccattgcccaattggctaccggtgctttggtgggctaaatattattttggtgggctggcgcctaggctcaataatggactaatgattaatttcggatatccaacggattatccgcgggtgaaatttaatatccaaatccatgtctattttatctcggatcggatacggatctaacccgcgggtcaaaaaacatatccatatcctaatccgtcgggtcggatatccgccggatatccaaatccacggattaaattgccatccctacgcccaatcggcatcggaataaccaattaaatcaaatgtgtatcccctaggataccaaagcccaaacttaggagtataaaccaaatatctcaagattcgttttacggccgtaaggtgagcttccttagggtcggcttggaatcttgcacacatgcatacggaaagcataatatccggtcgagatgcacataagtagagtaaagatcctatcatcgaccggtataccttttgatcgacggatttacctccctcgtcgaggtcgagatgcccattggttcacatgggtgtcttgatgggtttggcatccttcattccaaacttggttagaatatcttgagtatacttcgtttggcttagaaaggtgccctcttggagttgctttacttgaaatcctaagaaatatttcaactcccccatcatagacatctcgaacttttgtgtcatgatcctactaaattcttcacatgtaaactcattagtagacccaaatataatatcatcaacataaatttggcatacaaacaagtcattttcaagagttttagtgaagagtgtaggatcgacctttccgactttgaatccattagtgataaggaaatttctaaggcattcataccatgctcttggggcttgcttgagcccataaagcgccttagagagtttataaacatggttagggtactcactatcttcaaagccgggaggttgctcaacatagacctcttccttgattggtccattgaggaaggcactcttcacgttcatttggtaaagcttgaagccatggtaagtagcataggccaataatatacgaattgactcaagcctagctacaggtgcataggtttcaccgaaatccaaaccttcgacttgggaatatcccttggccacaagtcgagctttgttccttgtcaccacactatgctcatcttgcttgttgcggaaaacccacttggttcctacaacattttggttaggacgtggaactaaatgccatacctcattcctagtgaagttgttgagctcctcttgcatcgccaccacccaatccgaatcttgtagtgcttcctctatcctgtgtggctcaatagaggaaacaaaagagtaatgctcacaaaaatgtgcaacacgagatctagtggttaccccctaatgaatgtcgccgaggatggtgtcgacggggtgatctcgttggattgcttggtggactcttgggtgtggcggcctttgttcttcatcctccttgtcttgatcatttgcatctcccccttgatcattgccgtcatcttgagatggctcatttgattgatcttctccttcatcaacttgagcctcatcctcattttgagttggtggggatgcttgcgtggaggaggatggttgatcttgtgcatttggaggctcttcggattccttaggacacacatccccaatggacatgttccttagcgcgatgcatggtgcctcttcaatacctatctcatcaagatcaacttgctctacttgagagccgttagtctcatcaaacacaacgtcacaagaaacttcaacttgtccggaggacttgttaaagactctatatgcccttgtgtttgaatcatatcctagtaaaaagccttctacagtcttaggagcaaatttagattttcttcctcttttaacaagaataaagcatttgctaccaaagactctaaaatatgaaatattaggctttttaccggttaggagttcatatgatgtcttcttgaggattcggtgaagatataaccggttgatggcgtagcaggcagtgttgaccgcctcggcccaaaaccgatccgaagtcttgtactcatcaagcatggtccttgacatgtccaatagagttcgattcttcctctccactacaccattttgttgtggggtgtagggagaagagaactcatgcttgatgccctccttctcaaggaatccttcgatttgtgagttcttgaactccgtcccattgtcgcttctaattttcttgatcctcaagccaaactcattttgagctcgtctcaagaatccctttaaggtttcttgggtatgagatttttcctgcaaaaataacacccaagtgaagcgagaataatcatccacaataactagacagtacttactcccgctgatgcttatgtaagcgatcgggccgaatagatccatgtgtaggagctccagtggcctgtcggtcgccatgatgttcttgtgtggatgatgagcaccaacttgctttcctgcttggcatgcgctaatcctgtctttctcaaaatgaacatttgttaatcctagaatgtgttctccctttagaagcttatgaagattcttcatcccaacatgtgctagtcggcggtgccagagccagcccatgttagttttagcaattaagcaagtgtcgagttcagctctatcaaaattcgctaagtatagttgaccctctaacactcccttaaatgctattgaatcatcacttcttctaaagacagtgacacctacatcagtgaatagacagttgtagcccattttgcataattgagatacagaaagcaaattgtaatctaaagaatctacaagaaaaacattggaaatagagtggtcaggagatatagcaattttacccaatcctttgaccaaaccttggtttccatccccgaatgtgatagcgcgttggggatcttggtttttctcgtaggaggagaacttctttttctcccctgtcatgtggtttgtgcatccgctgtcgattactcagcttgagcccccggatgcataaacctacaaaacatgtttagttcttgactttaggtacccaaatggttttgagtcctttagcattagaaacaagaactttgggtacccaaacacaagtctttgaccccttgtgcttgcccccaacatatttggcaactaccttgccggatttgttagccaaaacataagatgcatcaaatgttttaaatgaaaaactatgttcatttgatgcactaaaagttttcttcttaggcaacttagcacgggttggttgcctagagctagatgtctcacccttatacatgaaagcatggttagggtcagagtgagactttctagaatgaattctcctaattttgtactcgggataaccggcagggtataaaatgtaaccctcgttatcctgaggcatgtgagccttgcccttaacaaagttggacaatttcttaggaggggcactaagtttgacattgcctccctgttggaagccaatgccatccttgatgccagggcgtctcccactatagagcatattctagcaaatttaaatttttcgttttctaagttatgctcggcaattttagcatctaattttgctatatgatcattttgttgtttaactaaagtcatgtgatcatgaatagcattaacatcaacatccctacatctattacaaatagacgtgtgctcaacggtagatgtagagagtttgcaagattttaattctacaaccttagcatgcaaaatatcatttttagttctaaggtcgaaaatagtagcattgcaaacatcaaaatccttagtcttagcaagcaatttttcattctcaatcctaaggctagcaagagaaatgttcaattcttctattttagcaagcaattcaacattatcatttggaattgaaatagaatcaaccttagctaacaaattggaattttcatttctaaggttgtctatagtctcatggcaagtgcttagctcactaaataatttttcacatttttcaacttttaggccataagcatttttaaccttaacatgttttttgttttccttaattaggaagtcctcttgggtgtccaagaggtcatccttcttatggatggcactaattaattcatttaacttttctttttgttgcatgtttaggttggcaaaaagaatgcgtaagttatcttcctcatcactagcattttcatcactagaagactcatatctagtggagaatttagatttaaccttcttctttttgccgtcctttgccatgaggcacttgtggccgatgttggggaagagaaggcccttggtgacggcgatgttggcggcgtcctcgtcgtcggaggagtcgctagagctttcgtcggagtcccactcacgacaaacatgggcatcgccgcccttcttcttgtagtacctcttcttctcctttcttctccccttcttgtcatcgcccctgtcactgtcactagaaataggacattttgcaataaagtgaccgggcttaccacacttgtagcaaaccttcttggagcgaggtttgtagtccttccccctcctttgtttgaggatttggcggaagctcttgatgacgagcgccatttcctcattgtcgagcttggaggcgtcgattggttgtctacttggtgtagactccttcttcttcttctccgtcgccttaaatgcaaccggttgtgcttcggacgtggaggggccgtcaagctcgttgatctttcgtgagcccttgatcataaattcaaagctcacaaaattcctgattacttcctcaggagtcattagtgtatatctaggattaccacgaattaattgtacttgagtagggttaagaaatataagtgatcttaaaataaccttaaccaccttgtggtcatcccactttttgctcccgaggttgcgcacttgattcaccaaggtcttgagccggttgtacatatcttgtggctcctccccttggcgaagacggaagcgaccgagctccccctcgatcgtttcccgcttggtgatcttggtgagttcatcaccctcgtgcgccgtcttgagcacgtcccaaacttccttggcgctttttagtccttgcaccttgttgtactcctccctacttagagaggcgaggagtatggttgtggcttgggagttgaagtgctcgatttgggccacctcgtcctcatcataatcctcatcccctacggatggtacctgtgctccaaactcaacaacattccatatacttttgtgaagtgaggttagatgaaatttcattaaatcactccacctagcataatcttcactgtcaaaggttggcggtttgcctaatggaacagaaagtaatggagtatgtctagaagtacgaggatagtgtaatgggatcttactaaacttcttgcgctcatagcgcttagaagttatggaggggcgcgtcgaagccggaggtagatggcgatgaggtgtcggtctcgtagtagaccaccttcctcatcttctttatcttgtcgccactccgatgcgacttgtgggaggaagtcttcttctccttcttcttttccttcctcttctccttgttgcgggactctcctgatagagctttctcgttgcttgtagtgggcttttcgccggtctccatctccttcttggcgtgatctcccgacatcacttcgagcggttaggctctaatgaagcaccggactttgatatcaattgaaagtcgcctagaggaggggtgaatagggcgaaactgaaattctcaaaaataatcacaactacaagccgggttagcgttagaaatataatcgagtccgcgagagagggtgcaaaacaaatcgcaagcgaataaggagtgagacacgtggatttgttttaccgaggttcggttctcgcaaacctactccccgttgaggtggtcacaaagaccgggtctctttcaaccctttccctctctcaaacggtccctcggaccgagtgagcttttcttctcaatcacttggaacacaaagttcccacaaggaccaccacaagattggtgtctcttgcctcaattacaagtgagtttgatcgcaatgaagaatcaaagaaagaagaaagcaatccaagcgcaagagctcgaaagaacacaagcaaatctctctcactaatcactagggtgttgtgtggagtttggagaggatttgatcacttggatgtgtctagaattgaatgctagagctcttgtaagtagttgaagtaggaaaacttggatgacttgaatgtggggtggttgggtgtatttatagctccaaccaccaaactaaccgtttggtggtggctgattgtcgtatggtgcaccggacagtccggtgcacaccggacatgtccggtgcgccagccacgtcaccaggccgttgggattcgaccgttggagcttctgacttctgggcccgcctggctgtccggtgtacaccggacaagtactgtagattgtccggtgtaccgtctcgcgcgtgcctgacttctgcgcgcttctgacgcgcattaaatgcgcctgcaggtgaccgttggcgcgaagtagccgttgctctgctggttcaccggacagtccagtgtacaccggacagtccggtgtacaccggacagtccgatgaattatagcggagcaatttcccaaggctggcgagttccagagccgctcttcattggggcaccggacagtccggtgaattatagcggagcgcctctggattttcccgaaggtgaggagttcagcgtgaagtcccctggtgcaccggacactgtccggtggtgcaccggacactgtccggtggtgcaccggacactgtccggtggcacaccggacagtccggtgcgccagaccagggcacacttcggttatcccttgctctctttgttgaacccaacttttggtctttttattggctaagtgtgaacctttgacacctgtataacttatacactagagcaaactagttagtccatttatttgtgttgggcaattcaaccaccaaaatcaattaggaactaggtgtaagcctaattccctttcaacgccggatccaacaccacggacacgagggcccggatgttgtgcaggtcggcggcttgagcgtggagagcaacaatgaggtcggcgtcgaggtcagaggcgtgggggtcctctgggggctccgcatcggcgagtgtcgggcgaccgaggaggcgctgcgtggtggccatctggtggtcagagcggcgcccagggcacgctcacgctccagggcgagggaggcagcgcgctcgcgctcccgcgaggccgtcacagcggcctggatcgtagcgagggtgccgacgagcggggagccggtggtggggagtgcggagggcgcgactgtgtgactccaggtgggtgaagcgaaggcggggaagcccggcggggagccgcgacgcaggggcagcggggaagcggcgtggatcggcccaaggccggcgatgtagggggcccctccatgggcgagctcgctgctgagtgcagcaggggcgtgcgtgccatggtcggtggtgaccccgacgttggatccggccgcagtggtggcggcagtggaggcgtccatcgggcgaagacgcagcaggggcgtctggacggaggcgcggtctggctagcggcgcggtggcctgggcgggtggcgcccgagcggcgggcggcgcggcaggggcctggcgcggttgcggctggcggcgcgacagcgtcctggcgcggacgtggctggagtgtcgaggggcgctgggccaactggcgacgcggcgaacagggagggagggagggccggcgatgggaggccggcggctgagggagagggaccggcgcaatcacggctggggcggcgtcggggcgccgggactgctggcggcgcggcgagcagggagggagggagggccggagttgggaggccggcggctggggggccggcggcggctgtaggggaggaggaagcccccggcggctgtagctgctgttggaaaacctaaacctaagctgatcccatgttggaatgcgaacacatgaccctaaacagggttgggagtggtattaatagacttagtaaatgggtcaggcccattacagtgagggtgagacggtaattacaaggggaacaccccaaaccctagacgggtagtctaacactcctaaaacttaatcgacatggttctggtcaatattttatttcttctttgatctgagcattttttttgcaggcttttcctgctggttctggtccca

SEQ ID NO: 1116 - DNA, 7584 bp, Zea mays
  Intron number 2 from transcript GRMZM2G177404_T01 (locus G RMZM2G177404) derived from phytozome v7.0 (chr-ID 5; pos 1 34471330 to 134478913 reverse strand)
ggttttcccaagtacaggtacccaaagagttgctagtctttaaccgtatccatatgcttcgtaaaacactgtgtgctattaaacaaaattctttcagtgaaccacagacacacacacgtacacgtataggcatgttctgaggatacttctagaagagtcatttcagatactagttgtctcggtcatctgtagctagtaagcagtaagtagtcgatcatttgcattcttctcactagggttaaatggtataggtactggaactgaacacttgacattttgcataatataccattgatgcgtgacttttgctatgcacatagttatgtttagatacatagtaaaagctatgtatttggaaaagccagaacgacttccagtttggtatagagggagtactaaactgctgtatatactttttgaaaaggcaggaggtctgccaagatatattgataagaagaataacaagaggtttaagtcaatacagtgacagaagtactaggcaaagatccaacctgaagagaagcaaacaaaaataaaaaacagaccccactaaatagttgttaaggggtaactaggtgcttggcccctgccaaaatccaggctgctgtctcactcttgattttggcaatgatttgttggcagctcgagaatctgcgatcaaagattctcgcatttcgttctcgccaaatctcccagtttacaaggatcaaaagtgatctgatgccttttctattgcatcccggcaaaaaagccagcttttcccaccaatgccccagctcggggggtcgcccctagttagacggcttcaggccctgaacagctacccagacagcaacttcctcccaaattcttttgatgaaacgacattccacaaaaagatgaagccccgattcctgggcagcacgacacaagacgcaagttggttcatggggccaattcctggcggctaatcgatctgctgtccaaatgcgattttgaattgctaaccagctgaaaaacttgcattttggaggcgcccagttcttccagatgatgaggtcataatttgtgtgaacagagcccaaaaattgtgcctgatatgccgatttgactgtgtagcggtgatccacagtgaaattccaggtgatggcatcatcacgctctgggtgaaactggatcttttggacttcagaccaaagaatgcagaactcatgaatgtggtggggagtaatcggtctgtcgaacagcgcaagatccatgatccaggcattgtttgtgaccgcctccgctaaagatttcctcttatttcttgatatagaaaagagacgaggcgccaagtcctttggcctttgccccctcacccaagcgttgccccagaaggagattttagaaccatcaccaatatcaatggtcgtcgatgccgcaaaaagcagtctatcaacatcagagcaaggaatctctaagttgtcccaaatattctgtgatgaggtgcaattatgccagagccatcgcgcgcgcaaggcacgcgcaaaagcgcccaagtcaagaactcccaagcccccaagggattttggcctcgccacccgtttccagttgactttgcactttccgcccgtcagtcgttcagaaccagcccaaaggaattgtcttcttttggagtctagaaggctaatcgttgccttgggagcattaagggcggttaatagataaattggttgtgaggtaagcactgttttcaccagatttaagcgccctgccactgagaaatttctcccattccagctgctcagtttgttcaatactttgtccaccaaaaactggaagtgctccttcctgagtctagttgtggagagagggaggcccaggtaccggatcgggaaggttgctcttctggctgggaagcaactaagaatgtcatcaaggggtagcccctggcaacggattgggacgatcatggacttctgaaaattggtcatcagaccagaggcctcgccaaatgaggtgagcaacttgacaattgtctcaatatcctcttttttcggcttaacaaacaaagctgcatcatcagcatatagcgagatcctaatgctgggcgagctgtttcccaacttgctcaatgctccactgtccgcggcgatctttagaattttttgcaaagggtctatcgccaagacgaacagaagaggggagagaggatcgccttgcctgagacctctctcatgatgaataggagggttagggaccccgttaacgagcactcttgatgttgaggtggagaggatagaagcgatccagtcagtccacctcacagggaatcccaaattgcggagtaaggcaatcaagtaatcccagcggacggagtcaaaagctttttcaatgtctagcttgaggaatagcgtgggcgaattaatacgctggaagcgcctaacagcgcttctaactgcaaggaagttttcatgaatgctccttttttgaatgaaggcactttggcaaggtgaaactaactcattcattctcggcgccagacgaagagccagggttttggtgataatcttaatgaaagaatggatgaggcttataggtctgaagtccccagctacctccgcgccttcctttttggggattagaatgatgtttgctgaattgattaattggaggttgaggcatcgattattatagaaagcattcactgcagccatgagatcatgtcttataatggtccaacaagatttaaggaaaacaccagtgaagccgtccggccctggagccttatctcctggtaaaagatcaatacttctcttaatttcctcctcggagaacggcgcgtcgaggcttgatagatcaaactgctggtcagagataatgtcccagttaaggtcgatagatctaggggttggccgctttaaagcattatggaagaaattttgtagctcttgcgctttttcattgtgcgagaagacccacccattaccgctccgcaaccgttgaatgaaattttttcgcctcctggagccagctttccggtggaaaaatttagtgttggcatctccgaatttaagccaaagcatgcgtgagttttgcctgtttcgtgccctttcaattaccgcatagccaaggatgcgcatcttcaatctatttcggaggttcacttccatgtcggacagtcccctattttcttgtgccatgtccagtcttagaataacttctagggccatatacataaagagtctagcatcaggtattaacttggagctccattccttaagcgccttggccgtgaactgcagtttgtagtacagcctatgaaaaggctcacgatgttgggtcggtgccagccaggcttgctcaactgtatgctggtaacctggtaatttggtccagaaattctcaaatctaaaggaacgtggacgcctcggcatagtagtattggataggagcaacgggcagtggtcagagaccgaggatgatagtgcatgcagaccaaatattccgaacatctcctcccattcagagttgcagaagaatctgtctagtcttacgagagtgggatgtcgtctctcattgctccaagtgaacttcctgttttgcaaaggaatttctttcaagtcgcaaatgtcaagagcttgcctgaacagaagcattaggcgagggttgactctagaattgtttttgtcgcttgctttgtatgtgcagttgaaatccccaaggaccaaccagggggaaggtgaaggaggcctctgtgcactcatctctcttagaaaatcaggcttgcggcctctacaagatggtccatagacgactgtcaggtagaaggaagcacaacgatccttaagagagacatttgcagatatgtggaattctccgatagtaaaattggacaattcgagtaggtcgctatcccaaagcaaaagaataccaccccgtgttccactaattccttccgcaggtttaaaactgaatttattaagctttggtcctccaagcgccatcacaatggacctgtcgaccgttgataatttagtctcttgcaaacaggcaagatggcaagtggtggtggagatcatcgcgcgcactgcatctcggcgcgcttgcaaatttaaacccctaacattccagcacaggatgctaaagtcagacatggaggagaaaagcaccccgattaattgccgacagctggatgaaattgcagcactgcacaataatgacagtgaaacataaaggggccaccagggccaacacaagcatggctgttataggtctgaagcaaaacagcaacccaatacagtccagggtgctcacaaaagtagtagaaactgagctgagactcattgacataacaaaagcagaccctcatcatctaacatggagctaaaacagccatcaatcaagccgcagtaactgctctggcctctgcatgcatggcgtccacctcctcttggatctcagctatagcatctccagcaattcccagcaaggccttgtcgaggcgaactgtgtctggcgtatccagattgaacagagcatctagggccgtccccatctccacagtcagtggcttcttgaaccaatcctgaaattcctgcaaagcagtattaaaatcagcagcgtcatcttttgccaagagaccaagcttgcggcagaggacgcgctgggcccgttgcatgacattcgttcgagggccgttggcaagtctggcgctacgacgtaccatcgaaaggttgaagccgtgtcgctgcttgattcttctagcaggtgctgcaggaatagtagacagagtggtcgctggtgttgttaccccctccgaaggatgtagcactggtcgctcgagtatggcaggcgagggcttggtgaatatggtgttgagtagatggctttgcgcggtggttgacaccgcagcaacatctgttgaaggttcatgcaccgcagctatcatccgagaggaagcgtcgacattggagtcctttacagcttcggcgttgtagcccgcagcaaccgtgctgcagggagagcctaacagcacatggtcctcctcagactgcaccaaaggcagtagctgcatagcagggcatgttggaagggaatcaagaatagttgtgaatgctcgctgcactgggatgagacttacgttgtctgcgaacttcatcctgctgccatcccagacagcaaggttgctgtcgccagcagcagccccagggaccggatcgacttggcccttaggcaccaagcgcggtcgccttcggtacacgcagccaacgcggtaacgacctttaggaagagctgcagccttcacagcagggcgcggagaaccgtcgttgccaccaccgcgtgagctgcggatgccgggactgcaggcgcttggtggaaatctggggcgagcaggatgccgtgggggggtcgctgaacggccacgccggacagcaacacgggtggaacggcgcacacggctgcgtccacgtatcgccgggtcacgaccaatcgccgggtcacggccaacatgtggcgtaaccaacgacgtgcctccggcatgacgaggctgctgatcgccatgaaggtggtgacgaagttgctgatcgccgtcgaggtggtgacgccgcctgggtgagtcatggcgctggccatggcgcgaccccgagcgctcccgctcgcggtccctgggagcccgcgagatgctacgaaagagccgggagctccaactgtcgtcgcgtcctgggcggcgaccacgacggtcactatcaccatcctcatccctgcgacggttgctgcgaggtggtggagggtcgtgacggtcacgtggttcgcactcgccgtcaacaacaccaagcctccaatcatacgcacgtgaatgcccatggccatccctggtaggggggtcttccaccatatcaaggtggacgatgaccctgaaggttaagccgctacgccccgccggtgtggcgtcgtgggcagtgctgctcctgtcaacaatggtcagccacgttaccttaggtatgtcagacgggtttcgcgcccacgcccacagattgagcgtcgtagcatcctccattcgcagcgactgggcttcaacgtagtccagcacacaggacttagccaccgcacgcttggcgatgccatcgttccatgcgtgcagagggatgccttccaggcacaggcgcacgtgggagccgaagacgctgtggtcgccgtggacggggagctgccacggcctgacgcggatgtcgatgttgttgtaggtgaagtcgcgctgcgccacagccgtgtcccggtgatgctggtgttcaaaggtgacgaggaagtcctctggatagtgtctcaccaccttgatgtcttcttcgcgcatcctgaacctagagcagaaagcccttcttactgtgttggtgcttgtcgccggtcgaacgccgccgagccaggcccatgccgcgtgggtgctcaaccgcgccagctcgctgtccatgtcccgagaggacgcggcaacagcgaaagtctcctgcgggcgctccatggggttgccaggcttcaccatgttgacttggcgcagaggagggaagttgacgttgtcgaagcagggaggtggtgggaaggcagagggggtagaagcagcagcactaatcttcttgggacattgccaggctctgtgtccagggccgccgcagttgaagcatttcaacggatccctgcaatcaatggcgtagtgccctctggccagacatcggaagcatttacctctcaggcttaccttaagatttttgttgtccagatggcggaaccttgaatgctcggttgttggcttcaatgaagtcgcaggcgaattgaatctcttgcggagtcgccgatggaccgttgtccagccaggcaaatcttcagcgccggattccgcggatttgctgcgttgaggagtgatgggacgcaggcctgggtattgaagtcggtgggtagcagtcccatcccggccgtgcggagtgattttcgttggagcagcagacgcgtcaaagcaggaacgatgagattggtcggcggacagagctgattcggcgaacctaactctcctggtgcaggcggccttagctgtcgacgaaccggcggcaggcttgaggcaggaccgcgtcgaagaagaagtcccggagtcagatctgggaatgcgggcgtccgcgtcgaatgctggaatctccaccgaggcagggtggctctggaggatggaggcctgatcaatggggtgatggaggggttggggttggttttccggcgagcaggcggggggagcggcagcggcggcaggtgcggtgctagccgccgcgaggacggggagagcgtccatgccactgctgtatatactgaatttctgcttagttatgccttgagttcctatgctgtcagagaaatttgtacccttttgttgaaacatctgtagccactaaccagtaggcaaaccaagatatagcctgtggacaaactgatttttaacctccatatagaatttatgttatttcttcattgcattgttttttagtataaggaggtgcagtgcatgttctgagtgttggattcaatagctattgctatgatttgtttgaaggggtggcctcgttttctgggctgacactgttgggg

SEQ ID NO: 1117 - DNA, 13067 bp, Zea mays
  Intron number 1 from transcript GRMZM2G169073_T01 (locus G RMZM2G169073) derived from phytozome v7.0 (chr-ID 6; pos 8 2706793 to 82719859)
ggaggtccctacgtgtcacacccggtttttagaaggtaaaccgaatgcgaaccatgtacgtgccaggatcagttattcacgtacacagcgattacataaatgactcatcatagcacaatgcttcgaataccaataaagagtaagtaataatataaagactagagtcatttacataatataatcaaagtacacagaatagaaacgtagccaacgtaaacaacccaccacaggcagctgactgggggaggtcgctagcctaatcctcgaacttgtcgacgtcctggaactcctggagatccgcctcgacgccttgtttacctgtgcatagattgcaccaaaggcaacctggtgttttgtgaaagcaagggtgagtacacatcaacgtactcagcaaatgtcccgtttggctgtagtggactagctttatgtggggttaagctcaagcagttgcttttagttggtcaggtatttattattagtggaagccaagttttatcatataaccaacccgtgaatcatttcctcatcgaggaacatcattatcgtcatcgaaccaaaataataaatagaaccattgtatctcagatcatttgtatctctaatcaaagaggatcccaaggccgctcataaccgtgagcacggctgatatatcagtttctaatcctctgcagaggttgcacactttacccatgagccgtgattccctctctagcccgggcttgcaagacccttattcactcccaaggtgaatggccagggattcactacgaagcctttacaaagattccctagaggtcatagctgcccgttagatttctccagtttgataaacacagtacctctccccgcaggagggtgactaaaaagcaaaacgaaagaacctcggcacccagcctcggcagagcaagcactgtgcctggaccccattgacggcacgacggcgaagcaactacacttctagttcctctaattaattagctaagggcaccacattccaccctcatggttgcactgttatcccgggtggtctctcaacgaacaggtccttacggagaggtactcaggaaacagcctgagccccctagagtatcacaagatcaacagtataatcaggataacagtatcgtatcataaatagtcacatcatgttcattgattaagttaaggcaatagcaaaatgctaaccataataacccaaaaggtaagcaaggacaaggtaaatacaaagctagtcaatccttaggttgatcatggtatgcgggttgatgaattataaagtaaatgggacataataggtcaaaggacacttgccttcaccaaactgatgctcagggtcttcaatctcgtggaactcaaagaactggatcacttggtcaccaacacttgatctttgattcctcgaagctcggaaacggatcgcaatccattcgcgacgcaaagtgaagacaaacaggcacaagcaaacaaatatatatatatgcataagaacattacaccacacaagataaaacattatagaaacgagcaatataaaatagagagcgcttctacggttacgcgaggataagaaacacgacagtcaagctacagtcgagaagttatcgcgtttatgttaaacaaatattaactataatgttttaatttgacaataccaaatataaataatttctaccatttaatttcgattaatctgctacactaacatctatcagttaaataagtaatttaattaacacgcgagattcttcgcgaggcgaacttaggatacacgaaataacatgacagcgtgaaaacaacgtgcggacacgcgcgacacagcacgctgacgacacacgaaacagagtgcgcgacaagcgcgaacgagcacgccactgcgtgcgaaacagcacgcgcgacaaacgggaaaactaaataggtgacacatttataccaaacgcctattaaataaataaaaaaaagttaagctaatattagtcagttaatgtttattataaaagagcgagataaacactatacatttaatctaatcgaaagattagtctaataaatattagtcgagcgaaccttaagttaattatctaacatatatgacttgacgaattaacgtcgttaacatgagtgtttataagtggcaaactatttattatcacactcagacgtcgcgcgacacacgaaccagacgcgtggcaaggcaagcgacatacaaaactaataaataaaagcatgattaacctaagcaattattaacaaagaatatttcagttaagattaatcatgttgacgcaaatcgaattcttaaattagattttaaagtcaaaacgatgttccaggggtagacgaaggggtagacagacgtcgtcagaatcccgacggcatgccgcgcacacgacacgcaagagtcactaacagatgtcgcattggtactaaaccaaaattaaatgaaaagtattcaagttgtccttaatcgagttaacatttatttatactagcgcaaggtagaaactataaaagcgttttaactagaaaactattttgaataatcagtcgattaaacaattacttgactaattaattaattaaagcatgtgttgtgacgaaataatgttaataataagaatgtgactttgttacagatttgacgcgaccgaaccaagtcaaaacatgttttgcgacgcataatatattaaataacttaacaattcgtggctgataaacgacgcgtcctacgaatactactgaactatgattaaaagcgtaaaactatatttccaagttaattagcgaaattcttttacgtggggttcttcaaataaatatcccagttttaatccgaattgtaacctgaacagaaagcacattataaactcgacatctataagttgttacatcgaattcgtgatgactaaagaattaattcagaacgaacgtgataagcagaaacactaatcgaccttccgtcaaacataaactaagatactttaaattagcactatcacatgaacagatacttcgaaatcgtatgactaagattaccaatttgtttccgattgaacaatcactttattagtcgacaattggacgagaattacttagttaatacgagcagctaacgtggaaaccatttaataatgcatgcggcaatgcgcatgacatacacaaaacaatgctcgcggtacacgtgaacaacgcgaacagcacagcgacgacgcacgaacgacaagagtgtcacacgcgacaacgcacgagctacgatgaggtgagtgacacgaacgtgcacgctcaggggggtggtaggctactacgtctagaggtacatccacgggctcgacgagttgaacacgggtgggaacgggaactgatcacgctggagtcttgccagcagcgagtcgtgctagcaagggactccaagccacgcgcgcaggacacgtcgggctggccgcgagccacgctggctgcatgccacggacagcgagccgcgccggggacacgacctcggagcttcgccccccgcaacaggcttggccaaggctaggcagcggcgcaaccgaagaagggataagaggaggaaggggacgaaatctcacccacgtgcgccgacgatggctgaagaggtgtcacacccggattttaggggtccaaaacccgggcgcgaacataatcaccaggtgtgctgggaccaagtctcacacatatgatgaatcatggcacaggatcgaatgtcacatctttactacataacaggagttctatacaaaataagtaaataattacattataaggagacaacggtccagcaacccaaagttgactgggagacgacggcctagaccactcacgaactcatcacagcatcctccatgcgcctcatcctgtggtacctgctcttgacctgtggggggggtgtgagacagcaagagtgagctcacatacgttcatcgctcaacaagttgtggggaataatgtgaatgaactcgccaaaggtgggagttcatgtgaagtgtaaggcttaccaaaagaggatggttagagctgagcattgcttttaaagttggtcaaaattttattagcaattactaagtataagtaaataccaacccaattaaatagtagaacagaagtaacaacatcacctgcgatgcaatgcatatgacaaattgaatttaagttccataagttaatcatgtgagggtccgagccgctcatgaccgtgagcacggctagtataccagttttacactctacagaggttgcgcatctttacccacaagtcatgttacccatccgccaagggatcgcgacttcccatacacctctaccgaggaggcgaggcagggtaacactacgaggcctttacaaagttccactagcttcagaaaacccgctacagtttataggaagctccaatgcaggaatcccttgcaggaccgccatcgcagcaaaatcctcccgagggcctccctacactgaccactcccctactgcccttgcccctttcgggtaaggtagtcctccactagctttcctaattagtcagccaagggcgtcccattatacccttgtggtagcactgttttcccgggtggtcgctccatgttccaattaacataatgatcatatcatgaacagtgataataagcagataataaaagtgtgatcatgaataatgtatcttcatacccaaaaccacataaagcactagcaagtactacccaaaaagttcagtggtaaacaaggtataaagataatcaaactagggtagcctattgggtcccatcaaaattaacctatgcagatcattatgattaatcagaacatgagtgggtaaaaagaagtgatcaagggcacaacttgcctgggacttgagattccaggtaccaggatgatcttcaggtgactcgtaacctcgcgctagtcgtagcaatacaaacaagcatggtataggcaaaattaacatcacaccaaacataagaacaaactgcgtaataataatctacgcgtttctacgagatcgtaggaacaagaatcactaaattcggagctacggttattaagttatgaatttcctaaggttttatgtatttgatacgagattaattaagagataaattttgataccattttcatgtcaaaacaaagatacagggtaataaacaacattattataggattataggaattggaatggattaatttggacttcatatgaacttcttatgaattaaacaaattctagcctttatttttgcattaaaaataattttctaaaaccttttacctgatttcttaacttcctggactgggcgcactaattacagaaaacacaggggctattctagaagattctccagactcagattctacccgcggtggatggcgggttaatttggaataagccgaggggctcttatgcaaaacgcaccggccgaaggggtatctgccattgtgagccgttggattgaaaggccatggcacggattagattgcttcttatgaatgaaccgttacgcgttaacggccataggatcgagatccaatggtcaaggtttttaaatagcacggaccgcacagcaaccacccaatctaatattaacggttgagatcttcgatccacggagatcagcacagatccgaccgatccccaatcaatgctccagatcgacctcacgcagaacgtttactcagatccaatctaagcctttgatctaccgattggtggtcacgatttaacgcagcaggaggtatacacgactccaaatctggtgcgcccgttgagcatccaacggccgaggtcgaaccaacctcccatcgccctgagtccggtgccgccgacgaccagcgcggtggcgccatcgccggtgaaggtcaggacacgattctagctcgtaaactctcagagtatcggtgttacatgcgaaggagacgatggcgaatctatatgggatagtccataccgtgagtttggcgatggtctgccctaaccgcggtggagattgatccacggcgaagcccgccgtcgatgaggtatttccgaggtccatgctgcagaactcgttaccacgcacggtttcaatcactggaaatcgcgagcatggcagggacgcgtaagagcagaggcgactggaggcgcgggtgcgccatggcgagcgcaccaccgcagtcggcgcagagcagaggcggcacacggaggatccagggcccaccggcatggctggggaacaagggcacgccgcgaccaccatggcgccatgtccgggcatagaggcacaactggagaagcggagggaggagtggagtggcaggggcccgacggaggagcccagccaccggagggtgctcgccatgggggaggcggctgaggagggacgagagaaacgggtttgcaagggggccgattttatccccaagaacagatagagtccgaccaggcgcagatcgaggagctgaactccaccatgctagagatattgttgcacgcgcgaagctcgggaggtaggcaacaggagaaccggaggatcccaacgatcgttctagaaaaagcttcacgacctgagtccgtcctgaggtggatgaaggccctggatggtgggtcccagatgtcatcgtgtgtgctcaccaggcgcggccgtctaatgtgcgggcaagtggaagatggagcgggccccgtagaatggtgacgcggtgcacaggctgctccagatgggacttgggccaagggagtggaatcagcccaagaggtataggtgatccctttttcttttttataaatttcctgctttgttttcaaattccaaatttcaagtattcaaatcaaagtcaatttctattttggatttcagataaaaattaaacataaccctaatggaaatttaaactctaatgtttatcgtgttattatttgttttctttgtcatttatttaccgaaggaataaagggttccataaaatttttctttctcattttctattttctattttcatttataatttgatgtcaagtttaaattaggattccttattgtaatataatgtattaccataaatttataagtataagatgcccactctttcatatgactattttaattgattatgaacaggaattgcctactaaattccaaaggtttcaaaaattctaaaatctctatcatagatattcttatttctttgttttattattttactattattattattattattttgctaccaattttgggctttacaaatcctaccccccttaacagaaatctcgtccccgagatttgtaagaaaaggaatacagaagaattggtttgtaattcagcttttagtctataattggttcaaaaatctagagtcatttttttatagtcgataatgggtgattagaatagaatagcatatgtatccaactatttattacgtaggatataggctagacaggttgaggtaagaaagattatggcaaggaaaagattctttatccaatatatttaagtcttgattcatctctagattcgctttgactgttatatcttcccttgtcgatgttgttcttttcttctccggtcttggtctagttgattcgacgttagtgtatatcatcagggttgagtaatatggttaagatggatatggatgaattagactacatgatgtagatcaaagtttgtttgatgttaggtggggatagacagattatgcaatccatcatgcttgtccattagattagatctgatctaattagatggaattagaattaaattggtgtaatcagattagattagatatgatctacttaatttattttggaatagatcatgttggttacactattatgacatgagcaaggtggttggggatatgtatgcttattagtacaggataaatttctaagaataagatagaatccttttgagataaaatgaatcttttaaggtaagaaagaatcttttcagattagataggtctattaagatatgagagaatcttataagatacgatgaatctattaagatatgggagagtcttttaagattagagggatctctatgagatagatacattttaatggaggataatctaaattgcttagttttcttatgaattctatttaagcctatacgtatatgcaaatgtaattgtggacattactccacaacccatcacactcaatcaaagatccaaatcagacatgtatcataagaacaaacactcaagcgtataaataaaatagttttgtttttgttcctaagagtaggtctcctagtcctaaaggtcactttaggcacgggatttcagagtgtgaaatccacatttgtcttttagaaggaaaaaggtaagagtaatcagagtaaagcggaaatagatgagaaaaaattaagaaaagtttagaaagaatcagaatagcaaaggtaagtagataatggttgttctgttctatctaggtttcgtcctacagtcaacattcctctgataccacttctgtcacacccggattttaggggtccaaaacccgggcgcgaacataatcaccaggtgtgctgggaccaagtctcacacatatgatgaatcatggcacaggatcgaatgtcacatctttactacataacaggagttctatacaaaataagtaaataattacattataaggagacaacggtccagcaacccaaagttgactgggagacgacggcctagaccactcacgaactcatcacagcatcctccacgcgcctcatcctgtggtacctgctcttgacctgtgggtgggtgtgagacagcaagagtgagctcacatacgttcatcgctcaacaagttgtggggaataatgtgaatgaactcgccaaaggtgggagttcatgtgaagtgtaaggcttaccaaaagaggatggttagagctgagcattgcttttaaagttggtcaaaattttattagcaattactaagtataagtaaataccaacccaattaaatagtagaacagaagtaacaacatcacctgcgatgcaatgcatatgacaaattgaatttaagttccataagttaatcatgtgagggtccgagccgctcatgaccgtgagcacggctagtataccagttttacactctgcagaggttgcgcatctttacccacaagtcatgttacccatccgccaagggatcgcgacttcccatacacctctaccgaggaggcgaggcagggtaacactacgaggcctttacaaagttccactagcttcagaaaacccgctacagtttataggaagctccaatgcaggaatcccttgcaggaccgccatcgcagcaaaatcctcccgagggcctccctacactgaccactcccctactgcccttgcccctttcgggtaaggtagtcctccactagctttcctaattagtcagccaagggcatcccattatacccttgtggtagcactgttttcccgggtggtcgctccatgttccaattaacataatgatcatatcatgaacagtgataataagcagataataaaagtgtgatcatgaataatgtatcttcatacccaaaaccacataaagcactagcaagtactacccaaaaagttcagtggtaaacaaggtataaagataatcaaactagggtagcctattgggtcccatcaaaattaacctatgcagatcattatgattaatcagaacatgagtgggtaaaaagaagtgatcaagggcacaacttgcctgggacttgagattccaggtacgaggatgatcttcaagtgactcgtaacctcgcgctagtcgtagcaatacaaacaagcatggtataggcaaaattaacatcacaccaaacataagaacaaactgcgtaataataatctacgcgtttctacgagatcgtaggaacaagaatcactaaattcggagctacggttattaagttatgaatttcctaaggttttatgtatttgatacgagattaattaagagataaattttgataccattttcatgtcaaaacaaagatacagggtaataaacaacattattataggattataggaattggaatggattaatttggacttcatatgaacttcttatgaattaaacaaattctagcctttatttttgcattaaaaatcattttctaaaaccttttacctgatttcttaacttcctggactgggcgcactaattacagaaaacacaggggctattctagaagattctccagactcagattctacccgcggtggatggcgggttaatttggaataagccgaggggctcttatgcaaaacgcaccggccgaaggggtatctgccattgtgagccgttggattgaaaggccatggcacggattagattgcttcttatgaacgaaccattacgcgttaacggccataggatcgagatccaatggtcaaggtttttaaatagcacggaccgcacagcaaccacccaatctaatattaacggttgagatcttcgatccacggagatcagcacagatccgaccgatccccaatcaatgctccagatcgacctcacgcagaacgtttactcagatccaatctaagcctttgatctaccgattggtggtcacgatttaacgcagcaggaggtatacacgactccaaatctggtgcgcccgttgagcatccaacggccgaggtcgaaccaacctcccatcgccctgagtccggtgccgccgacgaccagcgcggtggcgccatcgccggtgaaggtcaggacacgattctagctcgtaaactctcagagtatcggtgttacatgcgaaggagacgatggcgaatctatatgggatagtccataccgtgagtttggcgatggtctgccctaaccgcggtggagattgatccacggcgaagcccgccgtcgatgaggtatttccgaggtccatgctgcagaactcgttaccacgcacggtttcaatcactggaaatcgcgagcatggcagggacgcgtaagagcagaggcggctggaggcgcgggtgcgccatggcgagcgcaccacctcagtcggcgcagagcagaggcggcacacagaggatccagggcccaccggcatggctggggaacaggggcacgccgcgaccaccatggcgccatgtccgggcatagaggcacaactggagaagcggagggaggagtggagtggcaggggcccgacggaggagcccagccaccggagggtgctcgccatgggggaggcggctgaggagggacgagagaaacgggtttgcaagggggccgattttatccccaagaacagatagagtccgaccaggcgcagatcgaggagctgaactccaccatgctagagatcttgttgcacgcgcgaagctcgggaggtaggcaataggagaaccggaggatcccaacgaccgttctagaaaaagcttcacgacctgtgtccgtcctgaggtggatgaaggccctggatggtgggtcccagatgtcatcgtgtgagctcaccaggcgcggccgtctaatgtgcgggcgagtggaagatggagcgggccccgtagaacggtgacgcggtgcacaggctgctccagatgggacttgggccaagggagtggaatcagcccaagaggtataggtgatccctttttcttttttataaatttcctgctttgttttcaaattccaaatttcaagtattcaaatcaaagtcaatttctattttggatttcagataaaaattaaacataaccctaatggaaatttaaactctaatgtttatcgtgttattatttgttttctttgtcatttatttaccgaaggaataaagggttccataaaatttttctttctcattttctattttctattttcatttataatttgatgtcaagtttaaattaggattccttattgtaatataatgtattaccataaatttataagtataagatgcccactctttcatatgactattttaattgattatgaacaggaattgcctactaaattccaaaggtttcaaaaattctaaaatctctatcatagatattcttatttctttgttttgttattttactattattattattattattttgctaccaattttgggctttacaagaggctagcacaaccagcgacgacaccagaggaccacgagctcggcgcaagggcggggctacgggccgaacgcgcaaccgcggctaaagagccgccatgggcgcacgcaggagccaggaagtcgcagccagggctagacagcagtggggatttgccggacagaggccgtgctagcagggagcagaggtggggctgctgccggtgctgaccacgatgccgcaacgggccgccaggcttggccgcaccatggccggccgagccgcggagctcgcgcgcgcacaggagccggtcgagcgagcgcgctgggcgggggtgctagcgcggctgggccatgcccgcggccaagaagaagagggagcgggcgagtggacacaggaactggcctgggcggcttttggcgttgtgggcagggtgggcgcacgacgtgagcaccagttgggatggacgagtggttgaggaagaggaacagtgggtgggggcaccactaacaggtgggcccggcggctgggcaggggtgccatgcggcggctagggtttggggaaggcgtcggcgccgggatgggccaggtgggcctcgcgcgctgggtaggccgcagggggctgggctgcgctggctgggggctaggtgggccacgcgagagctggtgggctgagggaggttttccccttttttgttatttctttctcttctttttttattcttcttcaaatctaaatatagtttttgaatcaaagattcaaatatttaatgagattgaattgatgcccaaacacaataattcgacacaaaaatatgcctcggcatgccatgcaacaatcaaggaccctcttagggttttattttacgaggattatgccggtataaaacaaaaataattctccatttttgggaaaagataaggaaaacagagaaatgagagagtaacaacctgaatttggtggatattagaaaaggaattttatacccctaaattcagggtgttacactacg

SEQ ID NO: 1118 - DNA, 3231 bp, Zea mays
  Intron number 1 from transcript GRMZM2G163297_T01 (locus G RMZM2G163297) derived from phytozome v7.0 (chr-ID 2; pos 2 04478395 to 204481625)
cgcggcgaacccttgcaacaacctcttcgtctcaggcaactaacctcgcctccatttcccccctttttgcatgttttgcaagagaaaaccctcgccttgattcttatgctgcgcgctttattagttgcttgttgtgctagcatgcggtggatgtttgcggtaggattaggaatgggggaagttgtttacttttgtctgagatctgttagccagtagttacttccaactttgatatacctgatgaactaaactgatactagtcgtagtcgaatagtgttatcttgcgaactgaatcgatttgctctatctgaacccactctgaacgagagaagtactgcacaggcgcatacaaacttattgtcgaatgtcgatgtcaactacttgaccttttataagcacacgtatatgttaaacttgaaactgagtctttttgtatttagacctagagaactcctggtcatttttcaaaatggctgttaagaaaaccttgaatttttttgtccattatatcctattgttatttgatttctgaaactggtgtataataaataatcagagccataccatgctcgatgtaatgaagtgttcatgggcttgttgattcatttatgcaaattttgttattccattaatattctactacttgacaacattgcctgacttgtgtgaatatggacgttacatgtttgcaattgttcctcaggtttttatgttaattcattctcttctggaacatcgtgcgcctgaaatattttgatttttccttgttgtgctacaccatccacatctttcgatttaacctgtattgtttttcatcataacgctcgatgttatttgctttttataaataacatatgagctttcacatatttcaaaaaacatatattccattgtcttcttgtcttgaaatatgagtgatggaagagtatcaggtatgaagtttgctgcaaagctataatcagagaaggcgatggtacaattgaagtcgtccttgttgcaagaaacgccatcctagaggatttgaaggcagctaaataccaaaattaaatgtgatgcatgctgccacttgtgactaatatatgttttgcaggtacgtcataataggaaaatgtattcatcagctgcaccacaaatttcataccaatgattagagagaagtgggataatggtcatcatctgccacctactggtttcagacttccaacctaggctggttttagactttcctttccaacctatatccatagtagctattgaccggtcgatatcgatcactgttagtccgctccacgacacaatctttacactacaaccactttattgttatatcattttttacatacttttatgtgacataaaacatgaaattttattaaaatacaaatacataaaatcacagtttaccaacgggctctcgctgaatttcgtatttttaaaatttgaaaatatgtacatcaaatcttattgaaaaaaccaaaaatcgctggggaacaccgaaaatcacccagaaaatggtgaaaaccgctcgggatcttgtgaaaaccgctagagacaaccgaaattccattcgggatttggcaaaaattgacgaaaaccgtttggttttccgttcttgaatggtagcgagaaaagagaaaaaacgaaatgttgaactcggtctccaactcttgtacgacctagtgccccgacgacgcgggtggattgagcttcctcctcgtgacggcgcaagaaagaaggggctatcgggtctgttttgatctattaggatctaagagcaactccaatagttacttaaattttagctctctaaatcatagatttaagaagttgctaaatggcttttgaagtaaaaaatgtgagttctccaatagttctctaaatataggttgtaattttgttttgtatctatccacataaaaaataagtcacaaaaactatataatgcagtaaacatttttgtttagcgagttgttaaatggttgctaaatgtagagagaaaatgaggttagatgacaacttgttaaatttagaaagttcatttagagaactgttggagaatagtttttatattaactacctaaattattgatttaggaagtcttttatagaactactggagttgctctaatagaaacttgaacagagatcagacccttaaaggatatactttaaaagtttatggacaggttgaaacaagtagccaagtttgaggacgggaattgtaatttacccatccaaatttattgacgtatcgaaactccggcggccagatcttgagaagacaaataccgccagctctgtcatgcttatcactcgacatctcctcaccatactcttctatagaagaagcggtaaggaaggcctcaaaacatggaatttttgcatcgctgaatatgaacggaggcgagtaggcgtcaggcatgcgaggtagccgcatgcgctgcctcgacaaggggtcgcacacggctagctccggcaacaagcccaatgccctgaatgtaaaccccagaggtgcgcacttgaggagggcacgatcgtcacggaggtcacaaatctcccaaccaaggccagatgcagtgcgacactatgcaagaggaacccctcgctgtggttcttatgctgcgtgcttcattaattgcacatgttatgctgagcgctttattagttgcaagcggtggatgtttgcgataggattaggtatgggagaagctgtttgcttttgtctgagatctgcgagccagtagttacttcaaattttggtagacctgatgaactaaaactgatactaatcgatttgctctgtctgaacccactctgaacgagagaagtaccacacaagttcacaagtatttggtaaacttggaagtaggacacatctcaaatgccagcgattactgctggtttgagtaattcactttcctatgtagaaggtggtgctaaaaaattgttgcaggattcggtgcatttgtagctccctacaattttccttctctggcaatagttcatctggttatctgtgtcaaatagtcagtctcttcatcgaaggagaaaggcagagatttggaaaaattcaaggtgtctcatcattaattaattttggttcgctgtttgttatcatcacagcacgcatgcatcatgtgtgaaactaggaatgtgggtatatattatggtagtacttacaaaggcatctatgcagggttaaataaacgcacaacgtccgagggacttaag

SEQ ID NO: 1119 - DNA, 5216 bp, Zea mays
  Intron number 3 from transcript GRMZM2G047362_T01 (locus G RMZM2G047362) derived from phytozome v7.0 (chr-ID 3; pos 1 33069017 to 133074232)
aggagggctattctgacggaggtgtagttgttcaggtgaaaaattatttattggtgtcctatatctgaaattggctgtgaagggcctgtttgggaacatagtattttcttagttccaagacaataccgtggtatttgagcataccatggtattttagaccaaaaggagtttgggagcacatacaagaactttgtattttaaaccatggttttatcaccaaagtaactacagtcttctcttctacactataattaaaatactatgtctccaaacaagtgttggattgggttgatgtaaaatataccatagttacgtcatggcatacattaaactgtggttttgagaaacaatgttcccaaataggccctaactctttttagtttccatataaaggttttagatatataaatttttatgtaagaacctgaggtctgagaggcactgaaaaggattgaaaaggatgaaggggagtaatacgatggaccctaatgggatcccaattgaggcatgaagatgtcttggggacatagctatagtttgtctaatcaagttgttcaaccatatcttttgatcgaacaagatgcctagcgagtggagaagtatattggtatcgatctacaataacaagggagatatttaaaatatctttaaggaaagggccatcatagaggagggcacttagaaggaagaagatgacacggacatgtgggagacgattgcgacctacatttaaaaggtggcctcagaggtgtgtggagcaacgaaagggagtggaagcgaagctaaagatacttgtggtggaacgaggaagtccaaagagctattaaggagaagaaagaatgctatagatatttgtaacatgacaggagtgtggacatcatacagaagtacaagatagtaaagaagaccgcaaagtgagctgtaatggcaaaggatagggcgtatgctgatctttacaaacttttgagtacgaaggaaggagaggacatatataggatggctacagtccatgagaggaagacagggggcttcaaccaagttaagtgcattaaggatgaaacggagcactccttggtgaaggaggacgagatcatacattgcagatttgtttccaaggttgatcagcgcaattccgaagcggctaatcagttgtagaacagttcaggaagcaattgttggcgctaaatggatttctgacatcagaggagccttgtcagtgggggttttgacagattaccttcagctttgggatttgatttctggcatcgagctgcagccggaggttgaagacaggcatatcttcagtattgccccgaatggtgtatactcagccaaatcagcatatgaaggtctgttcctgggatctgtgacatttggacactataaaagaatctggaaatcttgggccttgccaaaatgtcgcttcttcctttggttggttgcccataagagatgctggacagctgatagattggcaaagcgaggcctaaaccatccagacaagtgttttctatgtgatcaagaggaagaaactatagaccacctccttgtgcaatgttccttctcacgagaattctggtaccttttactcaggaaatttggtcttcattcactcgcaccacagccgaccgcaaactccttcctgggatggtgggaagtggtggggggagcagtacttggactcacaaaaaagggccttaactctctcatcattttgggagcttggactttatggaatcatcgaaataaatgcatttttgatggctgcaacccaagtatgtccttaagtctcagagctgctgatgaggaaagaagaagatgggaagtagctggtgcaaaaggcctcgctcatttggctgcagccgtggtagagccttaggaagtttgagtagtttgttttttgctccccttatggatctatatttgtatgcctgtttctggcctccgtaaggaggtttttctgtaaacctttgtttttctattttcttctgcttaatatataatggggcgcagttctcctgcgcgtctcgagaaaaaaaaagaatgaggacacaaccttttagttggatgactcttttgatgactccaacagaatgcatagtatccatgaatctgaggttagagaggtattaaaaaggatgggggggggggtggcgatgggccttgatggtatcccaatcaggcatggagatgcctcggggacataactatagtatggctaaccaagttgttcaaccatatcttttggttagaacaagatatttgacgaatgaagaagtatattgataccgatctacaagaacgagagggatattcaaatttgtactaattatcgaggaattaagttgatgagccatactatgaagctatgggtgagagttatcgagcattgtctgagaggaataacgaggatctctatgaaccaatttggtttcatgcctggaaggtcaactagcgaagccattttcttaatatggcaagtgatggattaatataaggagcagaaggacctacacatggttttcattgacttggagaaggtttatgaaaaaataccaaggaatgctatgtggtgggccttggacaaacataaagttccaacgaagtacgttgaactcattaaggatatatacgacactgttgtgtctagtgttcgaacaagtgatagagatacatgacttcacaattagaataagactatatcaaggatcaactttgagctcttactttttgccttggtgatggatgataagatcacaagggacatacaaggggatatcccttagtgtatgccttttgtggacgatgtagtgctagttgatgaaagtcgagcatgaggaaactagagttgtggcatgggactctagaatccaaaggttgtagactcggtacaactaaaaccgaatgtataagataatcttcagtactactatacatgagaagatgttagtttggaaggtcaagtagtgtccagaaaggatacctgtcagtatttaggatcattactataaagagacatggacattgatgaagatgttagccatagagttaaagtagggtggatgaagtggcatcaagcatctggtgttctatatgacaagagggtaccacaaaagctaaaagacaagttttataggatgacgattagacctgctatgttgtatattgcagaatgttggcctacaaattgaggcatatgttgcgttggattcatggccattcaagaagggatcgagtccggaacgataatatacgtggcaggctaggggtagcaccaattgatgaaaagcttgttcaacattggttgagatggtttggacatgttcaatggagacctccagaggcaccaatgcgcagtgtgatcctaagacatgatatcaatgggaagagaggcaggggaaggccgaagttgtcatgggaagagagtaagagacaataaaagtagatctgaaaggataggatataccccaaagatttagccttgaataggagtgcatagaaaactactattcatgtagagagggcaatggttatacacccatcgggtagcaccaattggtacccgtacccgtaaaaaaatctatccgttgggttacccatatccgctcgtgggtatagaatcttttccatacccatacccgtgcgagtaattttactcgtcggacgtcgggtaacccattcttgataggaaagtttcaacttctaatatgccaatcactcaaaaagtcaaacaaacccacaaaaataagttcaacttcaaatataacaaatcatatgattacataacttgataattaaataaatgatagttggagaaggattttttgttggctaagatgacctttattagatggtaatagtggtgtgatgcgggtatattttatccatgggtacatgagtatgggtagtacatactcgtacctgtatccgtttggtagacgggtagaggttcttgcccattaacatacccacgggtcaagaaaccatttcatatccaccttcatatcaggtaaaacccgttggatattaggatttcgggtacttattgccatctctatattcatgtctctgaaccttgacttgtggtttcggttgggttttatctaccatccataatatccttccatgtcttgttgccaattttccttgcaaatacttgggggtgcctcttacactaaagcgacttggtaaacatcacattcacccgttcattgataagattgccgatcgtttgcctagttggaaagccgacctgctatctagagctggaaggctcattcttgttcagtcagttctcacttcgatgatggtttatttagccatggccacgaaccttccttcttgggctctaaagggacaaaattaggagaagttcctttggagaggaagaaaagaagctatgagagggcattgtttggtggcctggaacaaggttactaggccaaaagagcttggaggcttgggcatctcccacctgcagcatatgagttgggcccttagactgcgttggctctggttacaaaaaactgatcctgaccggccctggacagccttcaaaattcatgtgcacccttcagttcttgccttcttttctgcggcagtttcatctgtggtgggcaatggcaggaatactctgttttggacagataaatggttaaatggccaaagtttgcatcagttggcacctcattttgtcaagtttgtctcttcaagggctaataagaggagtgttcatgatgccctcactactgggagctgggtacaagacataagaggggctattactgttaatgtgttgactgatttttttttagagtccgggaccttgctgcaaactggattttgcacccggaacaggaggataagcatatatggctgctctccagctcatgaaaatatacctccaagtcagcttatgatggtttcttcattggatcaacaacttttaggtcatgggggaggatttggaaaagctgggctcctggaaaatgtaaattcttcatgtggcttgtggcgcacgggcgttgctggaccgctgaccggctggcgaggaaaggcctgccttaccctcaaagctgtctgttatgtgaccaggaggaagaaactatgaatcatttgctagtatcctacatattctcaagggaagtcttatttaatatcctgaaagctgttggtttgcagcatctcactcctagtcttaattctacttcctttga

SEQ ID NO: 1120 - DNA, 7802 bp, Zea mays
  Intron number 15 from transcript GRMZM2G069676_T03 (locus GRMZM2G069676) derived from phytozome v7.0 (chr-ID 7; pos 41732457 to 41740258 reverse strand)
cagatttgaaaggagggtatgctaactctgaaatgttctttggttatttcacaaggagatagcatcttttgcagaagttttctagtattgtgcacttaaacagaaacgagtatgtgaatgaatggtaagttagctcagataacatgaaacgtttttgttgactgtagtcggttgcttttttctggaaactgaaaaaaatatcaggtatcatttttgaattttctataagcaaacggataatccttgatattgagaactcaagttcacatatccccctcattggtgataattgtatacctgttaattttgcgatttcatctaaggaaaccaatactacaattctctaactgcgaatgcatcctttctggcttatggaaacatcaaagtttagttagggaaatgacaaatgagctgtaatgtgaaaataggattggggggcattagtttacttctggtaacatagattcctttttgtatgttggaggtggctattgtaaaacaatgttttgctttattataagacaaacaagtgcaagatgagtggtagaaatttgaatgtgaagtaaaatacaagcatagtgggtgatacagtaaaatagaattgggggtgatagtaccttagttaaatgctttaccccgtatgtttaacatgttatcacagtgggtcatataagattgtgttatttgtgattttatactgttgttggcgccgatctaggcgccaaacactataacgaaccacctgacgaaaggcgcagatggtccgcggcctaggcgcagaagtggctcctcctctgcgtacgtccagatggtccgcacctggggctcggacggtccgcgatggcgcagagagtcgtcttcttaacaacagacttagatcttgcctcctgggagggaccccgtcggggaggagagattctagggtgtgtcttggcgtcggcaggccacccaagacccctctcattgacgtagagccgaagagaggtgaagatttaaggtagagggaggctaaactagagttactcctaatgcataaggtaaaaacgataagtaaagttgattgaatcgattgtggggggttcaatcgaccgtagtccttcatctatataaagggggaggtctggacccgttacaagtcgttttttgagttaatcccacaggtttagctaacaaatctagcaagaaatacggaaccctaactgattctgcacatgcgcggaccgtccagcctacagggccggaccgttcgcatgaccattttggaactcaacaactgtaatggggtttcctatgtaatgggcttaggcccaacaactctattataaatatatctctcccaacccttgttagggtttctagcccactaagggctcctttggcagccagggcagggaaacccaggggagtctgcacccagggggacaaatacctcgcacccagattccctgggcaggagtgctcgtccggggctgccctgtcctgattccatttggcagacaagggcccagagtccctagttggagtgtctgacgcagacagcgcagacagagtgtcctttggcagaggatacccatactgctacatcatatataaaaatagataaaatgtaataggaaatgcactgtccacatgatctttctaaacataaagttccatcaatttgataaaaaaaatagcagcaaacttcaacaaacaaatgatcaggtgtgtcaataattatgagataatagagtaaaccaccaacatgtgttcttgttatcacacaatattaatagagtactcaacacagtttctgagtactgcaataggaaggataaaataaattgcttcctggcatgacaataaaaaggacagacccaaagtgccaaaggagtgcacctccaaataaactaccaaaaactagaataagtgctgagttttctgcaactttatgaagcaagaatactggatgccatgcaaaatgttgttgtaagtggcactcggggtgcttccaccaggcagatttcacagctccatttcaatgaagaagtcgttgttgtcttcttgggccacatagtctgttaatttaacattcaattcagttaaatgttgagagcattgcttgtaccgactgaatcatgcagtttcattacacgagatgaggaagtgttctaagcaatttgatataacaataaatgcaataagtctttgtactagatttagaactgaggtcacaggttgtacacaatgtaaaaatcatggactaatgcctagccttggtggtcgtcctacaggaatatcttaactaaagaagtgaattcaggagactagctatacacaacgtgaaaggccatgactgaatccacatgtatcctagaccgagctgaccatgaaaggctcacctggaactttggatctgtacacaagctgtaaaaatgctctcaacagattcttggtgcttgcaatatcgcaaactggttcttgattcttgctaactgatcctattttctgactaaaattggtccgatttgcatagagatcgatcagctgaccgaaatgtatcctagaccaaaactgtttcaggacatgtaaatactaaatagtgactacaataaaggaaatgaacatgaaagaataataaatatatagtcaagacatttgacagaaatgagtcttagtcatcagtctgtaggtgagaagaaaaacagcatagttgaggaagtgatgagctcactcactctcggagtgagaagagaagaaaaaaaaacatcgttgaattgaatctatggcaacgactgactcctaaactagatcgttgaactaagcattgttgaattgaaaaataattgatgaaaaagaaaaatatctgtgacaaggccaaggcgctcacctttctcggccttcaacagccgcattgtggaggtcgccgtgccgcttgcctttctccagccgccggcttgcaggatcctcgcgcccaggctccagagaagctctccagagaagtgggagatctggtgccttgcgtgaagaagaggagggagatccggtgcttgcgcgacgaagaagagtctaccatgcacgagaaaattccggtgtttcgccgagcgcgcggtgccagggagtgcccgtgctcagcgaaatcaccgagcgacgacggatccagtgcaagggagtgcgaggcagtgagcggcgacggcttcgagagggagaccgggaggcggcagctttgcgagggagatagggaggaggaggcttcgcaagagcggacagggaagctcttcccgacctgttgtggtggggagcgaaatcgccgagctcccccgcggtgagggccgggaagcgtggtcaccaaagagcgagaaaaaaattcgcaggggcaattttgcccggggtttccgtggccagggattgggctaggatcctcccgggatcctgtgctgccaaaggtgccctaaggctttgtttgggtactctagtattggtcccaatccacatgtgttgaggtggattggggtgtaaattagtttaagttacaccccaatccacctcaatacaagtggattgaggtcaatactagagtacccaaactagacctaacatggtatcggagccaagttgcgatcttgggacactcgtcattttggatgacttctctcactacttgtgaacctttcccctccattgtaagtttgacatcttcccccacctttctcatttctttgcatggatgttgactcagttcggtcgtaccatccaggccattcggtgcgataatggacgagagtttgataactccacgtctcacacattctttctctcccacgtcgtgcagctttggatgtcgtgcccttacacctccccttagaatggctgagtcgagcgcatgattcgcaccaccaacaacatgttgcgttgcctcctctttcaggcgtctctccccgccccaccttcctctgcccatgttgccacaccctacgcccttgcctccacttggcaccgtcgtcttgaccactctggccacgacgttctttctcgactctcggccacctcggccattccttgtcctcgcggcgacgccacatcgctttgtcatgcgcttgggcgtcacacttgcttacctttttcctattccacgccccgcgctactcgccccttcgacctcatccactatgacctctggacatccccagcatctctggtatctagctaggtatagttgtttttctcccctttcctcccacctagccactgcccctgcctgtacccgtgctacagtagccagctgacctcctcccccttcccctcctccggcgaccctccctgatagttcgtctccgcgcgcgtggatccgtgccctcgccgcaagttcgcagtcgcgcctgcttgagatcctttgtacaggctgatgcaaccgctatcctctggtcggcgcggctgccctgcttttggtcagcgtgtccatcctcctagccatcgctgcgacgcccagcgctcctgtaggccggcgaggccgccctccattcgactgacgcgactgccctccatctaggggtggtaatggatcgcgatccaaatacctcttcacaatttggtaaggccctaaattatttctagttcaaaaatgaataaaaacaaagcccgatcctaatccgatttgatccttaagttttatagtgtaaaatttgaggcccattgtcagccctacctccatctggccggcgcgaccgtcctccaccaggccggcgcgaccgctttgccccctgccgtcctctccacggctcccgtcggtgcccccctgtacacagtgagctacgcgcgccctctctggctcgacgcctctcgtactcttggatgtctccccatcttcctctagcgtcggtagggatgataatgggctatacattttgcactataagatttaaggatcgaatcgggttaggatcgggctctatttctagtcatttttgaactataatttatttagggccttgacattttgtgaagaaccatttggatcacgatccattaccacccataggcgtcggcaaggtcctgcttgcgccgtcgcccagcagcaccaacgcacaacccttgctacctcctccgacggtgggatctttatcgctttcctccccgcgcttcccagccccgccatacacacgcatctcgtgacgcccgaggccacgccgatgccgtctagcttcacctccgccatggcggagctcccgacgctccctaaagccatggcgcggctgtcccggccccaagtgctagctggcctctcctttcgccgctggtcccttgcggccctgacgcgtccccttcgactccctgcaaccatggcgctctcgcctccgcccacagtggccctgacgcacctctaccggctgtgggcagccccatcgcccctgctctgcccccctccggcctcacgccggccggtcgtgtcttcacccccttgccgacggttagctctcctccccttgggtgcatcccctgctcctgcgccttcagtgcgccacaactgatcacagttgtcgcacactgcccgcgattgcgtagccccctccccatctcgcgcccggcgccgcttggtggtggcagcggtggtgtccatggcagccaacatagccgcagtggtggcggcggtggacgtgtccatcggggcgacgacgggagggcgccgcagcaggggctccgctggacggggtgggacgcggctctgctggcttccagggggcgtcgatggccggagacgtacaggtgtcgggtgctgcagggccgggcgcggtcggcctggcggctgcggcctggttcgatcggagaggcgaggggcggcgtcggggcgccggatcggcaggcggcgcgacggcctgggccggtcgcgggcgcctgggcaggagcggtggcgctgctcggtcgcgggccgctgggcgtcggggaggcgaggcgggcgcgactctgggcgcggggctgcgcggccctgaacgggcggctcggcagggcgccggggcgtgcggccggatgagcaggggcgggtgtacggaccgggcggggtgcagagctcggcgcgcgggcgtcgggtcctcggcggcagtcggcgacgagcggcggctacgggagcgcggctccggaggcagcgggcggcctggagcaggcgggcgcgcgagcgcaggcggcgggcggcctggcgcaggcgcggccaagcgcacggcgtcgcgggagtgcgacggatgcgcgggtacgggagggctctgggcgcgacgggaaacgggagggcggcgcgccggggagggaggctggcggccggaggtgggagggaaaggagacggtggctggagccggcggcggggaggaggccggtcgtttgggaccgacggctgaaaaaaaaacctaaacctaaacctagctctttgataccatgttggaataggaacccataccctaaacaggggttgggagtgatattaatagagtgagtaactgggccaggcccattacacagggggtataacggtcattacaatgggaataacacaaaccctagacgggtagtctaacagcgacgaaccttacctccaccgtggttctcgagcatccctactatgtgcgcgtcttcctttacactgaccatcttctccggggcaccttcgtgacctttgatcgtgtcatgaatcgtattctccgttactgcatcgagctccaccctcagacgggccgccacactactgggttgtttgtgtttcccagcaccacaattgtcttcatgacgaccgaggccttgtcctcttccccattcacgcttgccgtcagcatgctcatcactgccgaccccagcaccccttccggtggctctgtgggtgtgtcaccgctggctctctcatccttcatatcatcgccaccgcctcctcccaccgactaggttgccaactctggcgtctcgttccataccattcctgaccctagagttgtctctttacctcattctcttagccccacattccattcatcattgtcggtaatgggttgactctacctgtcaccttagtaggtgacagttcttcctggtcctttctacctcagcgacatttttgttgtcccaacatcatctagaaccttctcttggtccgtcgcttcaccactgataaccgttgttctatggagttcgatccctggggacttaccatacgagatcttactgttgctgtggttgctcgatgcgacagctccatccccttatattccattcgtttctcccctccagcgccgaggccgagtacctcactgtggctaatggcgtcgctgaggcggcatggcttcgtcagctgctccaggagctgcacagtccgttgacatggagcacacttgtctactgtgataacgtcagtgccatgtatctctccaccaatcctgttcagcaccagcgcacaaatcatgttgagctcgacctctacttcgtccgcgagcgtgtcgccgtcggggatgtgcgagttctctatgtcccgaccacttctcagtttgtcgacatcttcaccaagggcctaactacatcgttatttgaggaggtttggtccagtcttaacatctgtcgtggctagaatttcgaccacgagagtgttagagttatttgtggctttgtattgtaatggggtgttttctatgtaatgggcttagggccaacaactctattataaatatagctcccccaaccctggttagggttagggtttccagcccactaacagattgaactatgactagattagtcatgcgaagattttaaatatttgtggattgatatgtctacaggtccttccgtgact

SEQ ID NO: 1121 - DNA, 14898 bp, Zea mays
  Intron number 1 from transcript GRMZM2G312827_T01 (locus G RMZM2G312827) derived from phytozome v7.0 (chr-ID 5; pos 1 50493050 to 150507947)
aggtcagaattaatctgacagtttttgtcctctttagatggcctgatcactgaggcgtttcttctataagataagatgtgtggatgatgcgaaccgcatacaaaattttcggcattggaggtcataaatgttcctatcgctacgatcgccaattttgttatacgccggctttatataatccttataaaagtatcttaattacataagctagtagtagtaaacaacgaacatgcatgcctaggctctgactaaaaattaaatgcctaatctgtggcgacaaattattccatgctaatgaaattgttgtgggctgacaattcattatcctagtatacttccaccgtcataaaatataagggatagcattggaaatttattctaacagggcgtttgcatctatttattttagagaaattggattttacttaataaagtaacatatttgtcttggaatttgatattccaccacactttctaaaatatatataagtctatctcaaatttataggatgaaggatgagaaataattttatgtatcaatagaatacatttctactctgcaacttataggacacttttcggttcacttctataataaaaatatagcacataaatatttccgacatcttgctaataatagaaaataaatatattttatataaaaccttattagattaattgatatgtgattagaattgaattcaattccaagaatctaaacagacctaaatttaaataacttcggatgaataaactctccatactataagcccacctcttatccttccgtctacagagcgtttctttttgaatttgctgatgagatcaaatggcatgtaaacttacatttctaaacggtacatcacccggattaagcctccctaggaataacccaagttaactactaaagaaataataaactaatgacatgctaatcttttgctatcattgtcattttatccatggattatcgctacagcaaaacatagcatttccgacggccaaatctattggaaataagccctaagccgtcggacataagctatatatttgctatactttggtagttggaaggtataggtttgctatacttcagaacacagtgactatttacccgaaaaaaggtataggtttgctatactttggtagttggaaggatgaagaatgagagttcagaagtagaaatttagaaatattttgttgtttcatgagagtgagagttataatgtgacaggaatgagagtttctcatatcaaacacttcgagtcgtggtcttagtggaacatgaatgcatcatcactgtttaccatgacttgtcatctaatttcatattcattttttctcatattagttccaatctactcatcaactgtcgccatttactctcaagtaggaccggtaaaaaagcttgagcctatccgagctcggcggcttgcgagcctcggacaagcccagccagtttctttggctccttatatagctaagcccaaactggccctatatagaccacaagcccaagaatttagatacaataagtttaattgattaattttgtattatacactatctacactcctcgaccaattaattttatctagcatatgctccattattcatgtgtgattcctatattagctatcttttttttggaatccagagcaaaacaggctcggtcgctatatgaatggaatctaagcattttggtgctagagctatacagacacttgggagtctagagctatatgaatggagtcttaactctcttgtattatttctcagctcccacacctcttaatagtcggtttgtggtcatatttatagctctgcatgttcaaactagcgattggaaacgacacacgatttctgcttactcatcgaacatgtgtggtgcactcaccagacacgttcggtgcatacacatcatctatctaatggaaatagccgctaccgaccgttgagcttgggtatccgatgtggtcaccgctgctacaccggtcatgtttggtgcatgtaatcgggctcggtggcatttgcaaagtctggtatatcactagacatattctgtgcgttgtaaaccatgtacacgatgtagacctatctggtgccttgtttgttgtggcatctggtgatatatctagtgcatacatgcatgtttcgtgtactatgatcttcaaccatttttttagcacaagaacaacacatgttcagtgcttcatccgatgcaccactagagatattcagtgatgttatgtagtatgtttctttattttcttcgtgtttcttcatttatgcttctttttgtctcgtgttttggactcttgcatgatcttcataggtcttcaatgggtcttatagtgtcttcctttgaggtgttgatctcattcatcaccatgttgcctttgtccaagtccatgatgcatccttcaaactatatccataaagactagtaaaggttattactccaaatggttatcttgatcatcaaacaccaaaacaattaatcaaccgggctaaggtccattttaattacactatccattctgtgagatgatgaagggctacctcacttgccctcatgggcatcaatgagaatatcattttcctcccccatcagaaccgcattttaagaggactttgttggcaccatatggataggggtccatgtccacaaacacatatcgtctagcctaagggagatccatctataatggtgccatcattaggaagtattgcatatttcaagctccatatctcaaagatatatacattagggtcaacctaagcatttggtctagctagacctaggtcctcgaaaggccctcgaccattgtcatttagtggcataatgcctagggatagcatgttggggacaactgtgtttgcacattggccaatcccccatcacttaagttcttagggagggcaatgggtcagagaagctttacctcaaatatccccttaagcactgacaccgagtcaaagcggttgtagagatctttcagccattgtgttttctccttagggtatatacttgaagtgcacgatttcaaagggagatccatctaattgactttggtgaggtaggatgtgagctatgcactggtatacacatagagcctacatatatacttggttgatgaccaattgagtgtcaactatgactaacaactcatagatcccaagtgtgatggtggcttatagtcttgtaatgtgcacctcatacttagacttgttgtttgctttttgagaagtagaggcgacacatgtaggatacccattcataggaggagacaagaataaatcttgcaccagcaccaacacactgactagagcagccaaagtacatcgccagggttccccatcgaagtcaggttctactccaacctagtgtcacgcccgattttgaggataaaaccgaatacatagcatatgtgtgctaggatctatttccacacatgtgttgacgtcatcagtgtaatatgtaataaacattgtacaaaagtgtaaataaagattacataagcattatcacactccgaaggcacataaatgtcttaaattgtctatcacgtaagaacgtcaacgttgaactcccacaggaagatgactaggggaacgtaagcctcaaaactcctcaaactcttcatcaaacttttctacatcataaacttctaataaacaatgtaggcaagggtgagtacacttatggttggtactcggcaagtgagtgaatatgcaaggttaccaaggaaaggctaaaggtttattgctgttagcattttagttcgtcatattttattaacatgtatccatttattaagtgtaagtaccaacccacctaagcaaaagaaacttaaatcaacataattttaaaaccaagggaacataatttaatttccatcttcaagtccaattatcatgtgagggtccatgtcgttcttaaccatgagcacgactaatatactaattttacactctacagaggttgtacactttcaccataagccatttatcccctctagccttcatttgcaaagctcataaacactttcgaggtgaatggctagggattcactatgaggttttcacagaattcacttagtacaaaacaacctactagggttttaggtcaatgtgttgcacaaccgtaggtgcattaccttagccaagtgtaccacccaaaagaaccaagtcatactcccatcattgccacccccgttgtccttttcaataaaggttgtcaagcactaagctcattaagctaactgccaaaactagagccataataacacttatggttgtactattttcctgggtggttctctatgttctaattaacatgtatgatcttgttgtatcaacaacataacttgaaatgaaagaacataaatctaggttgtagcaactagcataactactcattttgaaagaattacccatgttagcaaggaacgatttcaaacactaggtgattctaataggatccattaaattatgcatataacataaacataaaatgtactatcatgctatatttttgggttgaaaaagaatatacaggtgggaaattccattttccttcctcacaaagttgttagggttcttcctcgaatttctcatgaacctcagcttaaggttcgacctctaaacgattacacaaacagtaaagaacaaacaccaatcaatatctatacaacaaaacaacataaacaagatcacaatgaaaagcatggtgaaagataatttgtttttgaaaacattgaaacagagaatataaatgaaaagggtacactattgagaaggtttggactatactttaataaaaacaaggtataagcataacacaatttaattataaatatttaggtattagctataccatttcaactttagaaaaactatattatggtacatttatgtgttcaagaataaaaggttagaatacacattattaatcatatattaattatgaaaactaatatataaacctaatacagagtttatgttgaaagataattaaataaataaacatcataattttttgttaagaaaacacatgacctattttttaaaaaaatataaagaaactatatacaaaaattattatgtaaactattattcaattaaactttggaaataccgaaatttgtgaaaaagttgagacaaaacattaaacattttaaataaagctaaagaaacaagaattgatttatttgtatttaaaatatacattatatagggaaaacatggtcgtaggttccaatttccaaataaatatagatttttagggctagcttcaaagaaaataggggttggcttactattatccttaaaaccgagggctaacgtgcaaatacggctctggacggtagacatgaaaccttaagagtgcatggcctaactgaatagatcatgtccaaaatataatgatttttgtactgcagaaagcgcacacgtaagaagaatgaagagaggggactattttgcaaaacgatcgtcttcaaacttcggctccgatggtggcgagctccagtgatgttagggacaatgtcacgctgttcggggcaatgcagtgagctctagggttacgagacggggtgacaaggagcttgaggagggacacgacgatgatagaggtgctctaggtggctctaaccacggcgaacgtgggtgacgcatgcgagcagagcgagagagggcttaggagagcgaatggagctttgggcaggatttgggggcatggggcacttcttgtagggcgtgggggcaagtcaaggtggaggcgctggtggagggttaatttctcaccggcgtgactggggaagagaaagcggttgtgctatttggtgaagaaaacgatcgtgagagtgggcggtccgcttctacgtgattgtgggcgagctcgtgtgcatgcgggaggtgagttgctgcgggagcgcagacgaacgcgagcattcggatgcaggcgaggcggtagtacgatgcgaaggtttggcaatagtgtgtgctacgagaggtggacaacaaccatgataggtgggccccagctgtcagcagcacaggcggatgctcgggcgaggatgaaatgtggagcgggccgactagatgaatggggatcgttttttctttcttttttcattttccttttcttttataaaaccaaaataatatttataaatatattttctaaaatcatatataatttagagatattattaacataatataatacctattttccaaagaaattttttgacaacttattattattttatcaaaaaggggttttccacacaaaattaattttgataaatttgaatttgcaaatcaaacgaaacaaaatatatgctccaacatgaatgcattaaacactttgcaatttttttctattctaaaattatttaatttgtgtatatctccacttccattatttgaaaacataaacaattgtgttttctagtaaaaccactaagtttggttgctttatgtgatggattttgggtgttacatagtggtgggaaccaacactgttttggaggttgttggaccgaggttcatttggacatgaagttagccagagcgagactattaactaagtgacagggaacaatgttgaggtcaaactttgtaagctttatggccgacattttgcaatgctcttggttgcatgctaattgcattggaccgctcctgctggaaaggacgtaaccactaagaccaagtactcttggaaatagtgatatagcttctaggacatgacaagtatcatgtagagaatcatctatatctatgagtatcgtaactttgcatcatggagaacttcacaagcgaagtaaaccgtgcatttgacacaattatttgcatggtgatagggtgttatctcaagaaggtcactacttggagggacaagggcgttagtgggagaacccatggactctaaacttgtcttcacctctataggcccacccaactcacgcacaagagaaacaacctcatctatttttaggttaaagtcattatgggccccagtaggaccaaccttgttccaatattcactagggactctaggagatgtctcggcctgaagagttcatgggagggctcaatagctacgaggggctccaagctttcattagggattgatctaaacatctttactcaagtaggttatgggtgggcccagcggcaacactaggttctcaacgttcagtagagccctcgaaggtgtttagagccctgagtgttaacatgagggcctagcactagccatgggctcctgaccttcactagatgctccaggagccatctagggccctgagtgttcataggaggacttagtcatggtcaagggatcctagcactcactagaggatctacaagatatctaagacactaatggggtgtttggtttgaggaatgagctagtctgtcatcttctcactcttctttatttttgtttggtttgtggaatagaatgagttgatccatcaccacctcattcctcatagttagttagttaatactaatatgaggaatgttgtcatcccaccgaatgtgagtaatgaacccatgatacaccacctcaatttggatggagtgattcctcaaaccaaacactctataagtgttcaatggagggctctactagtagtctaacgggagacactttgggcctcgagtgttcacgggaaaggcctaccggcagttagaggcttccaataatcaatgacaaggaccatgttgatgacatttgtggtctcagagatgtataggtgaatgggatcacccttcttcaaggccaccatgactggtgaggaggtatgcaaagcctattatgatgaattaatgcatttgaagggactagatccctgaaggagcttgaacaagggtagaccacactatcatagattggaggtgaagcgactaagtgtcaccatgcacctggtgaggcgctggagtagccatatgttggtcaaatgatgcatgggctcaatggactagactttgtctaagttggttttgattctcgtgtgtgatactaggaaactaaggagttttcccccaagatatccaaaatatacaattttctatgttgagtattgtgcaggtttggttaaggctataaaaaagtaatcaggtcctagaggatcgaatttgtcagacctagatttaagggcaaaccgggagcgaaccaaatgtgtgctaggatcaggtctcacacatatgatgactcatggtacagaaatgaatgtcacatctttactatataataggaattatgtacaaaataactaagcaattacatcatacgaagacgatgatcctacaaccgtagttgactgggagacgatggcctagacctgtcacgaactcattgcagcatccttcatgctccttatcttgtggtacctgtccttgacctgtggggatgtgagtacagcaagtgtgagctcacatacgttcatcgctcaacaagttgtggggaataatgtgcatgagctcacttatagtggggctcatgtgaagtgtaaggcttaccaaaggggatggttaaatctcagcattgcttttaaagttcgtcaaaattttattagcaattactaagtataagtaaataccgaccaaaataaataagatatcataattaataataactcccacaatgcaatgaaaataacaaattaagtttagttccataaatttatcatgtgagggtccgagccgctcatgaccgtgagcatggctggtataccggttctacactctgtagaggttgcacatctttacccacaagtcgtgttacccatttgccatggggtcatgaatcccatacacctctactgaggaggcgaggcaaggtagcactacgaggcctttccaaagttccactagtttgagaaaacccactacagattcaggaagaaggaagcataggaatctctcgtctgaaaagtcatcgcagcagttcgacccgaggacctccctatactctgcagcgatgcctccccgcttgccctttcgggtaagttaatctctccctagctttcctaattacttggccaagcgtcccattccacccttgtggtagcactattttctcgggtggttctccatgttccaattgatacaataatcttattatgaacaataattaaaccaatagtattaatggaacatgatcatatataacattaatttctcaaaaccaggtagagcaatagcaaatctacccgatagttcttttgtttgcaaggtgtgggataaacaatgctagggaaacttattaggttccatgaaattaacctcaacatgtcacagtgattaacagagaacattattaggtaaaaaagagtgatcaagggcataacttgccttagacttgagatcctaggtaccaagttggtctttagattctcgtgacctcaccgctattcgtagaaatacatacaaatagagataaggatcacataaaaataatagtacacaaaacatgagaacaaacaacgtcaaatattctacgccatgctacgagagcgtaggttcaggaatcactaaaatcagagttatggttgaaaagatatggttttccgaagttttagatggttaaatagtaaacgtataatctatgttaattagtaataggtgaaagaattattgtaaagaagtaactaatcccagttataacttgattagaagtcatattttagtcaaattatagatagatcaagttaactccaatagataatctagtcaatataggctaaaccaactagttatctatttttgaaaatatgttatatgatagtataaggttactaaagtgtaggtaagattattacgaagataacacaatttgaacggactaaaacagtgttagaatggagaaaatatgaattatctaagttttcccataatttatttttgtattataaatcaatttccatattttcttataaagcgaggggctgttttgcaacttccagggacctatatgtaagagattaccacataagggggacgatgggtttatttgaacgaacccgggggactcttatgcaaaagtgccttggccgatagggtatccttcaatactggccgcccgatcataattccttggccaagattagatcctggacagtaatgcaataaggaccatgggatccaggatccacgacccagatttaacattactctatccaatctggtgcgttttactcggatcggacgatgagaaattactcgtcggagttgttgctagagtttgggcgggagtcaaacttcgacgagctggtcatggaggcttatggctgcgagcttagctggcggcggcctgctgttgcttgggtgatagcggtgttgccgcgaggctatagaggagatgagtctatgattgatggcttgtggtgttatggtggcatgtaattatataggctgagaggtgggtggttacatgatagatctaatcttgtacttatctgttacaatcctatcctatcttttatgaactctaacaaactcgaaaccaaatatgttagattacagatctaatctagtacttatctattacaatcctatcctaggtgggtggttacatgacagatctaatcaggtacttatatgttacaatcatatcatatctgttaggaactataagttatctattttatttcaattatattgttgttaatttgtactaatcacattagaccttcaatttaaataaatcttaaaatatatttttatttaatattttaaattaaatttttgggtgttatacacaagctgaatggagtattttctttaatatcttattgtgatatcctaatttatatcgactttacctaaaggacgtcgtgtacaaacaaaccaaccaaacatacatcgatccattatattagcttatatttctaattttttctttctattttaaacttaaaattcaagtctaatttagagctaagttaaattttctatttcaagcataaattgcaacaaacaaaaactcaacatgaatgcaaaacatttttattttaattaatttatccatttaagcaaatgaaaattagtaggaataattcatgtacgatgttttacaataataattattaaagaaaataattcaaacacatagccacattttagaagtacaataaaataaatctataatcttcacatatttatttaaaaggatataatttcttatgtaaaatctatattaagagatagtttaacttaattctttttttagaataaatctttaacacaaaggaggatagttcacgtaagaatctttttaggtaatctattatttgaaaacgcatttatttaaatcacgaaattagttttcctaatttatctagaatagaattttggagtgttacagaactgctctgacgggatttaaccataatattatgtacatatatcccaaccattttgcttatatggtttcctaaagcaatgtgtgtttctttcacaaaggcagataatgcaattttccaaacccttaggcatattaacgtaacagtttaggccctaaggagttataaaagatgtttttctcatcttctatagtcatgctaattttgttgtaactagagtaagcatctagaaaagataatagttgtcaccttggggttgattctactatctaatctatgtgagggagagggtaaggatcattacgacgtgcctttttgaggctggtgtagtaaattcatatccaaagtttgagccccgccttagggacaatatgggattggctagccactttgggtgcctaacctcacgaatgaagccaatgaggaggagattgtcaaccttagtgcagatgaagtcttatcgctctatcgactattttttgcatcttttgttagatgggttgggcattgggacaaactgctaaatagtgttcaatcaccttcctagggagctaggcatgttagaaggttgtcaagtgaatgcattgatatttaactggacgaaggtgatgagcgtgagttcctattttgcccgcaaaatcccactaatgcagtttgtctaggaggtgcccccatcaatctgcacgaccttaatgcagactagaatactagatcatcacatgatgggcattacccatctctaggtttgataacctaaacctaagatgagctaggagatatcaagcccacaggaggagagatatgcaccaaagtgccaaccttaagaccctcatgagtgggcacccttttgggttcttagctatagagccatgcaccacgagcgtaggcatctttttaactgcaatcattgcctcaatgtgattagggggacaagtttgatgcctttaggtcttagtatcttaagtactaggtacccgtagtgagcagctgtcatgaatttgtagagcatggggcacatgagaataacattgtagggtttagtaatgatgaagtccacatactcgatgcggaagatctccttggtgtcgaaggtgacttctatcctggtggatcctataggaagaaccatccctagggacgcccccatgaaagggctaatggtcaagatctcggcgtgcgagatctacatctacatctcatggaagtagtacaaatacaagatgttgaggtcgatcctattataaattaggacatgcctaagcttgatgttgttaatggtggggaacactatgagagggaggattcttgtgcctgccatgttatgagagggacactttatagagattttggttgccttagtataataccctatgtcctctgtgtgttcgatgtatagatgcaagcatgactctagcttagatactcacgtgaactggatgagggagtggaactaaggaactatgggaaatatcctagctgcaagttaggactttgatgtatcccctctaatgtattatggtcatgtttatgtgtgcatgtgtctatgtctatgtgttccaatgtttcttcatacataactctcctcctcctttttataccattaaggaggatagaattatcttcctgcttgcatggtggtacccatccaacggaggtttaactactcctaacttgtagttgtagtgctatatgttgggcacttatttttgactcctttgggtatcaaaagcaaggcaacataatgagattgaatctaaccttcatctttaaattcaccttctttgaggagaaggttggatttaaagatgaaggtgtgacaataattaataatgacaatgttaacaaaatagtaatttgaagaatatagatatgaacatcaaagatatcatgtaaacttatcaacattgcttacttccttcggttttttcagtatcaaatcacagattacatttataactttagctttgtgatgcttacaagacgaaggaagaattataacttcatagatgagagctattcgccctttatctgatcataagatgtccaaatacatggcactattcctttatttataagtacagagtacaactttgataaaattacatttacatcctcaaggttatacatttgagctatttagcatggcgagggtgaggacgtcttttcctatcaccgtcttgatgagcgagtccaagaaggcttgcttcgactttgtctggcttcaccctttgtccttttatgatagaatcccaaagcttgtttttagtctatgaccgattcgtccgaagatgctttttgaatgagtgcctgtaatacctagaaatgcactagaaaacaattgttatcttggtgttttgaggaccttcagaaggagaaggcccccaacactatacataatgcatgcctctcatacgctactatgttgaccatgtgcatgttgcagtggtaggtacatgagaccgtactatcgagtataatataattgctaggtgatgttgctacataccctttatagtgcttgagatacttctgttgtcctagcaatggctacaacggatgttgtactcgcacacataacatagtgtttatgggtacacctatagccccaagaacgacaccgatgatttgaaccataatgtcacccatcgcaacaaatatgatgtaaaggagcaccaacttatttgtcaagcaccatgtgccactttaatcactatagcatgtggcgctcgaatcatatcttctggtatcgtgcaatcctaggggcatctaagaaatatcatagaacctttgtagggcctgagaacctgaccgatttgatgcttgccctccgaggcagaggccatgggacctatccattttaaggcttggcctctaggcacaggaccccaggagtgctaggatggcttggcctctagggcgaaagccacatgacctgaccaatttggggtttagccctaggagtactacgacggctcttagtcgggtctaccgtgagtttatctcctcctaatggaatcctagagggcgctttgctagcatccgaggatatgccttaccttgagcactggaaataatgtacacatcttttgatacttatttggatatcaattttttttgcctttttcctttgattacgaataaatgggtcacaaaatctactatgcaaattcgtattcttgttttaagtattgagcttgcaaaattttattgttatttgtaataatatgtttgataacataagaaaagatcaacatcaaatttcatacatatctatttaaaatattaaatttgttttaacaattcggatatctactttcatccttattagatttaatactaggtgtgctccctaacctatgaagattctttagtgtaacctgttcaaaaaagattattcaatgtatcctctttttttttgctatgacgtttcttttggttcctgaggctgagtatatgcaaatttatatattaattatcaataggaagcaagagctctccttggaagactggaattcca

SEQ ID NO: 1122 - DNA, 1176 bp, Zea mays
  Intron number 1 from transcript GRMZM2G028218_T02 (locus G RMZM2G028218) derived from phytozome v7.0 (chr-ID 5; pos 4 686537 to 4687712 reverse strand)
agaaccaccccgacaagggcggcgaccccgagaaggtgagcgcgcgagctggtcatttcgtctggctccgacctgtccgcggcggggagtagtaggcgggttgtcaggtttgcggcgatgttgagacggtttggctgggtcgatttcatatggtgctggtgcttgtgggttcggagcggtggtttggatctgaggcggcgtggatttagatgagtttaatgtgttggggtagtggagggaattcgtatgggcaaggagatgttgcatggaaactgttatgaatattggttgcgtggaaagtgttaggattgttgtctgctatggagacgcatctagagctgttcatggacatgcctctggaaattgtagctctatgtggtatcgttagtcggatagttagtaattaattattagaaactcgttgataatgctagattttttgattcgttctatatcatcccatcgtgtctatatagttatattttattgatatcgtcttaagtcttgttagacctgtctgttgttgtgtaatagtagtagatggttggtttgatgctataatatggtcaggctgtatcttctgatgaaaatgattgccaatctttatgtgaggaacagaggggcatgcttggttcagtttacctaacgctgtatagtgatctaccggtttgaattggcatactgattctaaaaactgatccacttatttgaatccttgagttgttagatgaatgcactgtccttgaattgtggataggcacatgcatggttcagtttcctgaactgaatgctgtagttctctctattcattcgaattgtcaaactgattctgaaattatgatttaactgatttgaatccctgaatttgttagtcctgaaagatgtgaatacacacattctgcttatgacttatctatatacagtgtggttacttgtctgatatgtagtgcgttttgatttcctagaatgatttatcccatatgttgttattctagtgttgctatgatggtgttttgctcttgcctgatagtgtgtatatatcattttgcttaatctgcatgagtatgacgatgtttggttacaaggctgtatgaatggtcgaatggagctgttgatttatgattaaaaattaatgtttcatgcttctatttcagttcaaggagctagctcaggctt

SEQ ID NO: 1123 - DNA, 17242 bp, Zea mays
  Intron number 10 from transcript GRMZM2G390374_T01 (locus GRMZM2G390374) derived from phytozome v7.0 (chr-ID 3; pos 119617271 to 119634512)
gagagaacaaggatcttgatcttcctgctcacaaggtacttctctttctggcttgcattaagtgttagaatataatgtgcttgtaaggttatggtcatatcagatcaggggtctacacggttgtgatataatagagaaagaccttaaactcggattaaaaatagaatcaagtttgatctatcccagagatagcagagttagcattagagttggttaaggtagttgtactcgagttggacttcaagtcatattgtaatctgctcagcctcccttggcttaataggtcaggatgaacaacttaaacctggtgccatgtttccttacatggtaatcagagccaactcctccacccacttctagaatcatagctcacggtaacaagtctctatggtgtctacctcaaactctattatgccaacacccctcctaggactattcatgatggtaaagcttttaaaaaataactccgcgctctagaagacacaatctctacctatcctcaggggtgcgcagctacagggctaccttgatggctctgctattgcaccagaagagaagatcaacaccaagaaagacgacgattcgttagataaacacaaactataatacatttgttggaatgttgcactagaagagaagctcaacaccaagataggagatgattcgtcaagaaaactcaattcagagtacacccgatggacagtgtttaaaaacaagttctcagtttcttcatgacctccatgactctagaagtcatgagtcaagtttcaacctacgagactcccaagaggtgtggtttgagctccagaagacctaagtgtcttagtctagggtaaggatagtgaacatgaggatcaccctggcaacaaacaaaaaaggtaacataacttatcaagatgaagcctctagcagatgagatcacatctacaaagaactcatctcgtacaaagaactcatcccggacgaagtgcaggtcgatctccacatgattcgtgtgctaatgctgcacgggattggtggagaggtagacgacgctaatgttgtcgtattagacgagggtggcacgctgaagggggttgtggagctcgtggaggagctagcgcatccaggaggcctttgccacgccattggccacagtgcggtactcggcctcggcactggagcgggagacgacgagctgccgcttggcagctcaggaaatgaggttgaagcccaggaacatggcatagccggaggtggaccggcgcgtgtcggggcagcctgcccagtcagcgtcggtgtagaccacaagttccgacgtcgaggatggtcggagtaggaggccgtagtcgagggagccgcaaaggtagcgcaggatccacttgagagcggtgagatggggctcccgtggagtgtgcatatggaggcacacctgctggacggcgtaggcgatgtcgggccgggagaaggtgagatactggagcgcgcctgtcaggctccggtaagaagtcgcgtcggcgaccggaggcccgtcgtccttagagagcttcggctgagtgtcgacagacatggagcagggtttgcagtcgaacatgccagtccgctctagaatgtcgatggcgtactggcgctggtgcaggaagagaccctgggtcggcgtttggcggtgatgccgaggaagtgatggagaggccccaggtccttcatcgcaaactcctgctagagggcgatgatcgtgcactgtaggagatcggcggtggatgccgtgagcatgatgtcatcgacatagagcaggaggtagacgttgtcctagccgcgccggtagatgaagagtgacgtatccgacttggccccgagaagccgatggaggccaagtaggaggcaaagcggttgtaccaggcccgcggcgcctgcttgaggcagtagaggaagcggttcagccgtcagactaggtccgggtgagcggcgtcgacgaagccggtgggctggctgcagtagacattctccgttagagtgacatggaggaaagcgttcttgacgtcgagctaatggatcacccaattccgggagagggcgagggagaggacggcgtgaacggtggcgaacttgacgacggggctgaaggtctcgtcatagtccactctagggcgctgggtgaagccccgaaggacccagcgggccttgtagtggttgagggagccgtccgaggtcagcttgtggcgaaagagccacttgtcagtgaccacattggcgccaggaggatgtggcaccaggtcctaggtgtggttggccagcaggggccacgtactcctccatggcccgacgccagtgagggtcagcgagggcggtgcgaacggatgaggggaccagggaggcgtccgacggagtagtggtcgtatcatcggccaggatcagcctgtcgataggctagaggacaccggcggcgcggcgagtcaccatctagtggatgtacccggggtcgcggtgaatggcgaccgggtggtaaaccgacggcttagaatgagacgccggaacgccggtgcctcgggcgtggccggctcgcggcggtgatcgacgacggtggggtcggcgaaatggatcgctctcgtcgaggggcccgggtccgtgggcgccgagggaggagagctcccgcggtggtggtagacggtggcggagtcagcgaagcgagtcctgctcgtcgacgaggccggagttgccggggccgtgcgtggcgcaggcggggtcgacggggccgcgcgtggcgcaggcgaggtcgacagggccacgcgtggcgtaggcatagacgatggggccgcacgtggtgcgggtagaagtgcgagcgggtgtgtcgaagccgcgtgtggcacgagcggggtcgacggggccacgcgcgagggcggtgaagccgcgagaggcatgggcaacggtgcgagtcgaggtgcctgggagggatgggtgctcagatcagactcaaggaggaagtcgagatcggtgggtggggaggagccagcaatgggaaacacatcttcgttgaagacgacatgatgagagatgatgatgcgatgggaggtgaggtcaagacagtgataccccttgtggtaaggggagtagccaagaaagaggcaacgagtggagcgtggagacaacttatgaggaccagtagcggaagtgttgggatagcaggcacaaccgaacacgcggagatagtcgtaggaggggggttgtgccgtacggggcaaagtagggggtggggtggctcactgccttcgatgggaggtggtttaggaggtgggtggcggtgtgcaaggcctctacccaatagctggcggggagagacgcctggaagagaaggcatcatatcatattggtggtggtgtgaatcatgcgctcggcccggccattctgggtagaggtgtaggggcacgagagacgcaactgaactccactggtgaggaagaatgacctggaggcgtggttgtcgaactcgcgaccattgtcacactgcagggcacggaccaggcgacagaatttggtggagacccaggcgaagaagtgagggtggtaaaagtgtcggacttcaaccgaagaggaaaagtccagagaaaatgggaaaaatcatccaaaattaccaaatagtatttatatccggaaagactaagtataggcgaggtccagaggtcacaatgaaccaggtcaaaagtctgctcagcccgagaagaagaggtagtaaaagggagacgagtgtgtcggccaagctgacaagcatgacacaggccctcaaaatgtcccctattacaagaagaatctaaactactggaaagcttggtcatgacgtcaggtcctaggtggccgagacgtcgatgccaacggtggaggtggtggagaccaggacgagaggtggagacacgcaggtggaagagtgccggagcgtgtagagggccccgacgctgtcacatcgggcgagtggggtcctggtggccagatccttcacagaaaaaccagaggggtcaaactcaatggaacaagaattgtcggtggtgaaccgacggacgaaaaggagattgtgggtgatgtgtggggctacgagaacgtcgttgagatagaacggtccagggagcactgaggcacctactgaggtgaccgaaagagtggaaccgtttccaaaaacgatcgaggtagggtgtgtgggaggaggtgggtgtgagcaagatagcatgccttcggtgggggtggtgtggtaggatgcaccggagtcgatgacccagtcagaagctgatagagctagcgccatggtgctgtatgcggcggcgagagaggctgggtcctagcctccagcgaacggggaccagggtgtcgtggtaggggtccccgtaggcgggagctgaagcggggccggggtcgtcgggggcacgccatacggaggcatgccgtaggtaggcgacgaaggtgcgccgtagggggcgcagttaggagagccggcgccggcgtcggatgacgggaggcactgggggcctgatccagccacatggagatggtgccggtccaggggttgtagaatgacgtccagccttggctgccaccccggctggtggaacctccacgggtggaactgccgcccccacgttcgcccttgcgggggcgacggcgatggcggaagcctaacgggggccgcaggggccgtggcagggggccgagcgggggacccgattgttggagtgccgggggcctatcccccggaggaagcctgagcactaggggtggtgctatagagtgccgataccggagtgggagcctcgattgtcatggtgagctcctcgaggagaagctcattccgcacgacatggaaggtgagaaaaggcacgatcgtcttgatcagagctttgaggtggtcgtagctggggctgagaccacgcaggaggttcaacaccaaggtacggcccgccaccggctcatcgagatcgcggagggagtccgccaggcccttcatctggcggtaatactcccccacggagaggccccctgagagaactgatggaattgggcgtcgaggtgaagggctcgagcatcccggttcctgaggaactgttcctcgagagcgagccacgcctgatggcccgtgttcgcttggtcgcagatgatgtcctggagctcgacggtgatggtgtcgtggagcaaggagagcaccatggtcggggactaggccgaggacggcggggcaacgatgtcgtcgaggatgtggtcagcgagagcatagcgccgaagggtgaggaggacctgccctcgccaacgagggtagtgggaggatgttgggtccaagacgatggacaggagggcccagatgttgtgtagaccggcagcctgggcgtgaagagcggcgatgtggtcggcgtcgagttcagaggctatgggagcctcgggagtgggcggaggcgactcagggatgacggcggagggccacggatgaggagttgtgcagtggccatctgtgcggtcagagcggcgcccatggcacactcttgctccacggcgtgggacgcggcgcgcacgcgctcctgcgaggcagcgagggcagcctggatggtggcaatggcggcgaccagcgcggagtcggtggatggcgcgacaacgcgtggcgaggtccaagtggtgtcagcaataggcaggcgaggagcggtgaagccgggggggaggctacctagagaagccggtcggggagagggccgcaggggcactgaggtcacccatgaaggcggggtagccgggaggtctaggtcgccgtaaaggctgctggggaggagtccagccgcgcgtgcgctggctgcggcggcagcaaccgcggtggtgctgggcgcggtgtggccggtggtgcgggcgtcagtggcagcggcgacgacatcgaggggcgtggccacggtggcggcggcgttgctgggatccatgggcggcggtcggaggaatccgacggcggcgcggccgtagcagggagcgccggcggcggtgggggtggaatcctggtggctagggaccgacggcggaaggggaggggcgtggccggatcaaggtcggcgccgccggtgctggggagggcgggaccgtcggtggccggcgcggggagtgcggacggcggaccgacgacgaccggcgcaggaagggtgggaggggagggggcggcaatgaaagtcgcctagaggggggggggtgaatagggcgaaactgaaattctcaaaaataatcacaactacaagccgggttagcgttagaaatataatcaagtccgcgagagggggtgcaaaacaaatcgcaagcaaataagaggtgtgacacgcggatttgttttaccgaggttcggttctcgcaaacctactccccgttgaggtggtcacaaagaccgggtctctttcaaccctttccctctctcaaacggtccctcgaaccgagtgagctttctcttctcaatcacttggaacacaaagttcctacaaggaccaccacaagattggtgtctcttgcctcaattacaagtgagtttgatcgcaataaggaatcaagaaagaagaaagcaatccaagcgcaagagttcgaaagaacacaagcaaatctctctcactagtcactaaagctttgtgtggaatttgggagaggatttgatctcttgagtgtgtctagaattgaatgcctagctcttgtaagtggttggaagtgtgaaaacttggatgcaatgaatggtgggtggttgggggtatttatagccccaaccaccaaactagccgtttggtggggctgactgtcgtatggtgcaccggacagtccggtgcacaccggacatgtccggtgtgccagccacgtcaccaaagccgttgggttccgaccgttggagctctgtcttctgggcccgcctggatgtccggtggcgcaccggacatgtactgtagagtgtccggtacgccagtatgggcgtgcctgacttctgcgcgcgctggcgcgcatttaatgcgctgcaggtagccgttggcgtcgaaatatctgttgcttcgatgtcacaccggacagtccggtgtacaccggacatgtccgatgaattatagcgaactagccgttgcgaattcccgaagctggcgagttcctgaggcgccgttccttggagcaccggacactgtccggtgtacaccggacagtccggtgaataatagcggagtgcctctggattttcccgaaggtgacgagtttgacttggagtcctctggtgcaccggacactgtccggtggtgcaccggacactgtccgatggcacaccggacagtccggtgcgccagaccagaggtgccttcggttgtccctttgctcttttgttgaacccaatacttggtctttttattggctaagagtgaacctttggcacctgtataacttatacactagagcaaaactagttagtccaattatttgtgttgggcaattcaaccaccaaaatcaattaggaagcaggtgtaagcctgattccctttcaggcgacggcctgctcagggaggcggcgacggcttgaagcaggggaggtcgggcggcagactggcggcgaccgacacgcagggagggagtggaggggagtggcggttgactgcccagggaggcggcgacggttgctgggaaccctagctctataacatgtgggaatccctaacctttgagtgcggttgggacatgtattaatagactcgatagttgggtcagtagggacgagagggtaattacacaagaaacacctaaaaccctaacgggtactctaacaataacctttagagacctcattatctgttttgtagctctattcgccaatcttgcatactgaagtccacccctactcttgcaacccgtcggcaaagaatgaagtgtagtaccataaaccgtagcgcccaagcaacccgtcggctccgatgaagtgtagttccagaaaccatagcaccccttgggcgctttcgaacattaggagccggcaacactctagaaggttgtctggacactgcggaaaaagcacttctattggaatccaggttgtggggggtgtggtcgagagttccacacaagaacccctagaaaccagtttggagctgtcagtagaaatcaagggattagactcaagtggagcagccccttcaacgtcctaggatgactcagatggagtagccactgccccttcaacacccagttctatctccccagttctatctccatagactcaggcagagtagcagcagtcccttcaacgtccaagcgtgactcagatggagaagctactgcctcatcagcgtctagtcccatatccacagacataggctgagtagtgagtagcagcaaccccttcattgtgagctctggtagtgtccaagggtgactccagacggcgtagccactgccccttcatcactcaatgccatctccatagactcaactgtcgcaccatctaagacctgtcttattctcaaagtagtaggatttttccagcgtcgttgatagaagaatttgagtgttatttggccacctcttaccagcccggtggacacaggacgcgcaatggtatcaaaattacctgggccccttactgggaaaaagggcgccaataggtttacttgcagacagtaaattccaccattggccaaggaggatgtatactttccagctcacatacagctgaagaagtttcattaactccattttttgtgactctaaacccaccagatccgccaccaatctaaacggttggactcttcaataatggagatcatgcacatctaacgagtctcccactcagatagaaggcattgcaaaaaggagtcagcttggcactgcattaccaggagcctcaacagagcacctttcagaaagtgcaagcgtctgatttggtcccagtcggtttctgactgaacgcccctgggagaagttattctctttcaaagtggggaactggggacaattgttctcccactcccaaatgaaaccatccaagaaaaaaattgttgccgttcatgatgatcatgatcttcagcatcatcgtccaagacatcactaggagaaccagagtgtgggtcggaatctttcgatcggaaggcaacagagaaatgaaaagtaactgggtagcatagagctacggtttctccaacgccgccctcgacaacctgaacaggctcaacaatgcacaggtctcgcatagcaggaatagatgatggatcaatacaccatgcagaacacctgaagtaggacatatcttgcaatgccgaagtatcctggtccacttgatgaatcgaagcaaatgggttaagaagctgctccacagtactggtttttcatgcatgaacaggaatccctccaatttcaaattcaaccaggtatggcaaagaaactcccgaagcgcccaaaaaccttgaccaatgtttgaaaattacagagaaagaagtcgctctgataattgaccaacgactgatgaggagctctatcattgcaaagtcagggaggatcaacaagaggctagttgaggacatcctgcggatggcaagagatgtctcagcagtacccaagcgtggagcaagaagggcagcaatcttcgccgtagcaatttcacggttgctgatgattgttaacacaactgcaggccttagatctgttacttactttggattgataatagataattagtccctaaggactgtagataatatatatagccagtaggcctgggcctaatgggccttaacacccctcctcaaactcaaggtggaaatggaggatctgaggctttgagtttgatcaagtgaaactgatgttgtgctcttgtttgtgctttggtgaagaaatctgccaattgatattctgagggcacatattgaagatcaatggtcttctgctgacaatgggatcgagtaaaggatgcatcaacacctatgtgtttagtaagttcatgcttcactggatcatgagcaatttgtatagcgccaagttatcacataacagaggtatagaagtgtcacaagagacaccaagatcagccaagagccagcgcaaccaaataatttcaccagtggtagtggcaagtgcccgaagttcggcttcagcactagaacgagatatggccgcttgtttcttggatttccatgcaatgggagatgatccaaggagaatacagtaacatgtagtagaacaatggtcaacaggatcacttgcccaagcggcatctgaatacgcatgaagctgaagtgggctatcggaagcatagagtaaacatctggatcttgtcccacgtaaatatcgaagcacacgaagcaaatgaccataatgaactgaagtaggtgttgatacaaattggctcaacgtatgaacagcatgagcaatatcaggtctggtgatggtgagataaacaagactacccacaatatgacgataccgagttggatctgctagtggtgtcccatccttcggacgaagttttaaatgtatatccatcggtgttgcaacagtgcgtgtatcagtaagtccagagcgatcaagaagatcttgtatatatttggactgagatagataaaagcctttttgagtctgctgaacttcaatgcccaagaaatagctaagcggtcccaaatcagacatctgaaattccttactaagatgttgcttgacatgagaaatatgttctgagttgtcacctgtaatcagcatatcatctacatataatagtagtaaagtacgaccttttggagagacatgaacaaacaatgcaggatcatgttcactagaaaaaaaaccagcagctgtgatgacagagatgaatcgctcaaaccaagcacgaggagcttgtttcagcccatacaatacgcgacgaagacgacaaacatgacctgagggagtatcaacccctggaggaggatgcatataaacttcttcttgcagatcgccattaagaaaagcattcttgacatccatctgggagattgtccaagaagatgaggctgcaactgcaatcaaggttcgaacagtagtcatatgcgcaacaggtgcaaaagtctcatcataatcaagtccttaagtctgttgaaaaccacgggccacaagacaagctttatacctctgaatggaaccatttgattttgtcttaactttgaagacccatttacatgtgataggaacaacatgcgagggtaaatgaacaatatcccatgtaccagtgcgttcaagagcagccaattcatcaatcatagctagctgccactcaagaatcccagaagcttcctgatatgtagtgggttcaacaattgctacacaagcccgtggaaaaccatagcgatctggaggttcaatggtaccacggtcacgaagacggtatccctgagtaaaaatatcattagactcattattgttagtacaagaatcaggtacaagatcagtatcaggaccagccgtaggaatagagcgggaacgacgaatgtatgtttggatgataggtggtttggaagagtaagaggtggatgacacgaaggtggaaggtggtgttatgggaatgagaacatcagatgtggatgtagaagatgatggttgagatgcaggaatggaaggaagacacatgaaagaagtagattctgtgggataataggtggagtgagtagactggttgtgaaagaaggggcgattttcattgaaactcacatctctagaaatctgaatacgacgagtagatggatcataacaacgatagcctttgtgttcaggactgtatccaagaaatacacactctatagattgagcagtcaatttagcccgctcacgtggtggtaacaagacatagcatatacatcctaacacatgaagatgatcatatcgtggagaagtcccaaaaagaacttcactcggtgatttaccagaaagtttagatgaaggttgtctattaatgagatacacgacagtggaaacaacttcactccaaaagtgcgaaggtacaaaagaagatatcaaaagagtacgagcactctcaataatatgacggtgtttgcgttcagcaacaccattttgggcatgagcaccaggacaagttgagctagagtaccctctatggtcaatatctggcgaaaattatcagatagcggcgtttcatgaagtaaatccaagtataacgagaatgatcatcaataaaaatgacataatatttatgaccacctttagaaacaaacggagctggaccccaaacatcagagtgaattagatcaaaaggtttagcagaatgtgaattactagtaaaatatggaagctttatttgttttccaagatgacaacctttacaatgaaaactagactcaacatgagtagagcctaaacatcctgactttattagagtagacagacgagatccacataagtgacccagacgatgatgccactgggcgaatgacgtcatggggcccgaagcagcgagtacatgaggtgtagtggtaggggatgaaggaagacgcaaagtgtccaagatgtagaggcgaggcgaagatttacggcgacgaccagtcccaatcacatcctctgttttgcgatcctgtacaaaacaagatgagtcatcaaatccaacaaaacaattgtgatcggtaatttgaccaactgatagtagatccatggataattgaggtacaaaaaatatattggggacagtaaaagttggatcagaaagagaacccttgtgggtgacatgacataatctaccatcagccgtctgaacagaagtaccctcggtgacaggtgtagtagacgccagctgtgactgatcagatgtcacatgaaaggaagctccagaatcaagaacccaagatgatgacaaagcaccagcagaagaagtagcagcaaccgcaactgagcctcgaggagatggtcttgtaccacgaccacgagtagcacgacggacacgaaaatcagccagcttctctggaaacttagcaaagcagttctcagaccgatgagtggtctttttgcagtgttcacaaggctaaaaggaggtgttcctagacctctgagcagcagccaacacactatgagaactcacaccagtaatagaggacatagacttcagacgagtctcttcagcaagcaattcggacaatgcctgagccatggtgagagtatctgaactgtgaagcagccttgcacgaagggaatcaaattcaggtcgaactcccataacaaatctgtaggtaaagaacttctcaatgaacttgtgggctggacaaggcacaactgtacaagcgggcaccatggaggtcaatgcactcataagacgatcaaaggcggaatatattcatcaatagacatatcatgttgctcaatcacatgagtctgctgcataagggtatgtaaaagaacaccactatcctgaacaaatcgatccttcagatgtgaccagatagccttagcagtggtaaatttggacagactcataatcatagttggtttagtgctattgaccattgcagccattaccttaccatcattgatctgccaagtcttgattgcagcagcattgcttctatcagctgctaaaactggagaatcttcagtcaaataaaatagtaaaccgtgacctcttaatgcagtctgaacacaaaaggcccattctgggtaattctgcccatcaagcacaatattgacaacaatagcgttgaccgacatattgaggagcaataaaacaatgaagaataacagatctgaaatagactggcttgatggtaccaaataaaagaaaccctagcgggtgcagcggatgaacagtagatacgccggctgcagtcttggacgaaaccgtgcccagtcacagtagatcaacagatctagccaagtcgcactcggctcagatacacatagaatctggcagagcagaacttgcgaacagatggccgcaacactcgaaggcagggggccgatggcgttgctgacggaggcagagccacgacggcggagcaggggcggacggtgctgctgacgaatgcagggctgcaacgccggagcaggagcggatggcagggctgcaacgccggagcagggcggatggcacggttgatggagcagaggcggacggcgttgctgacggaggcagagtcgcgagtcagggtcgcgacgccggagcagaggcggacgacgagcgcaggggcaggcggacggtgctctcccgcggccgcgcacgcagaaggatggccagcagaggcggacggcactgcagacggagcaggggcgcgcacaaaggagcgcaggggcgggcggacagtgctcttccgcgacggcggctagccgcgacggtagctgggggtggggggccgcgacagagcgcaggagatggccgcgacagcggctggtggtgggagggccgcgacgacggctagaaaaccctaattgtaacctcctctgatgccatgttacttactttggattgataatagataattagtccctaaggactatagataatatatatagctagtaggcatgggcctaatgggccttaacaagatcatcttctgccgctgccagcatgatattccagcccataatgcatggcgatataacaccatgtggagccttggagttattacctggagtgatctacaatccgccatctttgggattgtccgacgccaggcttccatgtcttctagtcgaacttcgtcacttacgcgtccaacaccgacgaggatggccgaccacagcaccggagtcatcaccaagaccaccactttcttcaccagaccgctgcgaggaccccatatgcatcacgaacatcgacgatcctctaggaagagccgggggagcgagccgctcacccatcacaacttcactcagtacttcagagaaattgaggattgatgaagacgagttgctagagctagaagatgcaacaaggtacacaagcattatgggtgccttacagtacttcactctgacacgacctgatttaagttttgcagtcaataaggtgtgtcagtttttgcatgcacgtaccacttatcattggagcgttgtgaagaggactctcagatatgaagtttactcttgaacatggtctaaaaattgtaatgtcctccccttctatgcttgtgagtgccttttctgatgcagtttaggctggtgatattgatgatagacactctataggaggttttattaaagtgtgatatatagaaaccgtagcaatgtttacaagtcggacgactagctggtcgagctagagcagcgaccaggtgcctaatcgcgattagggcgacgattaggatgcctaatcggtcctggtcgacctctggtcgtctattagtcgtcctatagatttatggacatatgtatatgtatataactataatactatatataagcaataatggtagtctacatttctgcaatactccaatagagtgacattatataagtctttactcttaaaaagtagtaacatactgaaactgaaagtaatataggcataaaattaaaactgataacagtagttactgaacttagtagcagcagaagtgcagaactgaaagcagaagttcagatgacgagctcgtctcgactctgggtgactgatgttggtttgctggactggagagtggagacgccggcacgctgccgatgggctacagacgctgccagagaagatgactggagcttagagcagccgtcggtgactggaccactcgacgccgatgactggagctggatggcgccagagagcagtagggtttacgcctgaacaaaggctggcggctggcaggttttgtgttaggcaggggtagggtttcggctgaccagggggcaacatatatgttgctactgtaaatgggccgaaaaaatgagttaagcccattagcccagtataaacgcgcagacgtcaatgggcaaccagattcctaacgatcggacgattaattgcccaggtcgacgactagacggatgatttggatgacttggaaatctggtcgcgtcgtccttctaatcgccaactaacaggcgaccagcccgactaatcgcgattagtcggacgacttgtaatgcacaagcaactgactagtattggtaagaatttggtgtcttggtgtgcttgcaagcagcccacaatctcaagattaggcactgaagctgaatataaagctatggccaacacaactgtagaattgatgtgggtgcagtcccttttacaagagctgatggtttcttgtcctcctactgcaaggatttagcatgacactgttggagcaacctatcttacagcaaatccattgttttatagtcatatgaagcatcttgagattggtttttattttatgagagggagtagctagaggactttcggaggtcagaatcatatctacaaaagatcaagttgttgatggctttaccaagataataactatacagattacagaagatggctttatctagagacaatcttaacttgtacaagttatgattgaggggggtgttataatagaatgtgcttgtcaggctatggccgtatcagatcaggggtccacatggttgttctataatagaagaagaccttaacccgactccgattaaagataggatagaatcaggtttgatctatctcagagatagcagagttagaattggagtcggttaagttagttgtacctgaattggaatccttgttatgttgtaatctttatggcaatattctgctctacatatactcagtccccctcggcctaataggtccgggtgaacagcttaaatcggatgttgtgttttcttacactatgacccatgatagatcactacaccgattcactttgaagggtcctttgaaaatcttactccctctgtttcaaattataatttattttgttttttagatacatgaattttggtaggtgcatagcaaaatctatgtgcctagaaaagccaaaataccttacaatttggaatagagtgagtattatgtaacatggaattttctggcaaacagatggaacggggctggcactgcatctccgcctacatgatgcttgcacttctttcagacttatttgatatttttttcagagaaaatattaatattactagtgcaacacaaaactaataaatcacatgaaaatactcatattggagcagttaaaatattagctgctaaaaatatctggatgtttttgcttatgtaatagtaccaatattttaaataaaatacccaaacctgtttattgatgatttacttttatttgctttacaatgtaaggta

SEQ ID NO: 1124 - DNA, 1069 bp, Zea mays
  Intron number 7 from transcript GRMZM2G115138_T01 (locus G RMZM2G115138) derived from phytozome v7.0 (chr-ID 5; pos 1 02549015 to 102550083 reverse strand)
ctggggccaaggtatgtgtgtagcatgttacaactaattcagacatttttcccccaaatgagaaatctgaagattatagctgctcgtggaattgcagggaacaagccgtcctacgcattaccatgtgctacgagatgacaacacgttcaccgcagatgtttacgggctgaatgcatcttcttttctatgcgttgcaattctgggtacttatctggaagcagcttgctccaattgaaccagaaaattgaagttgtccatatccctagaggttcttacatgtttgtttggtgtctatacagtcctaattttctcccagtcttgcaaatttcgggctaaacttgaaagcagatacattaaacaacctagatactgcagaatacatgcttatgtgtatgtattatgtaggtcatcttccttcatgtttggtgcactgtgctcaaaattttaacatgtcccatattgtttttctctctttttaccaacatcatgtgaacccactcctttttttgtaaccacgaaattaactctgtgtattttgcttgcaaaaccaattcaagttcaattatgctacatttttaattagttacacttgtatgtatgtgcattttccatgcaatttcatagttttgcattagttgtaggtttgaaactgcattagcatgattgcaggaatacattggattttatgttttatcttgaggtaacgccccattttttcgagccaatacatgcatgttaacattatgtaaattcatgtatctaggaacccgcctgacttagttcaataagatacaccaataccttgagcatgggtcctccacaatgtataagtttatctctaaatttcttaaatttagcgtgatttatatgatcagtgtatttttcatatatttctttgctaaatttgtgagcagtaatatttcatacaacagacacacatttttatatgatctgtcggcctggcgcttttcttgtccagctttgcctctggatgcgtgtgggttttggtttggcgatggtttttgtggggaaagtggggaggaagaacagcaagaggtggtggtggagc

SEQ ID NO: 1125 - DNA, 3408 bp, Zea mays
  Intron number 1 from transcript GRMZM2G323353_T01 (locus G RMZM2G323353) derived from phytozome v7.0 (chr-ID 3; pos 4 883462 to 4886869 reverse strand)
ttttgaaggtatggctattcactatttattctgttacccttttggatctactgatgattataagaatctaaatagtaggattgaggagatagtggattgttcaagtttgcgtggttatctagttgttatccatactagaattaaaggtgtttgggtctcattgttatatttgcagctgattcttaaaatctatggatccgaacgcacagttgttgcgttgtcttttttacaacattgcagttgctttactgcagtagctcccaccaaatggttggattcatttagttgcatataaatgtttttttcctccctttatactatgaagtggagaagggcgggcctggtgcagcgggtagagcctaccgtctgtaaccggaaggtcccgggttcgagccccagcctctgcatattatgcgggtaaggcttggcgcttaaagatacccttccccagaccccgcacagtgcgggaagcctacggcactgggtacgccctttatactatgaagtggcgtactgcttactgaaatcagactatagatttgacggcattgcattcctttttcccgaaaaaagaaagatgaagaaaggaattgtgggccgacgaagtacgtcgatctgaactttataacttcctgctgtgttcgatgcatgttcttgaggtttttaaataaaaaacataaccgaagttttagcagctggagaaggtttaaattatctgaaaatgtccagaatagacataatttattataaattgtccactgctcttttttgttgaccaaagcgcagaaggatgctacttttactttatactaaagcaaggacatcttccatctgtgtatacacacatactcccggttcaatatataccaatttttttaacgtcccttggtgaaaattgcctagtatttggaaccggaggattgtagttttttttgggagacggacacactgtctaccaaatttcaaactgttccgctcagtctcttccgggccaatatccacctttgactgtgaccacaaatggcaggtacgtctctagtcagagttgttgcccatctgacgatcacgggcatgaccaatcgttggaatctgtcggttgctgcagcatcggcatccgtatctctgctgttggctgcacgtttcagcgtcagctttgcttgtagagagagagagcctctgcagtctgcatcactttgtatctgctttatgctgtcacaaagattggtcaggttactaaaaaccacaccatacacagtttcacacccttcaagcctgatattgggtttcaggatcctggttcagctctatgcaaatactgatgccgagatttggccattaaccaaaatcctgtaaatcgtttgccatggggcggcagcccagagcatggaggtctgtagggataggctcatgattaggattagtggataaagattagattagataaaattaagttagttatatggtattagattagataagattgagttagttacttggaattagattagataaaattgagttagttacttgggggccaagtctttctatctatataaggatgagttgtatctcctaagggggaatcaatcaataaagaagaattagttccagacctctctaatactctagtctctcccaagctgactccacccatctatcttcttggcgctgtttatccccttatgaactaggatccataacatctggtatcagattccaggtcatcctctccaccacttctgtcacctaaatccatctcttcaccaccattcgacgcaacctcatcaacctctgctatggctgctatggcggaacccaacacatccaacctagtcaccatcatgcaatcccttgtagcaactgtagaatcccccaagctttcgggcgccgaactccagcaggaccgccgaaccgagtccactaccctaggcgggaagggacaacacaccggcgatcatcaccaggattgacccctgcggttccagaagttggacttctcaaagtatgatggcaaaactgatctattggtgttcctaaaccgatgtgattcctatttccatcaacagtgcatcatcgacgaggaacgcgtgtggatggccttctacaacctcgacaacgtcgcccagttgtggatcatccaaatacaacaagatgaggacactccatcatggcaccgcttctccgaactcctgagcgtgcgcattggacccctgcgttcaaacccccttggtgctagggcagatctggagtaggcccgatctgatatcctccagtggcgacaacgcgactgcaggcggctgcacatggcttcctagcgtggtgttcagtgtggcaagttgcggcagcggcgcggctataggcaatgacttgccgtcttcggctacgacgcgcggctttctggcgcggcgttaagcacgacaagcagtggcgtggctgcaggcagagcggcttgccgtctttaggctgcaacacgtggcttcctagcgtggcgtcaagcacgacaagcgacggcacggctgaaggctgcggtgcgccgttccttggcataagtgacttgcatcgatattaagcgttgaacaacacacgacacatggggaggcaaggcctttagcaggcttggtcgatccttcactccaattcactgtcctaatccatagccatgtggacaccaagaacacgtctggttgggtggcgctgtctccactggaactcttggcagctccgactgtaggattagtgagctgccacgtcttggactttgcagcctggacgaaattgttcccatgggatcaaccttggcacatgttaggttctttatacaaataaattaaagtcgagatgtaaaaggctttctagttagggttgcactttaaggtgcatatcaagttagacagcaaggttgttgccatgcacccattacagctcaaggacgagatgtcttcgaaggatgggggaatgtcatggggcggcagcccagagcatggaggtccatagggataggctcagcattaagattagtagataaagattagattaaataagatagttacctaggattagattagataagattaagttaattatttagaggctaagtcttcctatctatataatgatgggttgtacttccttgagggggaagcaatcaacgaagaagaattagtcatggacctctctaatactctagtttccccagccgactgtttatcctcttataaacttggatccataacaatcgtggacaagtctaaaaattaaaaaggagccattttttttatcaaatttctttctcctttactttcatgtgaaacctaaaaattgtactttattttagcttcttccataatcatttatgcagactgactaacattttttcctgctcactgtttttttaaggaactgaagctg

SEQ ID NO: 1126 - DNA, 3256 bp, Zea mays
  Intron number 5 from transcript GRMZM2G013625_T04 (locus G RMZM2G013625) derived from phytozome v7.0 (chr-ID 8; pos 1 48504422 to 148507677)
cagagcagtcactttatcctgcagggtggattcatgtatatattctagcatttccctacttcatgaaatttctcttaaatgcacgtacaagttacatgcttcgtataatctgaaaagataaataagctgatacatgtgcaagatgatttccttgttgcagcatgtactgtgttagatgttttccttgttgcagcatgtaatctcattcatcatttacacttagttttctttcttttttattgcagttgagagccgagcctttttttcattttgtcttgctgcaattctttttttttgtgaatgaagcaggagagctgcgtgtcatttcattaagatagaaagagtataaaacgagttggattttgaaagaagcccaactcgccgtaaataaccgaacacactcccacccacactgaaaaaagggaggggtgggaagatacatgaccaggacctgaacaaactactccaaacactgggtaatctggaccaacgaccttgctagcaattcattcagctttgatgcttcagccatacaccacaaactgcattcatcatctatggtctgaagaagggtatggatattagacagccccttcaaacacacaagaattccggtgcttccacacaaggttttcaagtcagtaagtcgagtcgagtcgacaaggtaccgacttggtgactagtcgataagtcagtcgactagtcgtggacttgccaatatagtggctgttttgcctatataatggcttcatatagacaatatatcaattatatatgaagaaagaggatgttttacctcttttgaagtttgaaattgaacgaaactgaaataaacagcaagtcttacctcatttgaagcctcaaactgaaccaaatcagccacataagtgataagtcataaactcataagtcataacagtcatatagttcaaattggaaaacaaatagcaagaaaatatagttcaaacttgaaaggaaataaactccattagatctaagctgctgttgtagctagatagatactagataccctaaatatctcccaaatcaagatcatccattgcattttcttcaccaccagcaccagcttgagttggactgttatgtggggattcaccaaagtcatccacttcttcatcataattagacatgtactcttcgtcatcttgttcattgccctcattgccttgctcttcctcttccataactctctcctcctgtgtagcagcagcttgacaacgccttgaataaacagactcatatcgggctcttcttgggaagttgcgaccttgaagtgaactagaagcaccgattgcatcatccacatgagcccatgcaagatcatccccttctctaattgtttcattttgactgtccacccaacaaggtgctgcttcaaccttctaacacttgcatgaacaatttttccacaaaggatgcacttcaccacatcttttttgttcaaatccggccaataacaatagttctatgtcggatccttcgattttgcctttctcttaggatctttagctggatcatatggctgctggcttcctgactccccttgtggtcgatctgcagatgcatcttccatatccctagagcttgttgtgacttgtgagggcggcgcaggttgccgagacttgtcagggcgtgcagaggggcggcacaggactcaccaccagaggcttcgacggccagaggtgggcggcggccagaggagggcggcgtaggcctcgacggctggaggtgggcgcctgggcggcggccagaggagggtaggcggccagaggagggcagcgggcagaggtggggctggaggtgggcggccggtggcgggcagaggagggcctggcggcgagcaggacgacgtgagggactagaggcggctgttgggtttagggtttatggtgtgtaatggactaatgggcctttctgatgtttgggacgaattaggggcaagtcggccgactagttcgaccaagtcgacgactagtcgactaatatattccagtcgctggcaagtcgaccgacttgccagaaaagtcgagccgagctcccaagtcggcctcccatgaccgactggacgactaatcgacgacttgaaatcaggggttccacacctcccataaaacgagaataatgagcgagttaagccctttcgccatctcctttggaactcatgtaacagcctttcttctaatcagtgaaatttgctgttctcgccctttccgcatctcctttggaactcatgtaacagcctttcttctaatcagtgaaatttgatgttctcttgttaattttgagggagaaaatgttcatctatttagcattggagttcacttttaatacagatgaacagaatatatttagttcatatagaaactaataataataataatcaagataaacgttcagaacagtcactttatcgctacattcgaacatgtttcagcaattatattgaactgataacattcatcgcagaaagtactacagataagtatataacatgcctttcttgcattagccatatcgaggagcagtataaaatgtactggattctttctgggaacagtaacacgctgactttggcatctgccccttaatagtatgatagttgcatgtctcacatgaaatgagaattaacatggtattattgttaccttggatccttcagaataagcggcaagtagaaatttcattagctattctatatattgtgtttgctgtttcgaaaacgctgcagaaataagatgcatgtcataaggagtaatctactccctctgtttcaaattgtaagtcgttttagctttgtcttaaattaaagttgcctaactttgactaagtcagaaaaaatatattaatattataatacctaataaatgcactatcagaatatatttcatgtgtatctaatgaatcttattacttgttgtagatatttgtgcatttttctatagacttggtcaaagctagacaagtttgacttaaaataaagctaaactacttacaatttggaagagagggactacctatatagaaaaggatgaagaaagagtgatatcatgtcaatcaaattcaacttgttttattactgcagagcatggacctcatctttttttactatttgcacattcttgctcttaaattcttttctagtgttcttagaggcttggaaggaatggtcattttctttaactgttcctgagaattgacgccttcttcaccttttccagactcatccttcacaaac

SEQ ID NO: 1127 - DNA, 1527 bp, Zea mays
  Intron number 1 from transcript GRMZM2G091119_T02 (locus G RMZM2G091119) derived from phytozome v7.0 (chr-ID 3; pos 3 5660232 to 35661758)
aggtccctgcccctccctcgggggtcgagaagaaggtgagcatacgccgctcgctccgctctctgttatttctgatttttcctttttctgttgcgatggtattctagcgttgtgattatgtcgcgattggacgagtgttcagtacataattagtagatcaggtcgactgttaagcaatgcgaatgcgttgtactcgtccttttatacatataatacaagttgcagttcgagcccgtatttgattgctatgagtatttcctgcagaaggcttcatgcatatttgattacttgtcatttagagtgtttggtacttgccactgtactctcatctacctttagccttgtagtattctgattctgattaatattaggttgatgactagattaattcttcagaaattagattttacacgcagtctagttgtgttttgacgagcgtttgatattgatttagatgtaccaaaagttttattatttatgcctgtgatttcttaggtatacctatcatctatatcattcagaaaacagaagtgtagtcatatggttcgtaggttctaggtaggccaaatttaagttttcaaggatggtatttctagaacatgttataggtgatttgccaagtgttagtatcggtcatttttattattgatataggaaagatttcttattccttttagtctctatatgtcaatgaatgtgcactatcaccttatgacatgttcttgctgcattttactttgtatcagcatgtcttgatccactagaccaaggaatagctcttgatttctagggatgtttttctgtcgcggtcctaatcaggtgcaactgtgcaagctatgatggtggagaactttgttggtcttgttattgattgttttattatcttgttgatcttagaacactgcatgattgatgttgttttaatatttggaatgagtatgcatagtcatgtttatgaattcttcagaatcagtgcttaccatgttattgctgtgctgatttgttttgttgatgtacgcatttttgtcttgtttcaaaatatttttcctcctgatccgatgtatctttgctgttactacgagatagcatcatagttcattttttttgaagtaaatcttgttgtctacatatgtggtcaaaagtgtcaaagaaattaaccttgtctaacaacagaagcttggagctatgtttctaattctagagctacatatgttttatccttggattaacattattctaacagagtttcttttttctggcattgttagtgttatgtggctactgaaattgttttagtgctttcctggttttgaggttttgttctagtgttttgcttattatcgtgtctgtagacttttatcacaccgtcaccatttacacagtagcatgctgccatgttgcttgtgtctttgacttcctggcaagcttattttcttggtctttatgtggtcattattcagtttaggttcttttagtactaactatatttgtgatgtgttaaattggtagcttgaaagcctcccagct

SEQ ID NO: 1128 - DNA, 5804 bp, Zea mays
  Intron number 1 from transcript GRMZM2G045268_T01 (locus G RMZM2G045268) derived from phytozome v7.0 (chr-ID 3; pos 2 18910757 to 218916560)
gtcgctggtctcttcgcgtctgcttcccctctcgggtgagtcgcctcgtctgttgtcttctccgcccgcaaaaccctctccctcgctagggtttcctctggattttgttggtgcgcattcttttcctcactgtgccgccttcctctcgcacctctggtctctcccgtcttcggtgaggtctagttttggtgggggttggtgcgtttcgtcttttcgtcctccggtggttgaggaggagtggccgcgtctgggttctggtgttcttcgttgccctgcgaaaatcgctgctatggatccgaaaggagagaacccccagaactcccaatgggatcgttggggtccgtcggagaagccgcaaggttctcatccttggaacagaccaagaaaccttagctggaagcttaagcctaatatcggcaaatctgagcagcagaaaggtgtcctgtctcctcatcctggtgagggaaatcaaacaggtaacccttctgtctctcctgttcctttgaagaaagatctcgatcttgttcgccctgcgttctgtcaaaaatgtggtgttaaaggacatcatgccagaaattgttttaacgctttgtggtgtgatatttgccgcaaggagacacatgtcacttcgcgttgtgttcttcctaagcaaaacaaacccaccatgcccattgttggtttggctgctgatggtttagggttttatctgtctcacttcgctaaacctttgatcaaaaagccaaaaagggttttcatcggtctggttaaagtggttgagggacttgtctctgctgaagatcttgagagatatttcgggtttcacttcccttggaacaaaaggtggaaagctaccaaatgccattcaggatttctgatgcagtttccctcccaagaacgtcttgatgaaatgataagcttcccggagctgaaaatgaagatgtctggggccaagatcgctgttgtgccttggagttctagggccaaacctaaatctagactccatactgtgtgggttattgctgaaaatgtccctgaggaattgcagaattaccaatctatctgtgaaattggttcaatgataggcgctgtggaggaggttgaccttatgtctctggattctgatgatatagtgagatttaaaatccacattaaaagtgtggctatgatccctcctgtggtggaagtggctgtcaagccttttctttatgatatcttctttagaattgagtctatttgtgatgaaggatggaatgatgattctgtgaatttgggtaagagagcctcggttcaaattcatggatctaatgatccgctttttgataaatctgggaaaaaacccaagaatctggatgatgatgtccctgaagaggagcctaatcctattctcaaaattggggagtcttcttctcaaggcaaagagtttgccaaactgtctgaccctaatcttgtgccttctaaagatgtgtctgatgatgaacagaaactcgataacctttctgatgagaaggtggattttgatccaaatgaagatgatctgcttagctcgcaagaattggaagaattcgctaaggatatggaggaagatccaactgattttcagtcaaaaattggtgctatgatctcgattccccccaatgatgagatggttattgaagggaagaacaaaaagcctctggacttgcctaccaacacggctgaaggcgtcaggaaaagctctaggttggagaagaatgatgaggtgaaggtggttgataaaacgatatacagagcagaagccaaggatgctttcctcaataaaggtatgagttctaattccttttctttgcttgattctaattatgatgatttgatagatttagcttgtaaacttggagtttctttgggcccctctgactccgatgtgattgataatttggagttgatcaaagatctggaacgttccagaaaaattttggccttccaagcttgcaaaaatagtatgaccccaaatgtggaggtcccttcccttgttgatcacataaacatggatagtagtgtccatgatgattctgacctgaatattgatcaggacttacttgatgtgatggttttacgaaaaggtaggaaaattaagcatcggaaaaaaacgattaaaaaaagggcttcccctaaaaagtagaggtccatctacgaaaaaggggagtctatctgttcttacctccctcctgatccgttttaaatcatgagaggccttatttggaattgtcagggtttgggtcgtgattctaagtttgatttcctgagggaaaatcattaaggaagaaaaaattgatttcattggtttacaagaaactaaaaaagatcattttaatgattctcttctgtcctcgcttgcgggtagcaagctttttgcctggttctcctctcctcccaatgggagatcgggaggtcttttagtgggttttaattctgaggtgtttgatgttagagaatttgatgcgggtgaattcttaactcgctcccttgtcctccacagagaaaaaaaatttatctggaatttcgttaacgtttatggggctgcccaaaatgagcacaaatctcgctttctcagtgaattgtctgctgtttgctcgagaagccaggtccccatgcttattggtggtgatttcaatattctcaggaaagctgaggaaaaaataaacctggtaccctcagcaaatggagttttctgttcaatagcattatagatcatcatggtctagttgaatttgatctgaaaaatagactatacacgtggtctaacaatcgtaatgatcctacttttgaaaaacttgatagatttttggccagtcctgactgggatcttgcttataataatattagtgttatcgggttaaatagatccttttcggatcatgttcccctttgccttcacactgattccctgcccatggtgcgtaaggattttcgttatgagctgtgttggaagattaggcctgattttcacaaattagtggaaaatgtttggactcttccggttggtgtgtccaacagtcttgatgtttggaaaataaaattgaaacgtttgcgtcagaagcttaaaggttggaacagtaatgtggtaggtcactacaaaaagttgaagaaaaacttgattgaaaaaattgatattctggataaggccagtgagtcgtctggcctttcggaggctgacagatatatgaaattagatttggagtctaatctcaggaagattgtggatgaggaaaacattagccttagacaaaaagctagggataaattcttattagagggtgatgagaattccaagtattttcatttgatggctagacacaaaaaaaggaagttgaaaatcttgactctttctcacggtgatattgtggctcatgatgaccatggcattaatcaactggcgacttccttttacaaaaatctctttggtccttcccgtgattcgaatatttctctgaataacctggacatgaaacagctgggggagggtgatagaattctgctcaccaaccccttttctttggaagagatcaaggatgtggtgtttgctttgaaacacaatagtgctccgggccccgatggcttcccttctgaattttttcaggaaatttgggatgtgatcaaaagtgatctgttcaatctctttaaagattttcatgatggctctctcaacattgaaagacttaattttggtattgtcactcttattcctaaggtccctgatgcgactgatattaaagcttttcgcccaatttgcttgcttaatgtttgctacaaaatcattaccaaagttcttactaacagattggctcgttgcattacttctgtgattagtgaccttcaatatgggtttataaaaggaagatatattatggatggtgttctttctttgcatgagattattcatgaagttaaacggaagaaacagaatggggttattttcaaagtcgattttgaaaaagcctatgacaaggttaattggaattttcttcataaaatgatgataaaaaaagggtttggagatttatggagtgattgggttttgaagactgtgaaaggtggcaaagttgctatccgaactaatgatgtggttgggccctactttaaaactcataaaggtgttcgccaaggtgatcctttctcccctctcctttttaatgtggctgctgatggtcttgcttgtctgatccaaaaagccaaggatgaaggtgttatcaaaggccttattcctcatattgtcactggtggctgctgttgtcttcaatatgcagatgacaccatttttctgtttcaggatgatttggaaaatgctagaaatttgaagtttattctttgcatctttgaacagatttctggcttaaaaattaattttcataaaagtgaaattatttgcctgggaaatgcctgcaatagagaacatctatatgctgatatcttcacttgtcctcccagtggtcttcctatgaaatacttaggggttcctattgataacaaaaaattgtgcaaatctttgtgggatcccattgttggaaaggttgagaataaattgggctcctggcaaggtcggttccttagtttgggtggccggttagtcttgcttaacagcagtctcaccaacgttcccttgtatatgctttctctatataaatgccccaaagctgtgttaaaaaaaatagttatcttcaggaaaagattattatggcagggagggcatgatcagaaaaaatttcatttggctgcttggaacttagtctgctcccctaaaaatatgggcggtcttggtgttttggatttgcaaaaaatgaatgaagctttgttggctaaatggatttggagactagaaaatactagtggtttgtggcaatccattataaaaagcaaatacattatgaataaacctattatttcggtgaaggatagaccttcagattctcatttctggaaaggtattctctcggttcgagacaaatattataaatactgtaaaataaagattggtgatggtaagagttccagtttttggaaaaatatttggtgtggcaatatgacgctggctgacaaataccctaatttgtttgaggtggcttatgacaaagatatcactgttcataaggttgtctcctctaattttcagttgctgactttcagaagaagacttattggtgctttaggtgaggcctatagtgaccttatggatcagtgtagccaggcctcgctttctggaaatgctgattcttcaaattggttgttgggttgcaaaggttattcggtaaaatctttttacaaaatgttaaataattccagaattgtggttcctgtgaattttatgtggaaaaccagacttccgcaaaaaaataaagtgttcttatggttggtcagaaataataagattttgaccaaagacaatttggtaaaaaggcactggcatgggaatacggcctgtaacttttgtggattattagaatccatagatcacctattttttcattgtcctgtggccagattcatttggagaatcatccaaattgctttcaaattgtcttctaccccaaaaaactcagctgacctctttggtccctggattgacagttttcataatcctgaaaaaagaagctgattctttttggatgtggtgctgttatttgggctatttggcgtactcgtaatgattgctgcttcaatgctaggctgattgatgatccatctaatgtgattttctcctgctgttattggattgatgcttggtctattcgacagacaaagaagggaaaaagactggtggaacaaggaag

SEQ ID NO: 1129 - DNA, 1872 bp, Zea mays
  Intron number 1 from transcript GRMZM5G839757_T01 (locus G RMZM5G839757) derived from phytozome v7.0 (chr-ID 3; pos 1 31011789 to 131013660)
ccaggctttggcgggaggagctccccgcggcaaaggtgactactttcttttatgcatttcaatgtgcatgggactgatagacgttacggtatccatatgtgctgaggtctaggattggatatacatgtaacgtagttagttcgatcaattgaaccggaagattttgtcggtatttggtgactataggatcatgtggctgttggtagagttggatcaaatatttctggctcatttgttgaatgttttgacaattagattctagccttattatgcccaatgttcagtttggtaatccataccagttagtaaagcatttatgatgtacgttatacatagagttttgcgccgcaaaagttgtcagttttcctcagttacgatatgtatttaatatttatcctattttgagaattaataacctattagattatgataatatgatgggcttgggttcatgtttatctaaataccttagtgctgtaatgcttgcaattttatccgctattcatccaagtcaatgcataaaggattgattagtcatatcgatgtccatgcaccttatcagaaaatccttttgcactgttagtgttgacttcctggacctctactggtatataatgtatgttaggtttatttaggtattttatgctgattctagtacatatgctaggtcatcaacaaatttgattgtgaattgtattatacttttgtgatatccatgtttgatacttgcttgtgtgatgataggtctgcttattttttaggtagcatgacaagaggttttcacagttttgattaacttgacattgtagttgatgttatgttgttggtggagcactgatgaattggtttcatgggtttgtgctttttgtgtactagttgagatggattgagtgaaaaagttatgtctctatatggatttaaagctgaaattaaactggagtggataactagagttaaatattgctttcaggcccgataaatatgcaaagtgttgctcgagtggcagatatctgtaactttagacactatgggtatcaatattatcttgtatacttggttatacgttgagaattgttactgatgtcaagtttgctttgaaatttagttctacatttctgagacttgacaacatctatcaaagattgcaattaccaaccttattgaggaaagttattgggcgtgttcggctggctacaagccgacactgttgcagctgtttggactgctgcagctgcaatccatagagagaaaaatactgtagaagccgcagccgcagccggattgcagccgcagcaagccgcagcgaacaagctgattgcttacatgctacccatacaaattttaagattgcacaatataaacactagacgtatttccatggaacaataagttttattatatacggctcatataatgaagtattctatttgtaatttgctttgacatttctgttccaatttatttagatttcatgacatacccaattaaggcattgtgctgggcatatgtggcctcatatgtttttaaacaatttgattctttgtttcttaatcaacaatttcttgaaaagagtcaccaattacaataataatattacaagtggaatgggttcaagtgctccatagtgccaaagtttgtttcgttatgatgtattttgacatttgaatctcagacatgcttaggaactacttaattgaatttatgggataacaggttacctaatgtgtttggtaaaaataatatttttctgcatttacgacaatgattgcccttttgtgcaatttcatgtacttctaaacatgttcacattattaacatgtctatttattaacttcagggatactgttggtgcaaaacaacagaagatttcca

SEQ ID NO: 1130 - DNA, 9597 bp, Zea mays
  Intron number 2 from transcript GRMZM2G014994_T01 (locus G RMZM2G014994) derived from phytozome v7.0 (chr-ID 4; pos 1 63261723 to 163271319)
atctacagggaggagcttactgcaggccaagaacagtacgtttcatcttttgctttctcctttgacaacctcaacctgcgattggctcgtggcttgggtgattttgatctgagattgggagttatgtgctggcgcacccctcacattgatggcataacagtttgggtacaaactagattgcacaacctcttggaagagggatggtgaatcggaattgggtagaaggaatatagctctagaccaagggagaaggaaccggaggaggaatatgaagaggacatgtctctgtattcaattcatcgagttatcctttctgatgcagcttctcttcttgtggtgttgcccttcagttgcttgagccagtaggcaacatggctcatggcgcaactccagctcatacctaggatgattcctcacattcttccttccataaaaaattgacttgacctcaactccatgcaaaaatggcaaaccaccggtatcccacacctgtggttcttcagtgctatgccttgactttgctccatttgtcttttttcagttgtttcacattcaactccctgcagctctggcaactcctttgttgtacattgacagacctttatcttcatggttgcccagactattctgatgcagttgttcctctgagatggactaagagcggatgcttagccaatttcaatgttcagagcttgacaataataaaattagtgtgcttggattcttctacaagacaagctcctcactgcgaacaatcttgccactaggggctggccacaccatccgaactgttccctctgcaatgggcacctagagactggccttcaactctgtttgcattgccctctcgcccgtgctgtgtgggatcagattctagcttgggaaggtatgaccctccctgccctgacggaccctgctcgcttctctaacattaaggactggtgggaaggagcatcctccctgctcccaaaaacccaaaagcgcgacttcaacggcatcgtgatatacaccatgtggaacttatggaaggagagaaacaggaggatcttcgaaaacagctccgtaacccctatccaggttgccttgaggatcaaagaggatgttttaagttttaggagggctatgtctatcgtgtaattgagatgttgatgcgcctttgcagctagctgctctgtgtgggtctgctgggatcgttcctcccgccgtgtgtgctgcgatgtcttgtatctggtcctcggacctcgtctcttgttttccgaaacctttctcccttaatatataggcagagctcctgccattttattcaaaaaaaaaagatttaggtgcacaagtttgaaactttttaaaggtagaaaaccctgcaaaaagaaccactttttaactactacaatcttatagggagataacaaacttcattctcttcctgtgtcattctcatgccactgccaccagaaattaccctctcaatcttgtagtgcctttcaagcacatgccagaagcccagaacagacacaccatgcatctgcatatctcctggatcccattgcccttgtactttcctcataatttgtaagcatggcatgaatctcactgccaacaagaggaagcttacaaataattctgcatgctgttttatcactggaagcacctaaaagcttgtccctactgaatggcaacactattgtcatgtgatgcatacctagcaatatatgtggaaggaaggttgctctgacttgtgttatcaatcgccgcatcaaacaaattatctcgatcatgcaccaatgcattttttgctgttgcaatattgttcgtaaacagaaacttcatgtggcttgtggctcacggtcgctgctggacagctgatcgtctagcgaaagaagggctacctcaccctccaaactgtttgctttgtgatcaggaggaggagaccttgaaccatttgttagtctcctgcattttctctcgggaagtttggtttcagattatgagatctgttggacagctgcaccttgctcctagccatgagaattcttcctttgaagattggtgggaaggagttacctctttgactgttggcccagcatataaggccataaggggctgcacaagggtctgaattccctaatcattcttggagcttgtccatctggattctggaagcaccgcaaccgttgtgttttcaacggtgttcagcctagtactatcatggtcatcaattgggtcaaggaggagtctcatctttggtgtaggactggaacccggggattatctagcatccttgcgctccagcacaccatctggtgacctctgttttggggtcttcaaggtcacgggtctagctgactactgttgtatatctacatctattctagagtgtgtgggttttgtgtggagttgtatgaggttttctttttaccttaccttttcttcttctcctgcgtttttcgaagaaaaaaaactcttaaccatccaatttccagcagctcaagtaaaacaatggaatactgctagcattatcaactgcagaagcaaagcttatatgtccaaaaacatcagtcaacaatgatttgaactcaaatatcttgactcttctagctgacaacacatcaccatgcttctgctgcacataatgtttattgtgaaagccatcatggtactttccatcctctctagtagtctagtgaaagctgcacccaacttgtagtttgtcagcaaattgtcgcaggctgcaattctattagttccacaatccagcacacccatctgctcactcgttagctcgatgaaaatgcactccgataaagcaactgagcacttattcaaggacaggaccacagagtgaaagctccaaccaaaactgttaaaaatgtccaattgacttccacagatgctagaaatatgtttatgtggtagtggccatagagtcaagtacagcaatcctttggatagaatagtcaagtctgcaaaataaccactgcatgcccttatgccaagaaagtccaaacataccataccaccacactgcctctcaaatcagcacaagggaactcacttttatcaccatcttgtgtttccaactttctacaatttcagcacgcacacattagatctcaatgaactggaggtgaccatggaggcttccagtgccgtatccaaaattttacaatagggtatgccagctagaatttacatatatatttggtcaaaccatttaataattcagtgatagttttaaaatttgaacattatttggtatgcatacactaaattacacaataaatcttatatttaaagattaagtaaaaaacaataataagtcttgcattttaaaattaagttaaaaatattcacaaactataatataaaatagatgaaaagctatactggtagtttataaagtatggtgtagctgtgtaggcatgaaaacgggattaatctactttttagttgagaccttctaagagacataatggatgtcttgacttaagcctatacccagcagtctagcatccagtggcatctcacaagccgcattcgtcaaagaatctgagcgatcgaatgttgggttgtcaattttatgattgtattgtccgttcagcagacagcaggtcatcccaagactttgttagataggtcctgagaccatatgcctgaacacaaaaattcaaactacaagacaattagcgcaatattctttctatattgaactttttctagatattttttgttctttctctctctctctctctctctctctctctatatatatatatatatatatatatatatatatatatatatatatatatatatatatatatatatatatatagggcaggtataacgggagccctgggcttccaatagttaaagaaagcccaggccgatcacccctgcaacctggttcaacccagcgcaccgactgaaccaggctgtcggttgcgtcacccgccccacgtctgtgtgcgcaaaaaaggaatgcatgcatgagtcaaacacgttcccttgcatgcgcgtaaatttaggaaagatatgtgtgacagtttctatttttaaatgttttatttactccataaatttaggatcgctgcaacagccatgcaactagactcgtaaggaccattttatgatatatactgctactaaatatgctaccctgtgtagatagttatgcaatccggtatactgcgtaaaaatctgttaccagttgcatgcgcacgaatttatgatgaaaataatgtgcaatgaaaggaaatgaattgcacgcataaaaacaaaaaatcgtatttaatgttttatttccttcataaatatagtatcctttcaacaaccatgcaactaaacacattagatctagtttatgatatatactgatacaaattatactacatggtgtaggtatttatgtaattcgttacactgcgtaaaaatttggcatgttgttcactgttggacgcatcttcgggttggagcgtaataatcttaagttttgagcataaaatccctcggttataagcataaatactgagccaatgtgagaggttgatagctctagtaggttgttattacgatcttatttttatggcagatccgaaaaacatggcagccgcatgcatgcggttatacagatccaaaaattatggcaaaatgcatgcattggtctaacacgttcctttgcatgcgcgtaaatttaggaaagatatgtgtggcggtttctatttttaaatgctttatttcctccataaatttaggatcgttgcaacaaccatgcagctagactcgtaatgatcattttatgatatatactgatactaaatatgctacactgtgtagataattatgcaattcggtatattgcgtaaaaatctgttactggttgcatgcacacgaatttatgatggaaagaatatgcaatgaaaggaaatagattgcatgcatagaaataaaaaatcgtatttaatgttttatttccttcataaatataggatccctccaacagccatgcagctaaacgcattagaactagtatatatactgatacaaattatactacacggtgtaggtatttatgcaattcgttacactgcgtaaaaaatctggcatgttgttcactggtggacgtatctccgggtgcagcgtaaaaatcttaagttttgagcataaaatccttcaattataagtgtaaataccgagccaatgtgagaggttgatagctctagtaggttgttattacgatcctatttttatggcagatccaaaaaacatggcagccgcatgcatgcggtttctatttttatacagatccaaaaattatggcaaaattgtgggaatttccattgcatgcgcgcaaattatgcggtttctatttttatacagatccaaaaattatggcaaaatcgtgggagtttccattgcatgcgcgcaaattacgaacaacaaaaatcaagaaattgtctttccaatgtgcatgcagtaaactgatatacgaactccgtgttcaagcataaaatcgtacagtttttaacgtaaataatacatgtggtaggcataaaacacaataatcgaaaagaaaacacgaatcgaaggatgtagtggccgtagggcgtcgtcgatgacaaaaacacaaatgtaggtcgtcactcgggccgcccaaactgcgccggatcggaggatgtcacgcgcgatcaacgctgcgcgcatctcgcgccttccgtgacgtcgctcgctcgaacctcgcgcctcatgcgtcgctgtcgctactcgcacgtcgacggacgccgcttcctcgccggccttagaagtgccgcctcctcggggcctcggggacgccgccgcttgcccgcacaagggccctgctatcgctcgccctctggatcggggagccgccaccggatgggggtccaccgccgcgcacgctctggggcaaccgccgtcgtcgcacgcggcgtcgctaatgaatcggggtggagcgtaaaaaactgaaccctagcactccgggtcctgttttatagacgtccggatttggtccggctcgaccagtgtgcaccgtacgacctgggcttcctctagttattggaagcccagggctcctaatatacatatatatatatatactacgtgagtacccgtgcattgcaacgggaacatataattacataataacttatatacaaaatgtgtattatattgttataaaaaatatttcataatccttttgaaatcctagccatacataaattttgttattttaatttagttgtttcactactacattacaatcatcagtatcatgcagacttcgatatatgtcacgatttgcatggtctcatcattgaagagcacgtgtcacacctgccggtagaagttccctcgtacattatcagtcatcagatacgcaccaccatacacgcttgcttaaacaaaaaaaacaagtgtatgtgtttgcgaagagaattaaaggcaggccgacacaaaagctacccgacgatggcaagtggtcattgttgtcggtcctcctctgcgtcacctctggtgccaagatgatgccatagtccttgatatagtagtcgtcgaacgcgcacgacatgacgagtaccgatgactcttggctgggctgccaaacgaagtgcaccccgggctcataagcgaggtagtacacctagtcgttgcaccaccggatgtgctactcctctacataaatcttgttcgaggacactcacacaatgtcagcaacggtcgtcgtcccagcgcacaagaattcatggctggtaagtagtgacttacgtgggaggttgagctttaggctagctccagcaatggaccctaaagggttctgtaccataaatatagaggatcaaatggtcctctatgctctccagcagcgtcttctaaacggttctctaaatttagaggacgctgctggattctctatatatagagtttctctgaacggtcctctatccatttgaatactttaaataaccggtttagcaaaactaagatatgtacaatacatttaagagtatgacaaatacgtatgtgcaaaaaataaaaataaaaaatatctctaatatagatatttgagtatagaggacgtgatttagaggacgttgttggagataaaggagatatagaggatgaaatcttttagaggagactgtaaaggatggatatagaggatggatatagaggacgttgctggagacaaccttaggtggatgatgagctagacggtgtgacggcgccgttgtcggatgttgtgcccaaaacaacccgagagtcgccagcgttggcgacgaccatgaggtccccttatttgaagatggacagcgcggtgcagccgctctggaccgcatccaagcggcggctgcgccggagcttgccgaacacagcgacgcatgcggccacgtagtactgcttctagaggtcgaactggcagtcgtcaagcttcttctcgtcgtcgatgagcgacgccaacgcgagcgcctcctgccagtggtgtttgttcggggtttccaagtaagaaacatggatttatctttggcgttggtttatgaaaatgactcacaagtcagattcatggaaaaaatattacggagaataaatgtcacacatataaaaaaaattaagttgaaaacattattcaaacaaaagaaattgtatgcaagactcttttttaaatactactctctccatcaaaaaatataattcaggaatctcgttgataattatctactactaaacattgtgcaaaggtagcaaggtgggctttaggaaagatatagtagatatttttactgtaacagatattgacataaacacacatgtggtgtaatggtagctacgagcacatttacttgagaggtcctaggttcaaatcccattggagccacatttgtgtttttttaatttaattttagctacgcgtgggatgcacgtgagaatgtcaatgagcgggcagggggtaatgggaatggcagaacactgaatggcagccgggaatgggaatgagctttgcggggagggggaatgggaatgacagaacacggaatggtagcctatccctcaccgcctttaataagtagtatatatatatatatatatatatatatatatatatatatatatatatatatatatatatatatacacatgcccacatggtgtatacgctagacacgtgtggtatgccagggcatacctggcttaccccctagctacaccactggaggctttctaagctaaatagaactactccatgctgtaaccaaatgaggaccattgaaggatgtccatggcattggctaaatcttatcactacaattagtaatcgtcataagtgcatgcagcgatagccatagaacaattgtccactctaggccaccttgcttcttgatcctgtccagcagcatatgctgacaatggcccaacagcttgcggactcagaacttgcaattaccaagtgagtgctctcttgaaaacatactctgtctaatccaaggttagtagcacaaagataggtaggagcagatgaaaggcttgctagttgctgctatgtttattgaatgcatatgaggaacaggctctttgctactaaagcttcaatcttcaatgatgcatatgaggaacagtgtacaaggtgcatatatgcttatatacagagtgacatggagcttgtggacttggagaatacctgttccttagaattatgaatcatcatcagggactaggaccaagtttgtctatttgtaaagggcgtacccagtgtcgtaggcttcccgcactgtgcggtgtctggggaagggtatctttaagcgtcaagccttacccgcataatatgcagaggctgaggctcgaacccgggaccttccggttacagacggtaggctctaccgctgcaccaggcccgcccttccaagtttgtctatttgctatcaaaatggtagaatctgatggttataccccgctgttaaccaatttatattcatctccatgtttatacacccccgatcctaccttaccgtagaggcagtagaggacgaaacaaaaggaaggatattatcaagcctgtgtgccctatgatggtgaagcaggaaccctttttccttctaaactgaactgttcagaattcagatatgaaaaaatggatatttctagataatggttaaaatccggcttcaaaccttttaaagaatgggcatcagtccaaaattgatccaaattttggctaactccacacaatgtgtttagcattaatatctaattgttaacgtgacatggaaaatttcattggaggaactaaaagtcagttaagaagcctggttctagcactaatcggcaacaaagaaaccaaaatcttcgagatagcccccctacgactttgatggttcactgcaattaggagtacatatatattgcttttatcttgtgttttgtctcttaacacacctcctgtgttttgtctcttaacacacctctggtcacattccataatttttactacttaaatattacataattgtattttataattttattaatgcctacctgtgcttatcatcaggttgccccgtgaactttgagttccaaaactacaca

SEQ ID NO: 1131 - DNA, 21424 bp, Zea mays
  Intron number 2 from transcript GRMZM2G155274_T02 (locus G RMZM2G155274) derived from phytozome v7.0 (chr-ID 2; pos 4 9206997 to 49228420 reverse strand)
accattgatccaacctctgctgcggcaatttctaggtaggctccgcatcccctcccggttgtgtgattctagcggcaacggcgaggtgacaaacttcaaatataaacatcactgtgttaggagccaagtcaaattgtcaaaaggcaacaaacactgcttcagtagaaaatagaaaccgatacaggtttatatttgaagtttgtgtttagcacacagtgatgtttatatttgaagtttgtccttttctttgaagtgttgagcaccatattgagcggccggacggtccggccctgaggccggacggtccgtggtccggacagtccgcgcctgtgggccggacggtccgcacatgcgcagagcagtttagggttccgagttttgtgctatgtttgttggctagatttgcggaattaacccggaatccagtcgtgtaaagggtccatcccccctcctctatataaagagaggtctacggccgatttgtaatcatcaatcgaatcaatacaacttctatttcacattttatcctaggagtagttctagtctagtttaggtttagccactcgatccccaaattctccgcctctcctcgactctacgtcgattagaggagtctaggtcggcctgcccgagcctagacaacttctaggatctctcctccccgacggggtccctcccaggagcgagatccaggcgccgtcggcgatcttccgccgcccctgcgtacgcgcggactgtccggccctagggcgcggaccgtccggtcgtcaggcagggaaccctaacccctgcgccaggtcgcggaccgtccgaccctgtgctgcggaccgtccgcgcttgaccagagagtaccgccgcctcacgccaggtcgcggaccgtccggccccaggccgcggaccgtccgcgcctgaccagagagcaccgccgccggttcttcttgagtatttggcgctccgaaaaagcgtcaacatactttttggcgactccgctggggatatacatatctaagctcatcaaatcggccctcaatggccggttcaagggatagctctgatatttctccaagcaacatcatagagccgacttgggaaaccttgccggctgacgagcagatccagttcgaggagcacaaggagcggatgatccaggaggcgaaagcaaagttcttggccaacttcaaagtggacaggaacaacaaggtcgtccgacatcgggcaacggatccggcttcgctccaacccacgccagatatccccaatgtaagtaataccaacgatctgcaatctcttagaaattatgtagaagatcagcgtgaacaaatgcagaacatcatagggggtatgcaaagcgatcttaagagactagtacgtgcatttgataaatctagtatcacaaattttccttcgcacgaggttgagttaggaggtaacacgcgtaacacatcggctacaggttgtcacgaccagtcacaacccctttatgggatgccgatgtacacataccctgagcaaccgcaaatcggcagcaaatcagccgatctgcacatgcccggaccgtccgcacgtgagcgcggaccgtccggaccaacaacagttgggccgatttttaatgagttacctagatatgcgcccgaaccaccacacacgacacagaatctaaactacccagtcggaccgtccgcgtacaacgacggacggtccgcacataatcacggacggtccgggccaatgtccggacagcacgcacatgacctttttgaggaggattgttacctgaatcctcacccgtcccagcagcacttcccatctcactatacaatgcatcaacccattaattcgagatctagagcccaggaaaactttccggccccaccgagaaggctggaaaggaacgatcaaacatatgaaccatatagggcaagtggcaatgcaccacgtagttcaaaccaatggggggaaagacaatatgctaatatccagccaaccccacctatgtttgaccagagagctggtggtctcgcaccggctgccattgatatagtaagggaagaaattgtcagggcgttccgagataagctcggagtaagcatggtccctgggaggcaatcatatcggaaaccttatgacaaccgatttgatcaccacccatacccacagggaaccaggatacccgaattcgcaaaattttcgggtgatcaaggaaagaacacgcgtgaacacatagtccaatttttagcacaattaggagagttggccgacacggaggcatttcgcatacgtttattttcattatctttaacaggaactgcgtttgcgtcgtacgccactttacctcctaattccatttcatcatggggggatctagaacaaaagtttcatgatcattttttctccagtgactatgagttggatttggtagatttagtgtcattacgacaagcaaaagatgagtcggttaatgattacatcctgagattccgagaaacaagaaaccggtgcttccaaattcatttagcagagaaacagctcgcaggattagcctttaatggtctacgatattatttaaaagaaagattagaaggcatccaattttttacactagcacagttacaccagagagcttcgtgttggggcgaaggcaaagacgccacccttcgctcgaggctttcgccgcagtcgctggtctgacagagacaaaacgggcagggacacccttcgctcgattcggcaccagacgaaggcctgcaatggcgtcatcccacagtgcggcctcgtccagctcagaggcccacgtatgatccggcccattgtaacgggccctgcgtggccgccgcgtgttacgggcctaatttgtaaaggcatccctgtaattacagtctgtaaccctgctttatgggaatattctggggataacctaggtagctgagggcacatgcgtccttagcacaaggcgctgggcgctcaggtacctataaatacccccgcacagtgcccgtgagaggccagattaacagagctattgccatctagcacgtaaccctgttaacgctactgctcacccttgttggccccccttgcgagttgagagcaagttccaacatttggcgcccaccgtgggggctacgagaaaaccacccgcgatggcacccaagagagctaacccgaaggctgatgaggctgcgaaggcagcactgcacgccgcaagaaagggcaaggccctcgccctcacccaatccacccaccaagaggccactgaagacaatgttccccgcacctgcgaagacgacactctccgcacctgcggccctgaaggacaatcgcagccacccccaggcttcgcaccactggagggcgcggacctcaccgaggacggtgaagtcctcggcgtctcagcggaagaacaactacagctgcgcgccctgcgcttcaagaaccgcaatctccagaggcagaaagagatacgggaggccaagcgctagcgcgtgtccgcactagccaaagtgcggcaaatgatacgcgacgaagagcagaaggcccaagacctcgagcgggagatcgcgctgatgcagcgcgaaggccaccttggcctgcagcacgggccacccctccagcagcgcgcacaactggaagacacgcgcgaaggccaccttggcctgcagcacgggccacccctgcaagaccgcgcacaaccggaaggcccacgtttcccccagcgcgaccacaccttcccgcacgccgcgccattccaaggggtcaactaccttgacgagcgaagtcccctggcgccacacctgcaagtgacgccttggccagctaacttccgggcaggggcatatcccaagtacaacggcagcaccgacccagcacaatatataatgagttatcaagtagccgttgcatctgccggaggggacgacgccacaatggcaaagtctttcatcatcgccctggagggcccagccctcacctggttcaccaggttgcctccgctgtccattgattcctggagaagcctccgggataagttcctactcaacttccaaggctaccgcccagacaccgacgccttggccgagctctcgctttgcaagcagctggaaaaggagactctgcgggagtattaccgcaaatttttaacgctcaagtcacagctgccctccgtcgatgatcagatcgctatccactacgccatcagtggccttcgtgtcggcgtcctctacagccactgtatcagagatccgcccaagaacctccaggagctatatcagctctttgaaaaatatgccaaatccgtagagctccaccagcgcaaggttgagtcacagcggaaactcaaagatgccccgcagtccagccgcacgtggacgaggactccgcagccagacttgggtcgagacggccgcaatcagcagcaagtgcacaacattgccaaccagcatcccgctgttgaccaccctcgtcgccaggaatatcccccccagggccgcggaaatggaactcgtggtaggggtcgagggcgtgcgcagccgccgcgccgattctactgcctcttccatggcgaagaccgcgcccaccaaaccaaagactgccccgaaacgaaggccaccagagacagaatggcacgggcgcagccagccgacaaccccagagttgtcgcgcacacctaccagcaaccccctccaccatatatccacgcccccgccccgcatccaccgcaccacgcttaccaacaccaccaggaagtacaaatcgtacctcccccacccccaccaccacaccagcaacatcaaaacatcccccacgccccaaagcaggaagacttcgccgatcaaccatatcgcggagtcattcacatgataactggggggtccagcactgacttcgacaccaagcggcagaagcgggaccactaccgcagcatcaaccatgtcgccgtcactggcccagtcgtgcagacaaagtggtcccacataccgctaaccttcgacgcacgagatgtcgacctgcgcagcgccccccacatcgacgctatggttatcaattgcagcgtggcaggctgggacctacacaaagtcctagtcgacaacggtagtcaggcggacatcatcttcctccatgccttcgaccgcatgggtataagccacagcctgctcaagccttcggacaacccgttgtatggcttcggtggcaagggcacctttcccgtcggcaaaatagagttgcccctctccttcggtgtagcacccaatgcccggagtgagcaagtgactttcgatatcgtggatatggtatatccgtacaacgccatcatgggtcggggctccatcaataagttcaaagccgccattcacggactgtacctatgtatgaagataccaggtccgctaggcgtcattacggtctacggcaaccaacagacggcgcgcaacatagagcgggacttcgtgcccggtcagagaaacgtgcactgcctcacggcccagcgcgaggtccccgcgcccgccagcccaaccgataaacagcacgacaaggcacagctgcagagccaagacgggaccaagactgtccccctcgatcaggccacgcccaagcagacaatcactatcagcgaagacctcacctcgcatgaagaagagaaactcctctgctgcctgtccaagaataaagatgtcttcgcctggtccgccctcgacctggtcgaagtcagccgatccataattgagcacagcctaggaattgacccttcggtgcgaccaaaaaagcagaggcttcgcaaaatgtccgacgaaaagacagaggccgccaaggcggaggtgcaccgcctcctagaggctaaattcatcgagccagtggcttaccccacgtggctctccaatgttgtaatggtgcagaaaaaaagcggcaaatggcgcatgtgcatagacttcaccagtctcaacaaggcctgcccaaaggataatttcccgttgccgcggatcgagaaaatagtcgatagcgcggccggatgcgaggtcatgtcactcctcgactgcttctccggttaccaccagatatacatgaaggaggaagacaaggctagcaccagctttataacacccttcggcacatattgcttcatcagaatgcaggagggactcaagaacgccgggtccaccttctccagactcaccaaaacagtactcgaagggcaggttggcagaaatatatttacatatgtggacgacatcgtcgtcgccagcaagaacaaggaggaccatctcgccgacctcgccgagacattcgcgaacatgcgagacgcacgactccgcctaaacccggaaaagtgcgtcttcggcgttcgccagggcaaaatattgggctacctagtatcacaccgcggcatcgaggccaacccaaccaagatccaggccatcgtaaacatgacgcctccacagtccgccagggacgtccagcgtatgacaggcagattggccgctctcaacagattcatctccaggtccgccgagtgaagtctccccttcctcaaaacactccgcggtgcaaaagacttcgcctggggaccggagcaggcagcggccttcgcctcactaaaacagtacctgtcggagctggccatcctcacaagccccgactcctcgctccccctattgctctacgttgcggcatcgccgcatgctgtcagcgcggcactagtgcaggagcagacagtcgagggcatggtcaggcagtgccctgtttactatgtcttcgaggtactgacaccgtccaagtgcaacatgacagagctggagaagattgcctacgcagtcgttatgtcttcgcgcaaactgcgccactacttcgaagcattcaaggtccgagtcacctcagacaggggactcggcgaattattcaggaacccggaggcatcggtgaggattgccaagtgggcagccgatctatccggctaccacatcagcttcgagcccaggacagccatcaagtcacaagtcctggcagacttcgtcgtcgactggactgggccaataacacaaccagacctgtccacagagaaggtttggacgatccattgcgacggcgcatggtgccatgcgggggcaggcgccgctgcagtcatcacctcaccagccggggtcaagcacagatatgcagcacgcctcagcttcgctctagaatccgacagatgcacaaataatatagcagaatatgaagcagtcatcctcggcctccgcaagctaagggccctcggggtcaccacttgcatcatcaaaacagactccaagatagttgccggccaggtcgagaaagactacacagcaaaggaccccgcacttatgcaatacctcgcggccatccgaagtcttgagagacaattcaagggattcaccttgcagcatgtggatagggccaagaatgaggaggccgacgcattggccaagtccgccgccaggggcgagtccttgccctccgacgtgttctttcatatcatcggcacgccagccgtccggagccccgaaggactccaaataactaatgacagcgagggccaccgcatagtcaacctaattatgaccgaagactggcgggcaccaataaccctgttcctacaggggtactatcatccaaccgacatcagcgaggccaagcgcctcagacatcgaagccggaacttcgcactgattgaaggccaactctacaagaaaggggtcagtcagccaatgctcaagtgcgtcaccgaaaccgaaggcatccagatcctacgcgaagtccacagtggcacgtgcggctcacacgcagggccaagggccctagctgctaaggtgatccgccagggcttttactggcccgcaatgatctgcgccgcaaatcgggtcacaaggtcctgcgaagcctgccagaagttttctcctctgtcaggcagcccctcgcagtatacaaagctgatcgcccatacatggcctctccagcgctggggcctggacattgtcgggcccctgcccaccgctcaggggaaccttaagttcgccttcgtcgccgtcgagtacttcaccaaatggatcgaggcgaggactgtttccacaataacatcaaagactgcccaaaaattcttctggcaaaacattgtttgccgcttcggagtaccgtccgaactaacagttgacaacggcaagcagtttgatagacaagacttcaaggatttttgtttctccattggcaccaagctggccttcgcctcagtctatcatccgcagtccaacggggttgtggaacgcgccaatgggaaaatattcacagctgtcaagaagatgctcctcgatgaaaaaaagggcagatggaccgatttgttacccgaggcagtctgggcactaaacacgactgagtgcagggcgactgggtttactcctttccgccttctatatggatcggaggccatgaccccgcaagaaataaagcatgggtccccgcgaacagttccgtcagccgtccccgacgtggacgagccaacttcaaaggatctcattgacggagaccgagtcttcgccctgcaggccctaaacaagtaccaagcccagacaaaagcatggcgcgaccacgcagtcatcccgagggaattcagcgaaggggacctcgtactcgtccgaacaactcggacagagtccaggggcaagctggagcccaagtgggagggcccctttatagtcaagacgaaagcttcccccagcgcttacaggctcacaacgccaaacggcgaagacctggagcactcctggaacatcgacaacctccgcaaattttttgtttaactcatcagggctgacttcgcccttgtaatccgcaaaaacaatcttataccggcccgcactcttttcctcccggggggtgaggtttttaacgaggcggagccatgtaatatatgtgtcaaaaatcccccgcaaaaacatgcgtcgaaaaaagaccgcgacgacggtcttcgacattcgaccaatacgaggtcaccgcgaggctaagcgctagccgccctcgcctgcgacaaatccacgcaaaagtcgcctaagggtgcaaccggaaaaaaaccgaagtctaccgcgaagactattcgcgcagaagtcgcccacgggtgcagccggactagcacaacaagtgcgaaaaaaccggaatctaccgcgaagactatccgcgcagaagtcgcccaagggtgcagccggactagcacaacaagtgcaaagaaaccgaagtctaccgcgaagactatccacgcagaagtcacctaagggtgcagccggactagcacaacaagtgcaaagaaaccgaagtctaccgcgtagactatccgtgcagaagacgcctacgggtgcagccggactagcacaacgaaggcagaaacgacaacatcaaaccgtccgcgccgagaccgactatacgcgcaccagcacagcataacaaaacatgccagaccaagtacacaacgccttcgcaggcatatacaagcaagggcacacaacctcatcatacaagccttcacacatatacaagcgagggcaccacactctacatcggctcaaccttaggaataattcccatctccctataattaaataacattatcctaagctcctcacccgcaaaaagacttcgcagttccccttcacctgtactcacggcggccggcaaagacaacagctcctgccggccagccctactcacacgaagccgaccccctccgccccactaactctacgcttcgcgaccgcccttcgtcgccggcgcccagtgctaggaccaggcacatcttctgtgtccgcggcgtgcggtgaagtagtccaagtcctcctccgacgactcctcagtccactcaaccgagctcccagagtcagcaaaatcagaaaactcagatgcagatccaccacattcattaccaccatccgcggtcgaagccgccaaaaatttagtagtggcggttgcgtgcgcaggcccaaaatcttgaacctgcgcagcaaccaaaattcagcaacatatccaaaattccctaaaccatctacacccactacgccacctgcggagcctccgccgctgcctccgccgtcgcctccaccgccaccgtcgcaggatcttcagcactcggcgcagcagctgcgggggcatcagacgcgccttcagcggtctctgggggcaagtctccgccggcctcagcagatgcggaggtatctggtgcgccttctgcgatctccgggggtggctccagggcggccccagacacggcctccgccggggtcggctccggctcaggcggcacgctgttcaacgccccgaagtcgtccaccctctcgccacgcgccgcctaggacacaacacacaaaattcagcaaacccacacacagcccacttccagcaaacgccaaacaaacgaaaacgttacctgagccctcgccgtctcggcgcgctccctgaccacctcgcgaccgtgcggaccccacatccggtcgtagatggccccggcggattccttcaccacggggtcctcaaccttatagatatctcgctcaaaatcttcatcggcttggtcgaagacctcgaagtgccggcacccttcgcgggagagcgcgttcatcgccccctcgcaggtgaccagggaggcatacgacataaacccctccacgacagtggggagtgcctgcagctcctcctgcacccactccaggcagcgaagtccgggctctcgggccggcacttcgaagtcaccggtccgcgcgcccagctcatggtatgtatccataagctgtttgcgcgtccgttcggcctccgcgcgcgtcgcggcctcggccctctccacgcggctctccagggcgatgagccgctcctgcagctgctcggcgcgctccctggcaagattgccctccgcccgtgccagattagcctccgcctgcgcagcctgcgccttgacgagggcctcgttggtctccctcctctcccccgccaattggcgccggaggtcagccttctctccctccaacgcggccaccttgtccgccagcttgcggcacttgctgtcggcggccgatttttcgcggacggcgtcagcatgttgtgtccgaagtctctcgacctcagcagacacaactgccgtgagggcccccgacgctgtgcggttggcgaagacagccacctgcataacacacgtaagaccgcgaccctggcaaataataataataataataaaaacgaagtctggctcagcggacctgacttagcgcctccgccacctccttcagccggcgggacgcagcgcccgcctcatccctaacagccgcgagggccgccacctcgcctccggcgctaagagccccgcccttcgccttcggcgctacggcagccatcgttgtcgccgcggcaggcgcaactatagcaagttggccttcgtccgaccccgcgacgtatcaacgaataaatatataaaaaaaagaagccaatgacttaccaccaagatagtcctccacactaatatcggtggcgaagtcgacgacacgcttgcctgccgacggcaacgttcgggccgccttcgcgacctccggcactctgctggccggcggcactgccttcgtcgatttggagcccccggcgcctgccgtcgcctccggcgctttgctagacgcaggggcgcccgacttcgccgccagcggcggcttgcctccgccgggggtcgcagccttcgcagcccccccgctgcctcttcggcctagcttcatcgagcctgacaaccgcctggcacttttgtgctgctccctggcgatccttgtccatcactgccgacacaacaacagcaatattccgcccgtaaggaaaaactctccattcacgaaccatgcgagatgtaaaaaagtcctcgccagctgcacgggggataggaacattcctaggccagcaacccccggtaaccctcaacatccgagccgaagactcccggagctcgggcgaagacatccttccccccggggccgcgcacgtcctcatcaactctctagcaaaactatcagaaaccccaagtcctcccatagcagtacctaattttctctttttagaggatggggcggccgccggcgcagggtcgtctccagtctccaccaccggcttcttcccacggcggtccacatcgtcttgaccaggatagccgtcatacggcaattgatttaattcaaaaaccttgttcaaatggtcattcaacccacggatatcaaagctgcgctggccctctgtcctcggcacgtaacgtccaacgagccgcaccgccccatcctccgcctcacgcacaaaggcggccggatcgcggctttgcagattcagcgcggaggcgggacttcgcaccacccgtccaccatggaaaggtatctggcgagggcacacttcgcccaacgcctagccatgcgccaagggccataccccgtacgccacaaaattcttcaaccaaatcgcgcccactgctcaggccggcggcgcaccgaagggccccttcgtccacatcctcctccgccacttcaaagggcgggtacgctgagtaaaaatgagagcacatctcggacacggggagtccctcatggccttcgacggtaccctcagcaacataaaaccaaaactcattccagttgccccacttgttgcgggcacaaggaaccaactcgactacctgcatcgtggtcttgccggtcttcggcgtgaacgtgcaggacccaaactgagcaacttcgtctccaatcaacctcttctgccagtgcaaacaataatacttcgcaaacacttcaaccgatggctgtccgccgtacgaagtcgtcgcccagacatacttcgacagagccaccatggcattcggtgtcagctgatgtatctgaactttaaacctgcgcaggacttcgccaacaaatcggtgcgcaggcaggcggagaccggcggcgaagaatgcctcgaacacaaccaactcgccctccggctcggggacttcctccgtccccgggacacgagcaactccgccaccgaagtaacccaaccgcttcatatcttgcacgcggaccgacgacatccgcgacacgccaaaatcaacagaatcgccggcgcgcaactcctccgccatcaaactactcagtgtctcctccgacgaggcatcggccggcggcgaggcggcggccggcggcgaggggtcggccggcagcgtagcggcaacggaagaagaggaggtcggcatcgctacgtaccgtcggcggcggcgggcggtctgcttcactcgagccagatctccggcgaacaagagcacggcgggcagacgagcagcaagacggtgaaaaaggcggctagggttttggcggagcgtggaaagtgaagttcaaaaagcgccgacccccgccctcttttatagacagggcgcggctcttcgggaaacccgcaatccgacagggcgcggcgcttcgggaaacccgcaatccaacagtacgctgtcaatcaacggtcatatcaaaaacccccgcggaaccacttcgagcgagggcagcatctccgccatctagcgacgtcttcggcaccaggtgactttgtcgaaccggtccctcggagggcaaatgttcgggcgaaggcaaagacgccacccttcgctcgaggctttcgccgcagtcgctggtctgacagagacaaaacgggcagggacacccttcgctcgattcgacaccagacgaaggcctgcaacggcgtcatcccactgtgcggcctcgtccagctcagaggcccacgtatgatccggcccattgtaacgggccctgtgtggccgccgcgtgttacgggcctaatttgtaaaggcatccctgtaattacagtctgtaaccctgctttatgggaatattctggggataacctaggtagctgagggcacatgcgtccttagcacaaggcgctgggcgctcaggtacctataaatacccccgcacagtgcccgtgagaggccagattaacagagctattgccatctagcacgtaaccctgttaacgctactgctcacccttgttggccccccttgcgagttgagagcaagttccaacactttggcttgtgaaagccgaagcaaagagactgctaaagcaattcgtcataacgtacatataatagagtgcgatcaaagtagctcagaggacgagtcaacagaaatatatgctgctgaaatggtttggccaaagcagtccaaatcttcggcttgtgcttccctacagccgattcaaaagaaacggcaggaggatgtaaagtttatgtttaatgttggcaagtgtgataaaatatttgatgaattactaaaaaatggcaacattaaaataaatcacactgttccatctgtcgacgagctaaaacgtcgtgcatactgcaagtggcataactcattttctcatgccactaatgattgtaatgtatttcggcggcagattcaatcggccattaacgagggacgattgaaatttcaggaaatgcaggtggatacagagccctttcctatgaacatgattgacttcgagggcaagaaagtcctagttcggccaaacacagccgataaagacaaaggcaaagaggcaatcatcggcaattctaaagaggccgatggggatcgttaagtttcttgcaggaaagtggtagccgcgaagactcccgatggaggggaaaccctaaaggtgaccatcacagcctccaatactggggagcaagcgcagacagggagacagatgcaggaacctgtgctgcgtatcccggacggtccgacacgtaggcgcggacggtccgggaccccaccggacggtctggagagctccggcggacggtccggtcgtactcaggactcacaacgtccatgtactttcaaaccacgacgaccagagataggtacgtggaaaacaaatacattcaaggcagctggtcggttggttaaagccggcccaacttttgatcaattattgtctaaatatgtaaaaaagaaggccggccccagtaaccggccagcaaagcgaccccgctcacccattcatgagcagcgtcaggtcaggccgattggaccaccccaccaatcgaaagaaatgaaaggtcatactgtacaagtgagacctaacatacctgtatggacacctccacctccatatccacctatgccatatccatacacatatttacctctgccatatgtcccaaatcaaatgtggggcatgccaccatatccatttgggatgccacaataccccgcctggggggcacctcaaacatctgtttttgacaggttgacgccaccagtacaagaccgattgagcactgctcaatccggtcaccaggcacaaacccaacaggattgccggactactcggcctttcaggccgaccaatccggcaggggggcatatgcctacagcaactcaaaaaacaacaaaaaaggacatcatcaaaataggcactgcagatgttgtcatacaagaagataataaagggccgatgattttcggcgaatcagccaacacaaccgaaaaggatacggctaccatcaaaacagccgatccaaaatactccatgcctcgatggtgcccagcgggattgacacgatcccaaaagagaaaattacagcgcctaagagcaaaggagagccaggagaaggaggcggaaaagacatttaatgacacaaatccactatacccgccaccgcaaaagaaatggagaccgaaggccgttgagaaaaaacaaacggccacagaaatagaaagtcaatctgcaccaggcgcggaccgtccggcccctgcgcgcggaccatccgccgttcaccaggaagtctctggacaacctgcaccaggcgcggaccgtccggcccccgcacgcggaccgtccgccgttcaccaggaagcctccaacgacacgacaacatcaatggaagaggacgacctgctgggagaagacctggtcgactacgaggcttctccagaacgcccaggtatggatgtaaatattattacattttctgccgattgtactattatcggcgacgatgaacctgttgttgcccagtttgattttggtcctaaagaagccgcctttactaaaccaaaagaatcggtaaatcatttaaagccgctcttcgtgcgcggccacattgatgggataccgattgctaagatgttggtagatggaggggcggctgtaaatctaatgccttattcattatacaaaaaattaggtaaacaagatgacgaacttgtcaagaccaacatgaccctcagcggtgttggaactgatagttcgatcaaagccaggggagtcatgtccgttgaattaaccatcgggactaagacccttgctgctgcattcttcatcgctgatgtagaaggaaattacagtttaatcctaggcagagattggattcacgccaatcaatgtataccttctacattacatcaaatgctgatacaatgggtaggcgatgacatagaacaagtacatgctgatgtatcggcctgcatcgctgtggccgatgcccctgtactctggacttatgagactgctacatgtctcacaggagtagacttttctgattatcaattcataagtatagataagaaaggtttcattcctgtaatgctagagccgatggagaatcggctaaatcctaaataaagttaaatgatgaatacacacaaagttcatgagtctttggtcacggacagttcggccaccaaggccggatggtctggtctttcacaaaagagttcagactttaagaccgaacatctaccacagcgaaaagacaatattacggatgatctggtccccgagaccggaaagtccgccatcacacaaagatcatctgattcctctgtgggggacatgatagaggaatttagagatcttgataaactaggacaagggtttacatcggctgatcctttggaggagattgacataggagatggtaaaactccaaggccgacttttgtaaacaagaccctggagaccgattctagaaatgagatgatcggtctattgaaggaatattcagattgctttgcttggaattatactgagatgcctggattaagccgagagatcgtagagcatcgattgcctattaaatctggtttcagacctttcaagcaaagagctagaacatttcgtccggatcttctcccacgcatcaaggacaaaatccaccggctgctagaagctgattttatgagaccttgcagatacacagagtgggtctccaatattgtgccggtggagaaggagacaggtaaacttagagtatgcattgattttcacaatttaaatagagcaactcctaaagacgaatatcccatgctcatagccgacacattaatcaataatgcatcaggaaatagaattattagcttccttgatggtaatgccggatataatcagattttcatggccgaagaagatgcgtctaaaacggcctttatatgtccaggcttcattggtttatttgagtgggttgtcatgacatttggtctgaaaaatgctggtgctacttatcagagggctatgaatttgatcttccatgaattgttaggaaacactgtggaagtttacattgatgatattgtagtcaaatcggctgagtttagttctcatatagctgatttgcgcaaggcctttgataaaatgcgtcagtatggtttgaaaatgaacccacgtaaatgtgcttttggagtgtcggctggtaagtttttaggatttgtcatacatgaacatggtatagagatagaccctgaccgaatcaagtctattcgggaatgtggggcctccgacctgtaaagtcgaggtacagaggttcctcggcaaggtgaattatttacgaaggtttatttctaacctagccgggaaggttgatgcgtttacccctattcttcggcttaagaatgatgccgaattcgcttggggggcagaacagcaagaagcatttgatctcatcaaaaaatacttatcttcggctcccgtattaaaagcaccacaagcaggagtgccatttcgattatacattgcagctgaggataaggtcattggggctgttctgacacaagaaactgaggggaaggagcatgtggtggcatatctaagccgaaggttggtggatgctgaaacaaggtacacttttattgaaaagttatgcttatgcttgttttatgcatgcaccaaatgtagatgttatttactgtctagtcattgcactatttctggtcaagccgatgtgatcaaatacatgttgcataacccaattatgagtggtagaattggtaagtgggcttatgcactaatagaatatgacttggcctatgaaccaatgaaatctatgaaaggccaagtcgtagcggatttcattgtagaacatcgggttaatgatattcatgagctagacatgtcatacctcactattactccttggactttatattttgatggatcagtttgcaatgaagggcaaggaattggcattgtacttgtttcaccaagtaatgtctcctttgacttctctagccgattgaaaacttattgcactaataataaagctgaatatgaggccctcctattcggtttagaacttttaaatggtatgggagtaaaacatgtgatggtatttggtgattctcagctggttgtccaacaagtgttagaagaatatcaatgttttgatggtactctaaatagttaccttgagaaatgttggagcataatccattcttttgacgaattcagtattcggcatatctctagagttgagaatcatagagctaatgatttggcacaagatgcatcaggttatcggataaagagagggaagtttcacaaaactgaaaatctgataaccagtgcaaagccaaattcccaggtcgcggaccgtccgcgtgatgacgccggaccgtccggggttaccagaaatgttcttttcattaattcggctgacaatgaagccgatgcaagtgattggaggacacctatacttaattatttacgaaatctcaatatcaggacagataagaacattcggcgaacagctttcaagtatgttttgatgagtgatgaactttaccgccgaacagtcaatgacatcctgcttaagtgcttgggcccagatgacgctatattagccatggccgaagtacatgagggaatttgtggtactcatcaattagctccaaagatgaagtggttgttgcgaaggtctggtttttattggcctagtatgatagctgattgtttcaagtactacaagggttgccaagtgtgtcaaaaattcggcgacctacagttggtccctgcagccgaattacatcctatcatcaagccttggccgttcagaggatggggattagactttattggagaaattcatccttcatcatcaaaggggcattggtttgtgttagttgccactgactacttcaccaaatggactgaagccgttgctctaaagaacatgacacacaaggaggtaattgagtttataactgagcatatcattcatagattcggcattccccagaccttaactacagatcaaggtacttcttttatgtcaaaggaggtacgtgaatttgctgaattatacagaattaagctgcttaattcatctccatattatgctcaggccaatggtcaggccgagtctagcaataggacattgattaatttgataaaaaagaaaatatctgataatcctaaacattggcataagattttgtctgaggctttatgggctcatagaatatctaaacatagggctactaaagtatctccttttgagcttgtctatgggcaggaagcaatgttgcctgtggaaataagtttgaatgctatcaggttcgccagacaaaatgatctaactgctaccgattattatgattcaatgatggataatattgatgaggtgactgacaaaaggatgatagctttgggagcaatagaaaaggacaaaatcatggtagctagggcctacaacaagaaggtcaaagcaaaatcatttcaagtaggggacctggtgtagaagaccattctgcctctaaggaataaagaccggaagttcgggaaatggtcaccaagctgggaaggcccttataaagtaaaacaggtgatgtctggcaacgcctatttgctacaaacattacaaggcaaggacttgcctaaggctttgaatgggcgtttcctcaaacagtaccatcctagtatgtggcaggatgcctaagagaaccgatgtaatcacatcgagttagttgcttttggtttgctcagctccaccaaaaggcagggggcatatgttgagcaccatattgagcggccggacggtccggccctaaggccggacggtccgcggtccggacagtccttgcttgtgggccggacggtccgcacatgcgcagagcagtttagggttccgagttttgtgctatgtttgttggctagatttgcggaattaatccggaatccagtcgtgtaaagggtccagccccctcctctatataaagagaggtctacggccgatttgtaatcatcaatcgaatcaatacaacttctatttcgcattttatcctaggagtagttctagtctagtttaggtttagccactcgatccccaaattctccgcctctcctcgactctacgtcgattacaggagtctaggtcggcctgcccgagcctagacaacttctaggatttctcctccctgacggggtcccttgcgggagcgagatccagacgccgtcggcgatctttcgccgccccagcgtacgcgcggaccgtccggccctagggcgcggaccgtccggttatcaggcagggaaccctagcccctgcgccaggtcgcggaccatccggccctgtgccgcggaccgtccgcgcttgaccagagagtaccgccgcctcacgccaggtcgcggaccgttcggccccaggccgcggaccgtccgcgcctgaccagagagcaccaccgccggttcttcttgagtatttcgcgctccgaaaaagcgtcaacatgaagctaatattttgtgagtcatttcatggttccacgccgctcgtgccctggccggtcgacgacgccagcagcaggtggcagcctgctagctggtgggtcgggcaagcgtaggatgggctcctctgatgctgcctctgatgatatggaccatggctacacgatatctccacaagatactcctcaatttctttgtgccatttgacattccttttttgtgctttggatcatggcttcggttcttgtgtgttttgtttccttttttagagttctttttcggtgttttttggatagattgtgctctttaacctatgacactcgcaactgaacggttccatatactttcagcatcggcggtgtgctctttgcaaagccttggagat

SEQ ID NO: 1132 - DNA, 10346 bp, Zea mays
  Intron number 1 from transcript GRMZM2G119590_T01 (locus G RMZM2G119590) derived from phytozome v7.0 (chr-ID 2; pos 4 8917802 to 48928147 reverse strand)
cctaagggcctgtttagcatggctacagagaaaaactctaaaggagagctgaccatagcatgccaaacaccctaactctagagttgtaaactttattgagtttttttgagctgtagtataattttttagagtaccccttttgctgctccaaaaactccaaaaaataacctagtcatggagtttggagttatttacccgtcactgccaccggttatgagaaacaatctaaactctggagcaaagccgctccacccagagctttgaagtagagttgctccggggtggagtagagccatgccaaacacaccctaaatatggacctaggcttggctcggtcgagctggctcattaactgtgtgacacccaggctcctcacaagcgttgaccacgcctgcgttcctgattggttggctgcacgactgcactctagcttgtatgtgcgggtgcaggcaaagccattttacgctggttggcctgcatgcgctgagaagtaactcgcgcgcgttttcactagtgcaggcccgcgcgagcgaggccctgtggctgccagcaaccaatcaggaggtaagtgttacatctaaaatcttattttgagagtaatgacattttctaaatatatatatataatgaaataaaatgacttttaataatgatatcttttgtttataaaagttttgcctctctaaatttaataaatgtttccttttataggagggtatagaaaagatccttctatgagtaatatatttataaacacttccttgaagtatctaattactttcaaaaaaatataataataataattcgaaatatacaagtgacatattcaaaagcatttttataaataaaataataaatagattaataaaagtatattcatgtatttgtattgaagttttgactgaacgtgtatttgaaatttgaaacttgaattctgtttgaatttgaaatttaaaaatagataacgcaaagctgtgttgggcccaattccggcccaacttttccccactaacgcaaagcgactcaaccctatgtccctagtgcgcgcgctggcacgcccgccccaccccgtcagcggcttcctttataattgctggctctctatgacttgtgggcccctctcgtcagactctcctgttcgccatctctgaccgcagcagtgcattatcccccacacgagctccgtaaccgaatcaacgaattcaccgcaaggactgtggatccaattccttgatccacgctcggactctatccgttcttgggtataaaaattgaatcccagccatgccccgttgtgagcaatgcatcaaaccacaaggcgccattcagagaacagacagagaggagagagagaaagaagaaagtcgccgccgcccttgtagcgcgagggtcgccgtcaaaccctcaggcaccagcctgggtggcccgcctgagcgtctggtgttcgggagcgtcgtgaattggtcatcagggcgcagacgcgtactcgcctccgctctccgtcacagccaactccattggtccacctccgtgccgccgtgagaatatcccgagctacggcgttgggcggtcgaagaatcagcggggaaggcttcaccgccgcgtggagaacccgggtggagccctattgaatttgagttccaccatatcaaggaagaatcgctcatcggtgcgagcgccctgcctccagcgtcacgcttgccgtaatccgagatttcggcgccaccattgtaggtacgaattctcagtagagtttcgccttggttctaatatgggtaaatgctcctcgtatggccgggtgggctatgtgcgtaccgcatcggctgtgcgccggtggaaccccgcagtgggtgatcctagcgccgccgcgggcctctgctactccgcgcctgggtggcagaatgggggaaggaagcccgagtgccgttggatccaggggcatcggtcatgatctagtctgcgtaccggtagggataggatgggtctgagccattggatctctaatcgtgcggttggcgcgaatcattggtttagaactgatctcgttcgcagatctcagaatcaacggttgtcgttcgtctgtgatcgcgcattgtttcgtaataaaatgatctaatctggacggttgattttagatcgtgcggctaggattggccaataccccttcgaccaccactttttgcataagactccctgtcctttttatgaataaacccgcagtccaccgcggggtaaatctgagtcacgtgaatacttacgtagaagcccttgtcttatatggtaattgaggcgcggtttagggaaatggtagatcagataaattgatttataaaatgaatttcttatataaaaacaattccagaatcttgttaaatccatagaaaattcatattaagtccaaatgagtccattccaatttctataattttgtaataatgttgtttattacctattgcctctgttttgacatgaaaacaataataaaattgatctcctaattaatctcatatcaaacacataaaatctttgtaaattcataactcaataactgtaactccactttgatccattctagttgcattagtctcaaaataatatttgttatcatctggtaatttttttgtcatgaaatacatgttaaaatgttgcacttagtttattctatacttaaccacgtggatcttcggaaaaccataacctcataaccgtaaccctgaatttagcagttcttgtttctacgatcttgtagcaacgcgtagatcataattatacagtttatccttatgtttggtgtaatgttaattttgcctatacactgtttgtttgtaatgctacgactagcgtgaggacacgtgtcatctgaagagcaagttggtacctggaatctcaagtcccaggcaagttgtgcccttgatcactttttacccaacaatgttctttaatatcatttatccatgcataggttaattttgatgggacccaataggtcaccctagattgtttatctcattaccttgcttacccctgaatcacttgggtagtttgctattgctttacatggttttgggataatcatttatcatatctatgttccagttattttgttattctatttatgttcatgtcaagatcattaatgttaattggaacatagagcttaacttgagaaacacgtgccaccacaagggtttatggacgtccttggctgattaattaggaaagctagtggaggactaccttacccgaaaggggcaagggcagtaggggagtggtcagtgtagggaggtccttggttgattttgctgtgatggcggtcaggcaagaaccctgcattggagcttcctataaactgtagcgggttttctgaagctagtggaacttttaaaggcctcgtagtgttaccctgcctcgcctcctcggtagaggtgtatgggaagtcgcgatcccttggcagatgggtaacatgacttgtgggtaaaggataccacctctgcagagtgtaaaactggtatactagccgagctcacggtcatgagcagctcaggactctctgatgattaatttatggaactaaattcaatttgtcatatgcattgcatcgcaggtgatgttgttattttgttctactacttaattgggttggtatttacttatacttagtaattgctaataaatttttgaccaactttaaaagcaatgctcagctctaaccatcctccttggtaagccttacacttcacgtgagctcccacctttggcgagttcatgcacattattccccacaacttgttgagcgatgaacgtatgtgagctcactcttgctgtctcacaccccccacaggtcaagaacaggtaccgcaggatgaggcgcatggagaatgctgcgatgagttcgtgagagagatctaggccgtcgtctcccagtcaactttgggttgctggaccgttgtctccttataatgtaattattcatttattttgtatagaactccaattatatagtaaagatatgacattcgatcctgtgccatgattcatcatatgtgtgagacttggtcccagcacacctggtgattatgttcacgcccgggtcttggtgccccaaaatccaggtgtgacagaagtggtatcagaggaatgttgactgtaggacgaaacctagatagaactggacaaccattatctacttacctttgctactctgattcttttctaaactcttcttaatcttttctcatctatttacgcttactctgattattcttaccttttccttctaaagacaaatgtggagttcacactttgaaatcttgtgcctaaagtgacttttaggaataggaaacctaatcttaggagcaaaaacaaaactattttatgagtatctatgcacttgaatgtttgttcttatgatacttgtctgatttggatctttgattgagtgtgatgagttgtggagtaatgtccacaattacatctgcataaacatctaggcataaaggatagtatttataagataactagacaatctagattatctcccaaaaaaaatatatatctagtatttcgtatctatctcatcttaacagattctatcttacctttggacattcacctcatacaactagttaccctagtcttgacataaaatatctggtcaagccctaccaaagaatcttcagtacataaccaactattagcttattcattccgcctaccaaatgattcccttgcaaaactatcttaccatatgtatctaactcagatggtcaataccaggtgggggtggtggaattgatttacctcctaatcgacacactcggtggatatatagacaaccccagccacagccagcagagatgaatcctcctaatcctccaccaggcggagttgacccactgattgcagctcagatgaggatgatgcagcaaatggcggacactatggcagatatgcgcactcagatgcagcaataacgtcaggaaatgcgccagaaaagagaggatgtacgtcgggagatgcgccaagagcgggaggagatacgtcaagagagaagggcgcaacagcaacagcaacaagtaccattgcctcccccaccaccaccagttccaccccgggacaagcaccgggaattcatgagccacaaaccaccaaccttctccaactccgtggatccgctgcatgcagatgactggctaaagtctgtagaaaagatgctcaacatagctcagtgctcggacagagagaaagtactctacgcatcaggtcgtcttgctggtcccgctgcggattggtgggatgcgtactgcgctgctcatgctgctgtcgatacaattacctgggaaaaattctccactcaattcaggaattaccatattcctgctgggctcatgaagattaagagaaaggagtttttatcccttaagcaaggaagtatgtccgcgagtgaatatagggacaaattcatccagttatctcgatatgctcctagggatgttgaggatgatgagcaaaagcaggagctttttctggacggtttgattggacccttgcaatatcaactggtaccgcacacattcccatccttccaaaggctacttgacaaagctattgctgtagaaaacaagaggagtatatttggagagaaaagaagggctgctaaccaagggcaagctggaagtagttcccgtcctcgctatactaccactccaagtacaccagctagtggaagtaccggacaacaaactcaataggcaccaactgctcctccgaaagcaagcaccccagcaggacccgttgctcctaacacaaccaccaacagggcatgcttcaagtgtggacaaccgggacactacgccaactactgtcccaacagagctgcctacactacaccggctccgatgaagcaaggacaagcctcggcaggaaagagtcaacccttatctatcaaccgaggacaagcccaccatgcagaagtagaagctgagccaggtgaacttgaaattcaagaagaagagctagttgaagatgaagtagttggtgaagaagtcaacgaacaacaagaatagagataaatataaatatagatacatatatatatatatatattactatttgtaagacctaaatattagtttagccaatagtaagtattttactattttagtaatcataacaaggtctattttaccctatgttttgctaatgagttatgaatcatgctgagattttgtttgtgcatatgttctgagaacaatatgagtgtacaccctttccttacaaatctcgaggacgagatttctgttatgggggtaggatttgttacacctaaaatcttattttgagagtaatgacattttctatatatatatatatatataatgaaataaaatgacttttaataatgatatcttttgtttataaaagttttgcctctctaaatttaataaatgtttccttttattggagggtatagaaaagatccttatatgagtaatatatttataaacacttccttgaagtatctaattactttcaaaaaaatataataataataattcgaaatatacaagtgacatattcaaaagcatttttataaataaaataataaatagattaataaaagtatattcatgtatttgtattgaagttttgactgaacgtgtatttgaaatttgaaacttgaattctgtttgaatttgaaatttaaaaatagaaaacagaaagaaaaacaaagaaaagaatagaaaaacaaacctgtgttgggcccaattccggcccaacttttccccactaacgcacagcgactcaaccctatgtccctggtgcgcgcgctgacacgcccgccccaccccgtcagcggcttcctttataattgctggctctctatgacttgtgggcccctctcgtcagactctcctgttcgccatctctgaccgcagcagcgcgttatcccccacacgagctccgtaaccgaatcaacgaattcaccgcaaggactgtggatccaattccttgatccacgctcggactctatccgttcttgggtataaaaattgaatcccaaccgtgccccgttgtgagcaatgcatcaaaccacaaggcgccattcagagaacagacagagaggagagagagaaagaagaatgtcgccaccgcccttatagcgcgagggtcgacgtcaaaccctcaggcaccagcctgggtggcccgcctgagcgtctggtgttcgggggcgtcgtgaattggtcatcagggcgcagacgcgcactcgcctccgctctccgtcacagccaactccattggtccacctccgtgccgccgtgagaatatccagagctacggcgttgggcggtcgaagaatcagcggggaaggcttcaccgccgcgtggagaacccgggtggagccctattgaatcggagttccaccatatcaaggaagaatcgctcaccggtgcgagcgccctgcctccagcgtcacgcttgccgtaatccgagatttcagcgccaccattgtaggtacgaattctcagtagagtttcgccttggttctaagatgggtaaatgctcctcgtatggccgggtgggctatgtgcgtaccgcatcggttgtgcgccggtggaaccccgccgtgggtgatcctagcgccgccgcgggcctctgctactccgcgcctgggtggcagaatgggggaaggaagcccgagtgcagttggatccaggggcaacggtcatgatctagtctgcgtaccggtagggataggatgggtctgagccattggatctctagtcgtgcggttggcgcgaatcattggtttagaactgatctcgttcgcagatctcggaatcaacggttgtcgttcgtctgtgatcgcgtgttgtttcgtaataaaatgatctaatctggacagttgatttttagatcgtgcggctaggattggccaataccccttcggccaccactttttgcataagactccctgtcctttttatgaataaacccgcagtccaccgcggggtaaatctgagtcacgagaatacttacgtagaagcccttgtcttatatggtaattgaggcgcggtttagggaaatggtagatcagataaattgatttataaaatgaatttcttatataaaaacaattccagaatcttgttaaatccatagaaaattcatattaagtccaaatgagtccattccaatttctataattttgtaataatgttgtttattacctattgcctctgttttgacatgaaaacaataataaaattgatctcctaattaatctcatatcaaacacataaaatctttgtaaattcataactcaataactgtaactccactttgatccattctagttgcattagtctcaaaataatatttgttatcatatgataatttttttgtcatgaaatacaggttaaaatgttgcacttagtttattctatacttaaccacgtggatcttcggaaaaccataacctcataaccgtaaccctgaatttagcagttcttgtttctacgatcttgtagcaacgcgtagatcataattatacagtttatccttatgtttggtgtaatgttaattttgcctatacactatttgtttgtaatgctacgactagcgtgaggacacgtgtcatctgaagagcaagttggtacctggaatctcaagtcccaggcaagttgtgcccttgatcactttttacccaataatgttctttaatatcatttatccacgcataggttaattttgatgggacccaatagatcaccctagattgtttatctcattaccttgcttacccttgaatcacttgggtagtttgctattgctttacatggttttgggataatcatttatcatatctatgttccagttattttgttattctatttatgttcatgtcaagatcattaatgttaattggaacatagagcttaacttgagaaacacgtgccaccacaagggtttatggacgcccttggctgattaattaggaaagctagtggaggactaccttacccgaaaggggcaagggcagtaggggagtggtcagtgaagggaggtccttggttgattttgctgcgatggcggtcaggcaagaaccctgcattggagcttcctataaactgtagcgggttttctgaagctagtggaacttttaaaggcctcgtagtgttaccctgcctcgcctccttggtagaggtgtatgggaagtcgcgatcccttggcaaatgggtaacatgacttgtgggtaaagggtaccacctctgcagagtgtaaaactggtatactagtcgagctcacggtcatgagcagctcagaactctctgatgattaatttatggaactaaattcaatttgtcatatgcattgcatcgcaggtgatgttgttattttgtactacttaattgggttggtatttacttatacttagtaattgctaataaaattttgaccaactttaaaagcaatgctcagctctaaccatcctccttggtaagccttacacttcacgtgagctcccacctttggcgagttcatgcacattattccccacaacttgttgagcgatgaacgtatgtgagctcactcttgctgtctcacacccccccacaggtcaagaacaggtaccgcaggatgaggcgcatggagaatgctgcgatgagttcgtgagagagatctaggccgtcgtctcctagtcaactttgggttgctggaccgttgtctccttataatgtaattattcatttattttgtatagaactccaattatatagtaaagatatgacattcgatcctgtgccatgattcatcatatgtgtgagacttggtcccagcacacctggtgattatgttcgcgcccgggtcttggtgccccaaaatccgggtgtgacagtaaggtaacgagcttgtttgactcggctcgttaaggaaccgagctagagaatcaactcggcttggctcggctcgtttgcgagctcaagtcataacaacaaaaatctttatatatataacaacagaatcaatttctaattaatctagaccgatttaatactagaaaaggctattaatcatcacaatttcacatcccacatcaactcaatactaaattaacacaactcatcacttattgatttatccaacataagtggaggctttgttttactgataaatggtagctcgtccgagctaatgagctagctcgttaataaaccaagctaagatactaactaagctcgtgacaaaaatgaaataagctgagttgatcacgagccgacgagtcacgagtattttatatagccctgtatggacctggagacatttcagaagctctggcggcg

SEQ ID NO: 1133 - DNA, 9343 bp, Zea mays
  Intron number 4 from transcript GRMZM2G168166_T04 (locus G RMZM2G168166) derived from phytozome v7.0 (chr-ID 10; pos 112039128 to 112048470)
accactaccttggtggatcagcaaaaagcagaggggtattatctcaaggcatatgctagttactgcttttaaattttaaggcactttggtttgagaaatagttctagttttgttcccaatgaccataaccaatttgaattgtattcccgtgctgtttacctttatgttgttatgtcatgtacggtaagccgtacacaaggcacaggcgcgcacgcgacatccggcgggcagcagagcgcgccaaaagtgcagcagcgccacagatggcaggcactcaagtttaggaaagcagcagccacttatggcaagggataaataggaaagtatcaatttagctcttatggcaaggaataagtaggaaagtagcaatttggcacttatggcaaggaataagtaggaaagtagtattttggcagggaggataattagggagcttgctccatttgtgtggccgccggccctatatatccccaggtgcgcagcactgttgagggcaataaagtatcaagtcatttcccacctctctctctcaagcctgcggttaggaggaatactcctaccggagaagacggccgaaggctacgagttacgtagccgaggcccgacgagtcaagggttcgacgctcttgacagcttggtatcccgagtccggagatccttgcctcacctagtcccgcccaccgatccactcaccacaccaccatccccgaccacgcccactagcggttcgccatcctccatccacatggccgagcccactttagccgacgtcatcgagatgatgaaggccatgcaggccgacatcaccaggctgaaggagaagtccgattcctcctcctcaagcggcgcccagcccgagcgtcatcgcgacatcgatcgcccgccaaggttccagaaatgggactttccacggtttgatggcaagaccgatccactcctcttcatcaacaaatgtgagtcgtattttcgacagcagcgtacgatggtggaggagcaagtgtggatggcctcgtataacctcgagggcatcgcacagcactggtacatacaactacaggaagacgagggcaccccattcttggagcagattcagggaattgctcaacctgcgctacgggccagctccttcgttagcgccgttcttcgagctcaccgagtgccgacgcaccggcacggtcgaggagtactccaaccgattccaggagctcctaccccgtgctggcaggatggcggaggagcaacgcgtccaactctacaccggcggcctgctgccaccgctcagccacgcagtacggatactcaaccccggcaacctcaacactgctatgagcctagcgcggcaggtggagcagatggagctagccaagatcccggcaccagccaagacagtgccgcgcggcatcctaccgccgccaccaccgcggccagcgacccaggcgctaccggcgccacaggcccccttggcgctgccagcaccgccactgggcgcagcaacgggccgtggcgacggctccaggcgcttatctccagaggagatggcggatcggcgccgccaaggcctgtgttttaattgtaacgagaaatattctcgtggccacaaccgtttttgcaggcgcattttcttcttggatggcgtcgaaattgaggaggccgaggcggaaacgggtgccgcggagaccgacgctccctgtttctccctccaggccgtggccggggtcgcgccaggggacaccatgcagatcgccgtcaccctcggttcggtctccctggtggcactgctcgactcgggaagcacccacaattttatatccgcagcggcggcgcaccagtcgggcatccccatccagcgccgaccccgcctcacggccatggtggccaatggcgaacagatcacctgcgcgggcgtccttcgcaatgcgccgctccacgtcaagggcgaaatctacccggctgacctcttcgtcatgccattggccgggtacgacgtcgtcctcggcacacgatggcttggggcattggggccaatcgtgtggaacctcgccaatcgccgcatgacgttccagcgccaggggcgctccatcttttggacgggcacgcccagccccaaggagcccgcgctgtgcgccaccaacgggacggacgccctactggaggcccttctcgcctcgttcggggggctcttcgcagctccgatgggtttgccccccaagcgcgcccacgatcatcgcatcctcctcaagcccgatgcgtcaccggtggctgtccggccgtaccgctacccggctgcccacaaggacgagctggagcggcagtgcaacgccatgattgaccaggggatcgtgcgacgcagcgactccccattctcatcgcccgtgctcctggtcaagaagcccgatggctcgtggcgcttctgcgtcgactaccgggccctgaacgccctcaccatcaaagacgcgttccccatcccggtcgtggaggagcttctcgacgagctccacggcgccaaattcttcaccaaactggatctacggtcgggctatcaccaggtccggatgcggccagaagacgtgcacaagaccgcgttccgcacacacgatggcttgtacgagttcctcgtgatggcgttcgggctctgcaacgcccccgccacgttccaggcactgatgaatgacgtgctccggccattcctccgaaggttcgtcctggtattctttgatgacatcctaatttacagcagcacgtgggccgatcacctccgccatctacgggccgtcctcgatgagctacaacgccatcagttgttcatcaagcgttcgaagtgttctttcggagcaccatctgtcgcctacctcggccacatcatctcgggctctcggccgcaggggtggctatggacccagccaaggtggctgccattcacgactggccgccgccgcgcacggtccgggccgttcgagggttcctcggcctcaccgggtactaccgccgcttcgtccacaactacggcacggtggctgcccccttaacggccctcctcaaaaaggatggcttcgtctgggatgacgcggccatggctgcctttacggcgctcaaggcagccgtgtcgtccgcccctgtcctcgccatgccagacttcggcaagcggttcgtggtggagtgcgatgcgtcctccgcaggtttcggtggggtgctcgtccaggagggacacccggtcgcgttcttcagccgacctattgcaccccgccaccgcgacctcgccgcctacgagcgcgaacttatcggcctggtccaggccgtccggcactggcggccgtacctatggggacggcacttcatcgtcaagacggatcacttcagtctcaagtatctcctcgaccagcggttggccacgattccccaacaccattgggtgggcaaacttctgggagtcgactttacggtcgaataccgctcgggcgccacgaacaccgtcgccgacgcactatccaggagggaccccgacgagggcacgctgatggccatttcagcaccccgtttcgacttcatcgagcgcctgcgccaggcacaggctacggatccggccctcgtcgccatctacgaagagatccgcgcaggcacgcgcgcagcaccatggtccatcatcggtgggatggtcgccatggaggggcgcctctatatcccagccacttcacccctactacgggagatcgtggccactgtacacgatgacggccacgaaggcgtccaccgcaccctgcatcgactacggcgcgactttcattttcccaacatgcgtcgtattgtgcaggaattcgtcagggcgtgcggaacgtgccaaacatacaagtcagatcacctacgtccggctggtctcctacaacccctgccaatcccagatggggtgtggtcggacatcggcatagacttcatcgaagctctgccccgcgtgcaaggcaagacggtcattctcaccgtcgtcgaccgtttcagcaagtactgccacttcatcccgctggcgcacccatacacggcggagccaggcgacccaccgaccatccggtcctacgagccgggtgacgcacgcgtgcccgcggtggcgcaggagatggacgaacgggccgccttcctcgacgacgttcgctaccgtctccatcaggcgcaagtatcccagaaacgcgcctacgatcaacatcacaggcaggtcgtctacaacgtcggtgactgggcccttcttcgtctccgtcaacgaccatcggcatccctgccacgttccaccacaggcaagttgaagccccgttatgtcggcccctaccgtgtcaaggagatcatcaacgaggcggccgtacgcctacagcttccatccgacgccaaaatccacgacgtcttccatgtgggcatccttaagaagttcgttggggcgccaccaacggaaccacctgcgctcccggccacactcaacggcgcagtggtgtccacaccttcccgtgtcttggcgggtcgcctggctcgcggcattcggcaaattttgatacagtggcacggtgaaccagtgacgtctgcgacctgggaggatttcgaggatttccgggcaaccttccccactttccagctcgaggacgagctgactttcgaggccgggagagatgtcatgtacggtaagccgtacacaaggcgcaggcgcgcacgcgacatccggcgggcagcagagcgcgccaaaagtgcagcagcgccacagatggcaggcactcaagtttaggaaagcagcagccacttatggcaagggataaataggaaagtatcaatttagctcttatggcaaggaataagtaggaaagtagcaatttggcacttatggcaaggaataagtaggaaagtagtattttggcagggaggataattagggagcttgctccatttgtgtggccgtcggccctatatatccccaggtgcgcagcactgttgagggcaataaagtatcaagtcatttcccacctctctctctcaagcctgcggttaggaggaatactcctaccggagaagacggccgaaggctacgagttacgtagccgaggcccgacgagtcaagggttcgacgctcttgacatgttatgtgttgtttttaaaacatgtagcaatttgtttgtagcgagtttaaccctagtccctactaatataaaggagtttctccatgcgtctttggtaattttgagaaccctcctcaatttttcttcattcaacccgtggttctctgctccgcttgccttgtgccgatctgtcgttccccttcctatctcctcccagtgcctccttctctcgccctcttcttgcaggattgagagcacctagagggggtgggggtgaataggtgatcctgcaaaatatgacttaagacacacaaacttggtctaaaagttagagttagtgcaaattaaaccaagtttgagaggagagaagagagaggttcccttcacttgattgctctatcaagatatgaattagacttagagcaatatcacaagtgagaatagagaactttaggaagatggaaaatcacagtaaagtaattgacacaagagacacgacgatttttatcccgtagtttggtcaagcgtaatatgcttgcctactgcacgttgtggtgtcccaatggacgagtgttgcactcaacccctctcaagtgatccaagatcaaacttgagtaccacagttcttccttatatctcaaaatcctgtttgtgaggaatctctagaatctggagtctctcacagccttacacaatgatcacaatcaaaaccggagtaaggaagggagagataacacacacaagagcaaatcacaacaacacacacaagagatgcaatgacaagagcgcaagaacagactgacggagttagaactcaaaaatagcgctcaaatacctctagaatcacttggaggcgtggtgttgtgcaactcttgaggtgcttggtactgctccaaggcgcctaggggtcccttttatagccccaagtggcctaggagccattggcttctccaaatggaagccacaaacttgccttgtctgcgggcgcaccggacagtccgacagtaacggtcggctgacgatctgattgttccgggcgcagcaccggacagtccggtgtgcaccggacacccgccatgtcagctagccgttggcgcgcgttgggggggggcaaccgttggagccgatgtccggtgcaccggtagtgcactgttcactgtccggtgaattttataattaaaattcccgagaccagcgagttcgtccgtacgcggcactggacagtccggtgggtcccagactggcctccaacttcttttgactcttcttgagaggttccctagcacttagacaaacatagttagcacataaaacaattgactaagtgttgggaccatacctttttcactcatttcctctaggatttgtaatatacctcaaccaagcctaaaaagcacttttcttgcaaaactgagttagtagccaaaacaaagtgctagaaatatatagtagggtatgtgtaacttatccaaacacttaaacctcatgtttatgttggtttgctcaaagttgcacttttggccctccaattcaactcatttggaattggtgtcttcaatttgccttttctaaacctgtgctcatgctcatataaatggagttagctcaaggtggtgtgttgagcatttaatcaccaaaacaactagaaatggcccaagggcacatttccctttcaaggatacgatcgccatggccctcctcggcggtgatctcgaatgcggtctcagtcttcctagccatgtcgcgcaccatggccgtgctggccacaccgtgcgatacgagacccgcgaccgcctcgttgtcgtgccacgccacgacgtggagtgcggtggcaccgtcgtgccgcaccttgcgttggccctcgcaccccccgttagaagcgccttgactgtgtcttgctgccccgcctccgcctctacccgtagaggagtcttgtcgtccctccttgccacgtcgatacatgttaaagaagacaaaaaggacgcagatgtggacgaggcgggagaagcagaggcgggcttgccaagaagtagcttcatgatgtcattgtggctggcggcagtggccacgtggatggcgttggagccgacgggcatcgcgccgttggcgaggagctgaacgatgaggcactcgccagaggcggtggcggtctcgaggggtgtccgactatgactcggtttgttagcatcgacaccgtactcaagtagcacctgaacgatgtcggcacggcccagactggcggctaggtcgaacagtgtgtggccagactcgttcgtggcgtccacagcatgccactcgggctcattgagcgcctcgaccgtgccgacctcaacaagccacgcggccatggatgttcccacgaagctcgccctgattctcctgtccacgaacacctgcttcctcctcgcagagaaccatttcgggttgatcgagtccagtgccttcacaggctccttcaccgcgacgtcgggcgcgaccacgatgtgtagcagacacgcgtcctcgtcctagctcgctcctgacctgttgggcttctatggaggcgcggaggccaggtacaacacctccatggtgagcgccgtgagcagcgccatgggcttctatgtgggcgaaccactaagcgcccacacaccactgggcaatggctacagcctgaatgccaccgacatggtgtgcatcacattcctcagcatcagctcccccctcgcctgcctcctgggctccactcgaaccatcacctcgttcacggctcaggtatgaccaaccgatccatgccgtcctgctttgttgtcttcttgtcttctcacgccaaagcttgccgagcgagagtcccaacagctgagcaaagtgcccggacatctgcgccaacgtcatcaccagctactctcccaccatcctttgcatctagcaaggtaactggtggtgatataaatcatgggattctgggatatcgcgtctgttatactcaattgattggtaggaaagcgcaagtaactgctgattttgtgtgttttcttgttagatgtaagtagctaatggttacaacaggaatatgtcgacttatgattgcaactaaaatatgttgacttatcttcaggttaatagtttgttgggttggttacttcctactttgttccagtggctctcctttaatgttttctttcttctaaattctggttcaaaacttgatatttctgtttttgaaatgcaaattagtagcaagtttccagcaccagaaacatgtggcgatacactttgttggttatacttgtatctacaagatccttgattgtaactgttttaatataaacacggttttaatggaaagccacgccaacataatatatttttatcttgcaaatcacatagttgatctcagtgacacactggtacttttatcatgattttgcattgtatttgattctattttgatcatcaaccttgttaatcttaagaacaattcgataaaccacagtattgttcaaaaaattggcataacaataagtaaaatttgtgtaaattagaatgttgtaaatcagtaaacctttttaaattgtgggtctcatggcttcccagtatagcttcagaaaagctattgcctgctatatgcagaagtttagaaatttagggttcctgttgtttttcccgcttcacaaggaccgtaaaaatctatagatggctgcttagaaccctgtttataagtccctgcttagaaccctggttcatgggtgaactttgccaagttcaaattaagacaggtttgacttttttaggcagcggcccactgttatatctgtagcaatcctacgcactagaggcttctttttccgctctaaaaaagtgtaaaaggttccagtttatttctcaaatttgcatcgattgccgtgatgatttctttgcttcaaaagtgttttgcgctgtgctcgttaagtatagtggttgtaagatcagtcttgaaccagacatgctcatgaaaaaaagacaacatgcaggatagtcttcaaagtaacacaaggtcatgtcaggagtgagtgaatatgacaggggtggcaaataaaatcgcatgtgaagttttttttgtcattttattgagttggagagtgtttgtacatggcgtggtccataaacaaaaatgaggatgtactgaccacaacaaagatctataagggcttatataatgtatcggtccttgtttgatctatcatataactgcatgcattgcatattatgttttgtaggaacaataaaaccgaattgaa

SEQ ID NO: 1134 - DNA, 12305 bp, Zea mays
  Intron number 6 from transcript GRMZM2G077863_T03 (locus G RMZM2G077863) derived from phytozome v7.0 (chr-ID 2; pos 9 5450344 to 95462648)
gcagaaactttacctaaggtaatactcaatgttgagacgttatttgttttttgtacatatgttatttattgcatttatttcttgactgtgtatgcaagtgtaataaatataatttacagaagtttctatccttatagccatttttcttaatcgtatacatcattaaattccaaaggatagatgttttgtttatgttaaaattcaatcttgaaagaaaactgagtccatcaaatgttgtgtttgtgttgtttcccactaatcttaagggcgtacccagtgccgtaggcttcccgcactgtgcggggtctgggcaagggtatctttaagcgccaagccttacccgcataatatgcagaggctggggctcgaacccgggaccttccggttacaagacggtaggctctaccgctgcaccaggcccgcccttcttcccactaatcttaagattgtgctaattttctttcaatgaaatctacctttgttttttttcatctgtagtttatagatcttcaatttgtttgtttcgttggtttcccatggcggcttgcaaaatgttggctttatagtatggctgataggaggtttaatggggttaagatgaattttgtgcatgaatgccatccatatatttgtgaagactcaaccatgaatgtatcgataaatttgggaggtgaactgtcatgacctgtcagggcccaagggggcggcgacaaggagcagcagtaaggagcgcatgtcgaaggatatgaagattagttgagattatctagaagattagttaagattatctaggaaggttatcagttagtagtttgttgagagtttttaggagagttttaaggagataaggatctctagatatataggggcggctagccggccagccgacctatttatgtaatcaatggatgagaaataaagtaagcaagaattagaagggagaaacgctcctcttgctcgaccatgggcagatgcctcggccggcctccctagtgccccctaacctagtcgtcgctctctaatccacggagacacaccctgtgaacaataaccgtgactgtagcaccgcagcgtcattggcagggcagtacaacgccgcctccaccaccagctcccaaccatcgatccccctctccaatcactcaccgatctgcaaccataacatttggtatcggatagcttgggtttcgatccaatcccatggcttctgctgccaatttcgcggcgtcgtcttgacaattggcgtccccatctccatgggctgcgccgcatgccaccttcgtcacgttgtcctggcaaccagcatccccatctccatgggctttgtcgcatgcaacctttgtcacatcgtcttggcaatcggcgaccccatctccatgggcatcaccacctgccaattttgtcaccacatcctggacgccgacgtacccatctccaggggcagcgccaaattttgtcacatcatcttcgctgacggcttctccccatgggcaacgccactaggggaagccatgactcagccatcaccatcttcattgatggtggacttgtggctctcactcttagtggttgagcaggggctgctgcaaatcaaagcagcaatgcaacatgagcggcagctggcgtcgtccgcaaggctctagacgtcggcaactgtggtcctacaggctgttgcttgtggcttgcttgcacgacggagagtgtgggagatgcgctggcagacgctcgaggcagccttagtggtgattaacctcgacacacggggacacgacctcgccctgtcgggcggccatcagcagccgcgctggcccgctgtctccaagtgcaagcttggtgcgtgtcctgcgggcggtgaacttcaactttatggcagcgacagtaaggaaggcgctcccctcgtcgtcggcaagggtgcactgcttagcgccaccacattccgctagcggttggtcattgttgcgacctactctaggtggccatccatgtgctccccttttgtctagaactccagatggcgtccatgggatctaggtggttgcacatgtgcaagtccaatgcgtggagggtgtccgccttatcttatggggtcaaaaaaattcaggttcggaataataaaataagccgagatgaaaaaagcttgtcttctaggtttttggttttgggtcaagtagagccggtctttgggcacccgttatgctgcagctcgaggacgagctacttgtccaggagaggtgtagtgtcaggacctgtcagggcccaagggggcagtgacaaggagcagcagcaaggagcgcaggtcaaaggataagaagattagttgagattatctaggaagattattagttactccatccgtcccaaaatataaggcgtaaccattttttgtttttgtcccacaatataaggtgtactctatgcacatgtacatcgatgcagtggtatagagagaattaaatgcatttcttggtttttgaaccagaggtggttacgccttatatactgggatggagggagtagtagtttgctaaaaatttcattgctagtttatttgttggtgatcagttggctcttacccatgaccagaaacatgagcttctcttcgatttctatgataatcttcttggatgagctgggcaaaggcagttttctcttgatttgggagccttccatagtaatgcaattgatctcaactcccttgagcccccgtttctgaaatggaagttcaacaaactattgcttgtctgccggcagataaggctctggggcctgacgggttcacatgctgtttttataagtcgtgttggcgcatattaaatctgatcctatgttagctcttctcttcagcaaggaaatccccagaagttgtggccgctcaattcttcttatttgactcttatccccaagaatttggatgcttcttcccctggtgattacaggcccataaggccataagcttgatccatagttttgctaagttagtcaccaaggttttggccaaaagacttgctcctcacctggccaagcttatctgggccaatcaatgtgctttgataaagggacggtcgattcatgacaactatatgttggtgtacaattctatcaaagccctccaaaaaagaagatggccaacattttcctcaagttagatatctctaaagcttttgattcaatctcctgggcctttttgattgaggtttttgttcatttgggtttcggtcttggatgatgcaatttgatctcaaatcttctagcaacctcctccacttaggtgctccttaatggttccctgggcgatttcattacacaccgtaaggggctgcgtcagggcgactccctcttgcctttgctttacatcttggttattgatgttctaagcagtctctttggtaaggctgaaagtatgggtcttctacattctctgggcagcagcaatgttaagaatagaatctctatttatgccgatgacgtggtgctgtttattaaacctgaggtggaagatttgagttgtaccaagaccattttagattgttttggtgaagcttcgggattgagagtcaatatgcaaaagaattctgctattcctataagttgtagtgctgatgtgaagcaagtcatctctaattccctttagtgaacaattgggtcattcccttgcaaatatcttgggctccccatctccaaccagaagctgagaaggtctcacctcttggattgggtggaaaagattgctgataggcttcccaactggaaggctaatctccttaaccttgctggaagaacaaccctggtgaaatctgttttatctaccattccggtttacctgttaattgctctgaatgttccaaattgggtgattaaagccattgataaagtccggagggctttcctttggaaagggatgaaggaggttaatggaggtagtagctgtttggtggcttggataaggtgactagacctcttagccttggaggcctttgtgtcccgaatcttcgctatatgggatgggctttacaacttagatggctttggtttaaaaaagcagacccctctagaccctggaacagattgaagtttcctgtcccgaagcaagttcgtgatttcttttcaatctcagtggtgaccttggttggtaatgggcagaacacgattttctggaaagatcgatggctcaatgggggcactattgctgatatggctccagaggtggttgttgccgttgctcctaaggtggcatgctctaaaacatttgctcaatgcctccctaacagaggctgggttagtgacatcaagccggtgctctccatatctggtatctaacaatatctcctttgggatttattggagaatgtgtacctcactaatgaagaagatcaacatctttggaggcacaattcaaatgggaccttttcttccaattattgttatcgtgcctttttcagggggtctatcacttttgaacccttgaaaagactttggaagtcttgggccccacagaaatacaagtttttcctttggttagcattgagaaacaaatgctggacaactgataatctagggaaaagaggactgccgcacccggatagttgccccttgtgcgactaggagagtgaaacggtgcagcacaacctcactagctgtgtcttcgcccgacaattctagtttcacctcttttcttctctagggatgggtcacctctcccataggactgaagatgattcgttagaggaatggtgcaggaggaccaactcactagcatcagtgtaaggaaagaacaacaaaatgggatcaatagtgccatcattttcggtgcctgtcatggccgggcgttacggccggacatacaataggcgtcgccgagatatgcgacgcgcagcggaacgcgcggcgcgcacagcaggcgcgcgagatgaggaaagtccggaagaggaaggtccggcagggggctaagataagggaatagccttccatgaataaatccttcctattatggagatagctttctataaataaaaccttcctagtattagtagttctttcctgttatgagatcctaaattagtgggctgatggccttatatatgatgtaaccgcacttgaaataagcaagcaagaaataccccttcctattctcctctcttctctcaagcctgcggttggggagttctcaccccaccggagaagacggacgactacgagctgcgtagccgaggtccagccagtcaggggttcaacgcccttgacaacttggtatcgggatcccggtgttcctcgcctacttgttccacgacgtcatcaccaagctccgccaccttctgcgctgcgcctgccatggaggatgacctcaagaccaccgtgaagcaactcgccagggccgtccaactcctccaagccaccgccgaggccaacgccaaggcaatccacgcgctgtcctccgatccatcgttgtccgcaggccaccgccacccaaccggcgagcaccacaacgatcggccgccccggttccaaaagatggacttcccgcgtttcaatggcaagtctgatccgctcatcttcatcaaccgttgtgagtcctatttccatcaacaacgtaccatggcagaggagaaggtttggatggcctcctacaacctcgaagatgtggcccagctgtggtacatccagctgcaggaggacgagggcacaccacgctggggccgtttcaaggacctcctcaacttgcggtttgggctgcccctccgctcggcgctgttgtttgaactcgccgagtgctggcgttcggggaccgtgaaggaatattcgaatcgtttccaggccctccttcctcgcgtgggccggcttgacgaggcctagcgcgtccagctgtacactggcggtctgcttccgccgttgagccacgcagtccgcatccacaacccggagacgcttgtgatggcaatgagcttggcgcgccaggtcgagttgatggagaccgacaggtaggcgctggctccaactcgccctggccagcgcggtcttctcccgaacctggcgccgcgcccagcgctggccgcgcctcttccaccgctcgcgctcccggtgccaccggtgggcgtctccacgggccgtggcgcgggcaaccagcggcggctgaccccggaggagcaggctgagcattgtcgcctggggctctgttttaattgtgatgaaaaatattcccgtggccacaacagattctgcaggcgcatcttcttcgttgacggggtggagatcgacaacaccgacgacgctacggccggggctgacaacgaggcaccttgcttctccttgcaagtggccggggtggccatggcggacaccatgcagatcacggtggtgcttggggccacatcactcgtcgcactcctcgattccggcagcacgcacaacttcatctccgaagaggcggcacgacgctctggcttgccgctacgccagcggccctgtctcacggccatggtcgccaatggcgagcggatcacctgcgagggcatcatccgcgacgcgcccctcctcatcgatggtgccctgtttccggcagacctctttgttatgccgctagctgggtacgacgtcgtccttggcaccaagtggctcggcgcgcggggacccatcgtctgggacctcgctcgccggcgcatgtcgttccagcacgagggccacacaatctgctggcaaggcatgccgtcgtcaactgctccgcggatccaggcaaccgtgaccgtggccgcggacgccctcctagacgagctattgggtgccttcgacgacatcttcgctgagccaaccgatctacctctagcccggggttgcgaccaccgcatcatcctcaagcccgatgctgccccggtggcggtgcggccgtacaggtacccggtcgcccacaagaatgaactcgagcggcagtgtgccgccatgattgagtagggcatcgtccgccgcagcgactcaccgttctcctcgtcggtcctcctcgtcaagaaatcggacgggtcgtggggcttttgcgtggattaccgcgccctgaatgcgctcaccgtcaaggacgctgtcagagaggaaattctccggccgggtggcggaacgcacccgccctaaatcctaagatgaggaggggcctaagcgttttgcctgtctactaagcgatgaatgagcacaagaacaaacaagggtttagagtggttcgggccgccggagcgtaataccctactccactgtgtgatgtattgagcttgagagcttgtatgaacttgtgagcctgagctgggtctaagtgtgtctgagtccgtcttgtaacaccgtgtgccctcccttttatagctcaaggggggcacgtacaagggtactgagccccgacatgcgggcccagggacataacgaatgtaatacttggagcaactgatcctggtcgccagtgcaatctccttgtgccctgatatccgcggtctgcgtagcattggcgtgcagcggaaacttccctggtcacgtacgagtgatgatgagcacattgtatgccgcggcacggttgtactacctgccaccggaatggacaggcacgccgcctgcaggatggcctggttgctgcccgccagcggagtggatagggctcatttaatgctgaggcggcacatcacctgccagcggagtggacagggctcattcaatgctgaggcggcacatcgcctgccagtggagtggacaggcggcgcgccttgtccgcattaaatgcaaaggccgcgcggcccagaggccttacgtctggcttcgcccgcttgcttacgtcacgggcagtaggccacgtggcagcatcggggagtgggagcgcacgcggtatggttcggacacgtgtcagcaccggacccccgcctggtcttgattaaggcgtgggtattctttgccttggaatcccgggaccctactgtgagtggcccggacccctcctccctgaggggtccgggacccgtcccaggggtctggtttgtacctgtggaggtcctgaacctcgcccggaggtccgggctgtgcatccaggggtccgacactttcccgtgagggtccggacctactgttgccaccttggagtatatcgtctcctctggctacgtggcggccccggagccgcccacgtggaggggtcgggtgctgttcaccgcgcgactagagataaccgcgcgggcaccgtgtcttcatactgtagcaggggtacccctgattcagggtaccgacagacgcctttcccattccggtggtcgacgagctactcgacgagctccacgacgcgcgcttctttaccaagcttgacttacggtcgggttaccatcaagtgcggatgcgggctgaggatgtgcacaagaccgcgttccgtactcatgatggcctgtacgagttcctggtgatggcgttcggcctctgcaacgccccggccacatcccaggcgctcatgaacgatgttctccggccgttcctccgtcggttcatcctcgtgttctttgatgacattctaatttacagcaagacgttggccgaccacctgtgccacctccgtgctgtcttttccgagctttggcaccaccaactcttcgtcaaacgcaccaagtgcgctttcggcgccacctcagtcgcgtacctcggccatgtcatctccaagccaggtgtcgccatggatccggccaaggtgcaggccatccatgagtggccagttccacgtttggctcgggcggtccgcggcttcctcggcttggcaggatactatcgcaaattcgtccacaatttcgggaccatcgccaagcccctaactacccttgttaagagggacgatttcgagtggtccgaagcggcagcaacggctttcgacgccctcaaggcggcgatctcctccgcctcgatcctcgccgtgctggacttcgcaaagccattcatcgtcgattgtgacgcctcgtcacacggcttcggcgcggtcctcgtctaggagggccacccggtggcgttcttcagcaggccggtagcgccacgacaccgcgccctcgccgcctacgaacgcgagctcatcggcctggtccaagccgttcgcaattggcggccgtacctctaggggcgtcgcttcctcgtcaaaaccgatcactacaacttgaagttcctgctcgatcagcgcctcgcgacgatccctcagcatcattgggtgggcaaacttctgggcttcgacttcaccgtcgaatacaagcccagggaggcgaacgtggtggccgacgcgctctcccgccgcgacacaccggaggaaaagaccgtcttggtcctgtcgggaccacgtttcgacttcatcacgcgtcttcggcaagcacaactcaccgacccggccctcgtcggcatccgcgatgaagtgcgcgcgggctctcgtggggccccatgggcggtggtcgacgacatggtgcagtatgtcggccgcctctacatcacgcctgcgtctcctctcctacacgagatcccgagggctgtgcacgaagagggccatgaaggggtacaacgcactctccaccgactccggcgtgatttccattctcctaacatgaagcaggtggtacaagactttgttcgcgaatgtgtcacgtgccagcgctacaagtcggagcacctgcagctggccgaccttctccctctgccagtaccacagggtgtgtggtcggacatcgccatcgacttcatcgaggcacttccgcgcgtgaggggcaagtcggtcatcctcatcgtggtcgatcggttcagcaaatgtgcccacttcatcccgctcgcccacccgtactccgtcgagtccgtcgcccaagctttctacgccgacatcgtccgtcttcatggagtgccgcagtccattgtgtcagatcgcgacccgatcttcacgtcgacattttggcgcgagctcatgcgcttggtgggcaccaagttacacatgacgacgaccttccacccgtagtcagatgggcagtccgaggcggccaacagagtcatcatgtaccttcgctgcctcacgggcgattgtccgcgtcactggctgcagtggctcccatgggcggagatcgtcttcaatacggcgtaccaaagttcgcttcgggataccccgttccaggtcgtctacaggcgcgacccaccaaccatccggtcctatgagccgggcgacacacgggtggcgactgttgccaagaacatggaggaacgccaggaatttctcgcccatatccgcgctcgtctcgagcaagcttaggcggtttagaaacaacactacgacaaggctcatcgtgaggtttcctacaaggttgatgattgggtgttgctccgacttcgccagcgaccggttgcgtcgctgccccacgccaccaccggcaagctcaagcagcgctacttcgggccctaccgcatcaccgtgctaatcaacgaggtggctgtccgcctcgctcttccacctcaggctcgcatgcacgacgtgtttcatgtaggtctcctgaagaagttccatggcgctccaccagaggctccatcgccccttccactagtccaccacagcgccattatttcagagccggaacgcgctgtccatcagcgcgccgctcgtggcgtccagcagatcctggtacagtggacgggacaatcccctgcatcggccacctgggaagatatcgagccattccgcgccaagtatcccgcacttcagctcgaggacgagatgcctctcgaggaggggagagatgtcatggccgggcgttacagccgcacatacactaggcgtcaccgagatatgcgacgcgcagcggaacgcgcggcacgcacagcaggcgcgcgagatgaggaaggtccggaagaggaaggtccgacaggggtctaagataagggaatagccttccatgaataaatccttcctattatggagatagctttctataaataaaaccttcctagtattagtagttctttcctgttatgagatcctaaattagtggcctcatggccttatatatgctgtaaccgcacttggaataagcaagcaagaaataccccttcctattctcctcacttctctcaagcctgcggttggggagttctcaccccaccggagaagacggacgactacgagctgcgtagtcgaggttcggccagtcagggtttcaacgcccttgacagtgcctggtgcctatggctgcagaggaatagaactgtttttgatggggatcttccctccatccagaaggtacaacaacagttcaatgatgaacttgcttgctggatcatggctagcgcgaaaggtttgggtcagcttgggctagattgcttcatgagaagtgtcggatcgagcccttttgctctcatgtaatccttttcctttcttctcttttgtttgtttgtttttcttctctcttttttcttttattttgtttgggttgtgaccccgttgtatggttttttctctctctctctatctaatacaaagatgcacaactctcctgcgcgttcgagaaaaagagtttttaggagagttttaagaagataaggatctctagttagataggggcggcgagctggccagcctacctatttatgtaatcaatggattggaaataaagtaagcaagaattagaaatgagaaaccctcctcttgctcggtcgtgggcagaggccctggtcggcctccctagcgcctcctaaccctagccgttgctctctaacccgcgcagacccaccctgcgaacagtaaccctaaaccatgaactgtagccgcgaccgtagcgcatcggcgtcattgacgggtactgttcacgcgtgaacagcgcgccgcctctaccagcaggtcctaaccatcgaccccctttccaatccctcaccgatctgcaaccataacacgaacaatttcacttttttggtttgcgaaattagttattttgctggcaatgcagagtagcttgattatttggtcttgcgcgaagagaacattgtttttgtgaaccctatacatttcattgtttcaaggtaatgcaagtttctgcaattacgattgcccagatcttgttcttgtttaaacgtaattctatttattgtacttcaaatctagaaactgttgctaaacctccaacatagctgtaatctcggacaccatttactttccatgctttaccagcagacacctagccagaacctggtaccatggtgaaatgattctgttctgatcctgcagtgacgttttgatcctgcagtgacggtctgcatctgacacaggaaggaaacgcagttgtccacaaggaggttgtcga

SEQ ID NO: 1135 - DNA, 7997 bp, Zea mays
  Intron number 2 from transcript GRMZM2G176987_T01 (locus G RMZM2G176987) derived from phytozome v7.0 (chr-ID 6; pos 1 36435540 to 136443536 reverse strand)
tgcttttaaccagggccgctgtctattgtacctcagttggggcttttaacatttttagtgtttcatgcaaagatggtataggatatatgcaattaattacaacgatgtgttctattatgccaataaccactaagcatttcaaaattttaaacaaaaatatctttggtagtcattatatcatgtagttttcttgttgagcaggtgaaagggaaatgtgcccttgggccatttctataagattttggtgattaagtgcccaacacacattaagggaatgagtatatgccaaagggtggacaaagtgcaaatcaatacaaaggtatgattctagacttagtacattggtttttgtgtactaacatatttgtctaagtgctagaatcaaagaaaagacaattggaaaagacttggctcgagcagccaagactctgctcagtctgggtgcaccggacagtgtccggtgcgccaggctggctctggtgaaaaggccgctctcgggaattcgtcggtgacgtacggctaaaattcaccggactgtccggtgagccaacggtcggctgtgccaacggttggccgcgcaatccgcgcgtgacgcgtggccgagccaacggtcagaagggggcaccggactgtccggtgtgcaccggacagtgtccggtgcgccaacggctccaaatcttcaacggtcggctgcgccagaacaggaaagagatctgcaccggacagtgtccggtggtgcaccggactgtccggtgcgccagtcgacagaaggcaagaattgccttcctggaatgctctcaatggctcctagctgcctcggggctataaaagggacccctaggcgcatggaggatgacaccaagcacactttgagcattcttgatcattctcactccgactttgcgcactcgtttgacattcttagtgatttgagcttcgttctagtggtgaactttgtgatactcatttgagctcaattcttggctgtgtgtgtgtgtgtgtgcgtatttgctgtggatttgagtgtgttgcttccctcccttactctagtgctttcactttgattcttattgtaagggtgagagactccaagttgtggagattcctcacaagcgggaaagagtaaagaaagaagaacaccgtggtattcaagtcgatcattggatcacttgagaggggttgagtgcaaccctcgtccgttgggacgccacaacgtggagtaggcaagttttgtacttggccggaccacgggataaatcctcgtgtctcttgtgcttattctcactgtgtctattgtatttcacaagagatctcctataaccacttgatttcattgtgctaactcttaatcaagttttgtggccttaagtgttaagtttttacatgatcacctattcacccccctctaggtgctctcaattggtattcgagccgttctcttcaagaaagggaataatcacccaaagagatggatcctaagggaaaagggatggtggtcaacgacaatgagaaggagtccatcttcaacgagccaagggacgacaaagtcaatgactctggctcgagtcaaaagaagaaagatgggaagaagaagaggcgcatcaggaaggttgtctactacgacagtgacaaatcttcctcttctcaaaaggacgacgaatacgaggagaaaaagaaagcggctaactcgaacttttcttttgattacactcgtattccgcataattccaatgctcatttgctttctattccacttggtaaacctcctcactttgatggagaggactacggattttggagtcacaaaatgtgtagtcatttgttctctcttcatccaagtatatgggagatagtagaaaacggaatgcaatttgatagttcggataattctatgtttatcaatgaacaaatccataagaatgcacaagctactactgttcttttagcctccttgtgcagggaagaatacaataaggtgagcggcctggacaatgccaagcagatctgggacactctcaagatctcacatgagggaaacgacgtcaccatgctcaccaagatggagttggtggaaggcgaactaggaaggttcgcgatgatcaggggggaggagccaacccaagcgtacaacaggctcaagaccctcgtcaacaaaataaggagctatggaagcacgcgatggacggaccacgacgtcgtccgacttatgctaaggtccttcaccgtccttgatcctcatcttgttaactctattcgtgagaatcctaggtacatcaagatgacgcccgaagaaatacttgggaagtttgtgagcgggcgaatgatgatcaaggaggcaagatatgttgatgaggcgctaaatggcccaatctacgagcctcaaactattgctctcaaagcaacaagtagcagggagacgctacctagcaaggtggcgcaagttgaggcggccgggctaaatgaagatgaaatggccctcatcatcaagcgcttcaagacgacgctcaaaggtcgcaaggagcacccaacaagaacaagacgaaggggaagcactcctgcttcaagtgtggtaagattggtcactttattgctaattgtcccgataatgatagtgaccaggatcaagaaaagaagagggaaaagaagaagacctacaagaaggctaagggcgaggcacaccttggcaaggagtggaactcggattgttcatcattcgactccgacgacgaaggactcgccgcctcggccttcaacaaatcgcccctcttccccaacgagcatcacacatgcctaatggcaaaggagaagaaggtttatgcatccgggggctcaagctggattatcgacagcggatgcacaaaccacatgacgggggagaagaagatgttcacctcctacgtcaagaacaaagattctcaagattcaatcatattcgatgatgggaaccaaggcaaggttaaaggactaggaaagattgatatttcatccgagcactccatttctaatgtgtttttagttgagtcgatcgggtataacttgttgtccgttagtcaactttgtaatatgggttataattgcttattcacaaatgtagatgtgtctgtctttagaagaagtgatggttcattagcttttaagggtgtactagacgacaaactttatttagttgattttgcaaaagaggaggccggtctagatgcatgcttaattgctaagactagcatgggctggttgtggcatcgccgtttagcacatgtggggatgaagaaccttcacaaacttctaaagggagaacatgtgttaggtctaacaaatgtgactttcgaaaaagatagaccttgtgcagcttgtcaagtaggtaaacaagtgggaaatgctcatcacagcaagaacgtgatgactacatcaagacccctggagctgctgcatatggacctcttcggacccgtcgcctaccttagcatcgggggaagtaagtatggtttagtaattgttgatgatttttcccgcttcacttgggtattctttttgtaggataaaatagaaacccaagggaccctcaagcgcttcctaaggagagctcaaaatgagtttgagctcaaggtgaaaaagataaggagcgacaacgggtccgagttcaagaatcttcaagtggaggagttccttgaggaggaaggaatcaagcacaagttctccgctccctacacaccacagcaaaacggtgtggtagagaggaagaacaggacgctcattgacatggcgaggacgatgcttggagagttcaagacgcccaagaggttttggtcggaagccgtgaacacggcttgacacgccataaaccgggtctaccttcatcgcctcctcaagaagacttcatatgagctactaaccggtaacaaacccaatgtgtcatactttcgtgttttggggagcaaatgttatattctagtgaagaaaggtagaaattctaagtttgctcccaaagctgtagaagggtttttgttaggttatgactcaaatacaaaggcgtatagggtcttcaacaaatcatcaagtttggttgaagtctctagcgacgttgtatttgatgagactaatggctctccaagagagcaagttgttgatcttgatgatatagatgaagaagatgttccaacgatcgccatacgtaccatgacaattggagatgtgcgaccacaggaacaaatggagcaagatcaaccttcttcctcaacaatggtgcatcccccaactcaagacgatgaacaggttcatcaagaagacacgtgtgatcaaggggaagcacaagatgatcatgttatggaggaagaagcacctcaagcccctccaactcaagtttgagcgacgattcaaaggaatcatccagtcgaccagatattgggtgatattagcaagggagtaactactcgctctagattagttaatttttgtgagcattactcttttgtctcttctattgagcctttcagggtagaagaggccttgctagatccggaatgggtgttggccatgcaggaagagctcaacaatttcaagagaaatgaagtttggacactggtgccacgtcccaagcaaaacgttgtgggaaccaagtgggtgttccacaacaaacaagacgagcacggagtggtgacaaggaacaaggctagacttgtggcaaaaggttatgcccaagtcgcaggtttggactttgaggagacttttgctcatgtggctaggctagagtcaattcgcatattgttaacctatgccgctcaccattctttcaggttgttccaaatggacgtgaagagcgctttcctcaacgggccaatcaaggaggaggtgtacgtggagcaaccccctggctttgaggatgaacggtacctcgatcatgtgtgtaagctctctaaggcgctctatggacttaagcaagcctcaagagcatggtatgaatgccttagagactttttaattgctaatgctttcaaggttgggaaagccgatccgactttattcactaagacttgtgatggtgacttatttgtgtgccaaatttatgtcgatgacatattatttggttctactaaccaaaagtcttgtgcagagtttagcagggtgatgactcaaaagtttgaaatgtcaatgatgggcgagttgaactacttccttgggttccaagtgaagcaactcaaggatggcaccttcatctctcaaacgaagtacacacaagacttgatcaagcagtttgggatgaaggacgccaagcccgcaaagactccaatgggaactgacggacacgtcgacctcaacaaaggaggtaagtccgttgatcaaaaagcataccggtctatgataggttccttgctttacttatgtgctagtagaccggatattatgcttagtgtatgcatgtgtgctagatttcaatccgatccaagggagtgtcacctagtggccgtgaagcgaattcttagatatttagttgctacgccttgcttcgggatctggtatccaaaggggtctacctttgacttaattggatattcagactccgattatgctggatgcaaggtcgataggaagagtacatcagggacgtgccaattcttaggaaggtccctggtgtcttggagttctaagaaacaaacttttgttgccctatccacagctgaggccgagtatgttgccgcaggtcagtgttgcgcgcaactactttggatgaggcaaaccctccgggactttggctacaatctgagcaaagtcccactcctatgtgataatgagagtgcaatccgcatggtggataatcctgttgaacacagccgcacaaagcacatagacatccggcatcactttttgagagaccaccagcaaaagggagatatcgaagtgttttatgttagcactgagaaccagctagctgatatctttaccaagcctctagatgagaagaccttttgcaggctgcgtagtgaactaaatgtcttagattcgcggaacttggattgatttatagcacacatgtgttttatgccttgatcatgttccttatgcattttgttgcttatttatggtgctcaagttgtacaagcactccccggaccatgtttagggggagatatgctacaacttgactctttgggactaaccatgtgcttgagtattcttaaattagtctcaaaggtggattgaaagggaaaggtggacttggaccatgaaagacttccactgcactccgataagagggtaacttactccaagttcatctccatgtctcttattgccttttgctcttaagtgacaattttggtgaggcaatggggtttaagggccaaaaatgatcccgttttggtgtttgatgccaaagggggagaagttaagggccaaagcaacaaatggatcagctatcacttgagaattttgaaaatagtagagttaggacttttgatttgccaaaattctagatgtctctttttgtcaaaagttggtctcttgtggggggaatgtttgattatgggaaatagggggagtttttgaatcagtgatcaatttctcttggaatatctttctctatgcctcaacaagtgaatttgacttagagataggaaattgtgtttgatttgcaaaaacaaacctagtggtggcaaagaatgatccaaatatgccaaatttgaatcaaaacaaatttgtgttctcattcgcattgatgttgcacttcttttagttgctttttgttgtgttggcataaatcaccaaaaagggggagattgaaagggaaatgtgcccttgggccatttctataagattttggtgattaagtgcccaacacacattaagggaatgagtatatgccaaagggtggacaaagtgcaaatcaatacaaaggtatgattctagacttagtacattggtttttgtgactaacatatttgtctaagtgctagaatcaaagaaaagacaattggaaaagacttggctcgagcagccaagactctgctcagtctgggtgcaccggactgtccggtggtgcaccggacagtgtccggtgcgccaggctggctctggtgaaaaggccgctctcgggaattcgtcggcgacgtacgactaaaattcaccggactgtccggtgagccaacggtcggctgtgccaatggtcgaccgcgcaatccgcgcgtgacgcgtggccgagccaacggtcagaagggggcacaggacagtgtccggtgcgccaacggctccaaatcttcaacggtcggctgcgccagaacaggaaagagatctgcaccggacagtgtccgatggtgcaccggactgtccggtgcgccagtcgacagaaggcaagaattgccttcctggaatgctctcaacggctcctagctgccttggggctataaaagggacccctaggcgcatggaggatgacaccaagcacactttgagcattcttgatcattctcactccgactttgcgcactcgtttgacattcttagtgatttgagctccgttctagtggtgaactttgttatactcatttgagctcaattcttggctgtgtgtgtgtgtgcgtatttgctgtggatttgagtgtgttgcttccctcccttactctagtgctttcactttgattcttattgtaagcgtgagagactccaagttgtggagattcctcacaagcgggaaagagtaaagaaagaagaacactgtggtattcaagtcgatcattggatcacttgagaggggttgagtgcaaccctcgtccgttgggacgccacaacgtggagtaggcaagttttgtacttggccgaaccacgggataaatcctcgtgtctcttgtgcttgttctcactgtgtctattgtattccataagagatctcctataaccacttgatttcattgtgctaactcttaatcaagttttgtggccttaagtgttaagtttttacaggatcacctattcaccccccctctaggtgctctcagcaggtctggttt

SEQ ID NO: 1136 - DNA, 5802 bp, Zea mays
  Intron number 1 from transcript GRMZM2G704361_T01 (locus G RMZM2G704361) derived from phytozome v7.0 (chr-ID 7; pos 9 997104 to 10002905)
gtcgctggtctcttcgcgtctgcttcccctctcgggtgagtcgcctcgtctgttgtcttctccgcccgcaaaaccctctccctcgctagggtttcctctggattttgttggtgtacattcttttcctcactgtgccgccttcctctcgcacctctggtctctcccgtcttcggtgaggtctagttttggtgggggttggtgcgtttcgtcttttcgtcctccggtggttgaggaggagtggccgcgtctgggttctggtgttcttcgttgccctgcgaaaatcgctgctatggatccgaaaggagagaacccccagaactcccaatgggatcgttggggtccgtcggagaagccgcaaggttctcatccttggaacagaccaagaaaccttagctggaagcttaagcctaatatcggcaaatctgagcagcagaagggtgtcctgtctcctcatcctggtgagggaaatcaaacaggtaacccttctgtctctcctgttcctttgaagaaagatctcgatcttgttcgccctgcgttctgtcaaaaatgtggtgttgaaggacatcatgccagaaattgttttaacgctttgtggtgtgatatttgccgcaaggagacacatgtcacttcgcgttgtgttcttcctaagcaaaacaaacccaccatgcccattgttggtttggctgctgatggtttagggttttatctgtctcacttcgctaaacctttgatcaaaaagccaaaaagggttttcatcggtctggttaaagtggttgagggacttgtctcagctgaagatcttgagagagatttcgggtttcacttcccttggaacaaaaggtggaaagctaccaaatgccattcaggatttctgatgcagtttccctcccaagaacgtcttgatgaaatgataagcttcccggagctgaaaatgaagatgtctggggccaagatcgctgttgtgccttggagttctagggccaaacctaaatctagactccatactgtgtgggttattgctgaaaatgtccctgaggaattgcagaattaccaatctatctgtgaaattggttcaatgataggcgctgtggaggaggttgaccttatgtctctggattctgatgatatagtgagatttaaaatccacattaaaagtgtggctatgatccctcctgtggtggaagtggctgtcaagccttttctttatgatatcttctttagaattgagtctatttgtgatgaaggatggaatgatgattctgtgaatttgggtaagagagcctcggttcaaattcatggatctaatgatccgctttttgataaatctgggaaaaatcccaagaatctggatgatgatgtccctgaagaggagcctaatcctattctcaaaattggggagtcttcttctcaaggcaaagagtttgccaaactgtctgaccctaatcttgtgccttctaaagatgtgtctgatgatgaacagaaactcgataacctttctgatgagaaggtggattttgatccaaatgaagatgatctgcttagctcgcaagaattggaagaattcgctaaggatatggaggaagatccaactgattttcagtcaaaaattggtgctatgatctcgattccccccaatgatgagatggttattgaagggaagaacaaaaagcctctggacttgcctaccaacacggctgaaggcgccaggaaaagctctaggttggagaagaatgatgaggtgaaggtggttgataaagcgatatacagagcagaagccaaggatgctttcctcaataaaggtatgtgttctaattccttttctttgcttgattctaataatgatgatttgatagatttagcttgtaaacttggagtttctttgggcccctctgactccgatgtgattgataatttggagttgatcaaagatctggaacgttccagaaaaattttggccttccaagcttgcaaaaatagtatgaccccaaatgtggaggtcccttcccttgttgatcacataaacatggatagtagtgtccatgatgattctgacctgaatattgatcaggacttacttgatgtgatggttttacgaaaaggtaggaaaattaagcatcggaaaaaaacgattaaaaaaaaggcttcccctaaaagtagaggtccatctacgaaaaaaggggagtctatctgttctgacctccctcctgatccgttttaaatcatgagaggccttatttggaattgtcagggtttgggtcgtgattctaagtttgatttcctgagggaaatcattaaggaagaaaaaattgatttcattggtttacaagaaactaaaaaagatcattttaatgattctcttctgtcctcgctcgcgggtagcaagctttttgcctggttctcctctcctcccaatgggagatcgggaggtcttttagtgggttttaattctgaggtgtttgatgttagagaatttgatgcgggtgaattcttaactcgctcccttgtcctccacagagaaaaaaattttatctggaatttcgttaacgtttatggggctgcccaaaatgagcacaaatctcgctttctcagtgaattgtctgctgtttgctcgagaagccaggtccccatgcttattggtggtgatttcaatattctcaggaaagctgaggaaaaaaataaacctggtaccctcagcaaatggagttttatgttcaatagcattatagatcataatggtctagttgaatttgatctgaaaaatagactatacacgtggtctaacaatcgtaatgatcctacttttgaaaaacttgacagatttttggccagtcctgactgggatcttgcttataataatattagtgttatcgggttaaatagatccttttcggatcatgttcccctttgccttcacactgattccctgcccatggtgcgtaaggattttcgttatgagctgtgttggaagattaggcctgattttcacaaattagtggaaaatgtttggactcttccggttggtgtgtccaacagtcttgatgtttggaaaataaaattgaaacgtttgcgtcagaagcttaaaggttggaacagtaatgtggtaggtcactacaaaaagttgaagaaaaacttgattgaaaaaattgatattctggataaggccagtgagtcgtctggcctttcggaggctgacagatatatgaaattagatttggagtctaatctcaggaagattgtggatgaggaaaacattagccttagacaaaaagctagggataaattcttattagagggtgatgagaattccaagtattttcatttgatggctagacacaaaaaaaggaagttgaaaatcttgactctttctcacggtgatattgtggctcatgatgaccatggaattaatcagctggcgacttccttttacaaaaatctctttggtccttcccgtgattcgaatatttctttgaataacctggacatgaaacagctgggggagggtgatagaattctgctcaccaaccccttttctttggaagagatcaaggatgtggtgtttgctttgaaacacaatagtgctccgggccccgatggcttcccttctgaattttttcaggaattttgggatgtgatcaaaagtgatctgttctatctctttaaagattttcatgatggctctctcaacattgaaagacttaattttggtattgtcactcttattcctaaggtccctgatgcgactgatattaaagcttttcgcccaatttgcttgcttaatgtttgctacaaaatcattaccaaagttcttactaacagattggctcgttgcattacttctgtgattagtgaccttcaatatgggtttataaaaggaagatatattatggatggtgttctttctttgcatgagattattcatgaagttaaacggaagaaacagaatggggttattttcaaagtcgattttgaaaaagcctatgacaaggttaattggaattttcttcataaaatgatgataaaaaaagggtttggagatttatggagtgattgggttttgaagactgtgaaaggtggcaaagttgctatccgaactaatgatgtggttgggccctactttaaaactcataaaggtgttcgccaaggtgatcctttctcccctctcctttttaatgtggctgctgatggtcttgcttgtctgatccaaaaagccaaggatgaaggtgttatcaaaggccttattcctcatattgtcactggtggctgctgttgtcttcaatatgcagatgacaccatttttctgtttcaggatgatttggaaaatgctagaaatttgaagtttattctttgcatctttgaacagatttctggcttaaaaattaattttcataaaagtgaaattatttgcctgggaaatgcctgcaatagagaacatctatatgctgatatcttcacttgtcctcccagtggtcttcctatgaaatacttaggggttcctattgataacaaaaaattgtgcaaatctttgtgggatcccattgttggaaaggttgagaataaattgggctcctggcaaggtcggttccttagtttgggtggccggttagtcttgcttaacagcagtctcaccaacgttcccttgtatatgctttctctatataaatgccccaaagctgtgttaaaaaaaatggatatcttcaggaaaagattattatggcagggagggcatgatcagaaaaaatttcatttggctgcttggaacttagtctgctcccctaaaaatatgggcggtcttggtgttttggatttgcaaaaaatgaatgaagctttgttggctaaatggatttggagactagaaaatactagtggtttgtggcaatccattataaaaagcaaatacattaagaataaacctattatttcggtgaaggatagaccttcagattctcatttctggaaaggtattctctcggttcgagacaaatactataaatactgtaaaataaagattggtgatggtaagagttccagtttttggaaaaatatttggtgtggcaatatgacgctggctgacaaataccctaatttgtttgaggtggcttatgacaaagatatcactgttcataaggttgtctcctctaattttcagttgctgactttcagaagaagacttattggtgctttaggtgaggcctatagtgaccttatggatcagtgtagccaggcctcgctttctggaaatgctgattcttcaaattggttgttgggttgcaaaggttattcggtaaaatctttttacaaaatgttaaataattccagaattgtggttcctgtgaattttatgtggaaaaccagacttccgcaaaaaattaaagtgttcttatggttggtcagaaataataagattttgaccaaagacaatttggtaaaaaggcactggcatgggaatacggcctgtaacttttgtggattattagaatccatagatcacctattttttcattgtcctgtggccagattcatttggagaatcatccaaattgctttcaaattgtcttctaccccaaaaaactcagctgacctctttggtccctggattgacagttttcataatcctgaaaagaagctgattctttttggatgtggtgctgttatttgggctatttggcgtactcgtaatgattgctgcttcaatgctagactgattgatgatccatctaatgtgattttctcctgctgttattggattgatgcttggtctattcgacagacaaagaagggaaaaagactggtggaacaaggaag

SEQ ID NO: 1137 - DNA, 1292 bp, Zea mays
  Intron number 3 from transcript GRMZM2G172342_T02 (locus G RMZM2G172342) derived from phytozome v7.0 (chr-ID 7; pos 9 5904560 to 95905851 reverse strand)
tacccgagcagcatctaaggttaggatccggaaacgactgatcttctctatttgtttggctggttgatcttgaatttgttgtttgtgatcgaatgatatgacaacgaattttgcgtagactgcactggccattgctgtagtccatggtctagcacttttaggtggttaaaacgcatcattatttgtggttacggttgtttattagtagtcacattgagtctatagcagcaaacagtgtctattcatctgagaaatttcggcttttgtagtttggtgtgctcatgttgatactgcttgtattcagtgagtttatagtttgctgagtgattaattcaattagcttagaacgccaagttaaaactttcagtctttacatgtctcaatggtaccaaacacacgtggaatatacattgtttagtttgttagttcagtaatagttcctctgttcacaaatgtagctacatttctagtagcaaaaaatacatactccttgtgaatcataaatcaatattaggaaaattaactgtgaggaatgggaacggtgaaatatggtggaaaagtttacccttgtggaaactttactattatggatggagtatatagttctaaataatcttttccagttttctatcagttattctgttttatttattagatgcctaccagcatttgattgtatctgtttctttgcactggagtaatcaaatgctttttgcatcagttcttaattgtgctgtcactatgtattggatatagtgatgcctatttggagcacttttagactaggcagtttttagttttaggcaccttgaaatgtctatctcactcagtcatagagggtttgaagcagcctcttcgcatttgcaggggaagtcttgcctctttataatttccccgaaccccacttattagggtttgttcggttattttcatccatatggattggaggggattgatacggatttggagagattttgacttactagagattgaaaccccctcaatccggctcaatacatatggattggggttgaaccgaacaagggagcctgtggtgctgggtctgcccatttatgtttatattgggcatatagaactagagaagagtaaatgatgtttctatacaagcactgatatcgagggaatgtttatttcctttttcatactcccatctgtcccaaaatatagttctttctatctcttttttcctgtccacattcgaatatatgtctgcaatgcctttgcttatcctatttttggcttatatgtctgcaggttttgttggagtaaag

SEQ ID NO: 1138 - DNA, 8833 bp, Zea mays
  Intron number 3 from transcript GRMZM2G172442_T03 (locus G RMZM2G172442) derived from phytozome v7.0 (chr-ID 2; pos 2 00895526 to 200904358 reverse strand)
ttgtatcattttcttctgattttaacatgtaagttgttataccgccagctttttatccttaatgcaatattcgaggaaagaattgcacatttgatttttgaacaccttagtacactaatttgatctgcaattttatttttatgtttcaatctactgttggggacttgttctcaagtgctatgagttaagaacaagacaacatagaaaatgttaatcgttaaggtccttcgtcctccgaagcattatttcccttaggatataatggtttacggacgaaggttatgaaggacgtaccttcataaattcattaaacaatgacgaaggatgaaatataaagaatataaaagacaacatggacaattatatattattattaggtataaacagaaatatcgttgaattacaagtgtaccttcaatcagaatgaaatgacagtacaagcgtgacgcaaaaagcgaatgccaagtcagcgtgaacagtacgggagtactgttcacctatttataggcacgggacgcagcctgtgcaaaattacattaatgccctttacatttgataataatcctatagtaatctgtcgaggtctaaatagccttttcatctttaagtcggtttcaactgctgctgtctcgccgaagctttcctgtttacaccttcggcgcttcaccaaccttcgtattattctggtctactgtgatgcctgacttgagtccgaagatacctgttcacacattatactccagaaacactattaaatcctgtttttgaggaccttcggatgccgaaggtccccaacagtagcccctcgcaatattaatttgttcaaaataataaatttagattgcgatctggacgaaggctttacgccgaaggtccgaaaaaacaccttccctttgctagaatagcaacattcactgacaagcggggtctttcaattttcaacgcacttggcgtataaatacggccataccgcagacgcatttgacacgctccctggccaactgctcccgctcactcaaattttagctcttgtgcactacgatttgctaagcttttagttttgaagcttcggctttgaaaatagttttttagtgtctccgaagatgtccgaagataagaagactgctgctgagacgaaactgagcctcgacgaagagaaaaatttggggtttcttatagcgatgtcaaagaccaacacagaaaaaatcaccaaggagattctggaaggtttgtctgaggatactggtgacagtgacagctatgatgtggacagtggtggggaggactccgaagatcgtccctggcgaccaagccattcagtttatggtaaatcaactatcaaagaaaatcatcttgttaatatgagaggaaggtatttccgggatttgtccattgtgagggcggacgaaggggaaaaaacttgcccacatcccgaagagaatgaagttgtagtgtactgaagctttttgaaagctggactgcgatttcccttgagcagcttcgttgtggaggtgctgaaaatattcgaaatctatctccatcaacttacccccgaggcaattataaagctgaatatcttcgtgtgggccgtgagaagccaaggtctgaagcctgatgcaaaaagcttctgtaatatacacgaattatcatatgagacaaaaccttggggtaaggaacagtatcacaataattttggttgctacagttttgtttctcggtccgggtcaagctgccccgtgccaacctttcggaagagatggcccggcgactggatgacagaatggttttatgtgaagaatgatctgacaatacgagaagatatcaaaggtataattatgcgccctatctggcaaagcttcggccttcggaggccgaaggttgaaatgaatgaagctgccgaagaatgccagagggccttcggcgcagtctgctctttcattggaacgagagacttagtacaagagcatatcgccttcagggtatggccgctcgcggagaaatgggaaatgccacaagaaaccgtaaaagaggccgacgaaggtggacttatcaggttgaagtacacttttaaatttggagataagttcgttgagccagatgatgactggttaaaaagtattgaaaatttaagtgatgaactgcttggggcttattcgaaagccgaagacactgcaatgtcagcagccttcggaggccgaaaaaagaagaggctgaatcgggtatttgatgcaatcgggtttgtctaccctgactattgctatcccattcgaaggcagaagagaaaaaacacaacctctgcaaaagaagaagctgcaactgctcctagcgagccagaaccgaaaagaaagaagataaaggtccttacacatcggccgcgctatattgaaccagcttcggtgcctgagtttaccggagaaacttcttcggccaccgaagccgaaaaaccagctgagccaaccatgctgccagaagtcgcagaaacggccgaagtgccaacaaagatagaattggaacaatcaaagattttgttatcagaaacgaaagagaaggccgaagcgccgtccacagaaaaaatggaagaggtaaaagaagcaactgagggatccaaaacatcagaagttttgagtcctgcagtaaaaaatcaaaaagtgccagcagtgactccaaaaagaaagagaatggccaatgtgctagatgtactggaaacgatcaaatcttcaagcacacctccgaagagggttgctgtcatttctgaaacaacaactgaaatttctggttctaaagctcccgggcaagagactgaagccgaagctgggccctcagagcctacaaagataaaatccttagaaagtgaggcagaaaaaataacaaagccaacttttgttgaagaaaccggtgtcattgcccccgaagcatcccccaaagttcgtgattatattcttcgtcatgcttcggggaaaaaactatcagaaaaagaagagcaagaggcccagcactacgcccaaaaactgaaatatccaaagggggcgttaatattcaatggcagtggagaagaagacttcttgtattgtcttcccgacagcaaggaaatttctgtctgccgggagatgagcaggagcttcggattcccaactttagaagacgggctctcgatgctgtcgaagaacgatctggccgacagcctagcttacaatagcttaaaggtgcgacaaatgaaatccttgtattttttgttgagtccaaaatttttcgtttgtttaaacctattgacgcacacatatttctctttgcagggcctgatacttagcaatgcccttagggcacagaaagatgctgaagacgaagggtgttctatagccctgagcaaccttcgttccgaagttattgaactgaggaacgaaggtcttgaaaaagataaaatattacactcattgataaataaaataaaggaagacgaagttgcttttacaggtcaagttgaagctcagaagcgggaaattgaagatcttcggaaacaactggccagagccaaggaagaacgcatacttgaagaaacaaagcgagaactcagcgaccaatgtgctgatcacctagaaataactgttgaagagcttcgttcgtccagaaagagatgctataacaaatctatagagtgcgttaagaagttaaaagctagcttcgccagggttggcgccttctcaagcgaagaaaactttacgagaggcaatcccgaaggtcccatcgagtggatcgaccacgaagctgaggccttcgaagaaattttaaatagccgaggagatatatgtgccttctctggtgccagagggattgccaccatcttagagaagaagggctgcgaacatgtaaaaattttagcacagtccgaggctgctttgtcctttgaagatgcgagagatccttcggccgaagctagtataattggtggaaaattttttaccgatatctgggataatggtggccgagaaatggccggagaaattattcgaagaagtgaaaagggcattcacgatgctagagaagtagctgaggctgctgaaaaaagcgcagaggccgaaggtcaattaggtattaactaatagtttttattgtgttgtaatctttagcctttaagatttgtttgcgatttgtaatagcaatgtagccgtatcctgtcttacttcagatcctgctaaaacgtcttcgggccctcagccgaaaggagacgacgaaattaaaaagatggctgaagatattatggacgaagtcgtcaaacggctcctgaatgaggctgcagaagtcgttttgagagaagattaaatatttttgtgaaaacttctgaaatgtaatatactgtaacattttgtaactgcaaatgtaatatacctatttttgttagtcaattctttacgatgcatgaaactttacacgtaccgcttttgagtctttgacgaaaaaacaccttcccttcttttcatgcttcgtgaagaagaatttttcattgtcacaacaatatccaatgttctgatgaataatatccaggcttcgtaaaaatattttccgaagctacccttccgaagatcaatgatgtatctttttgtgactgatttctctcttttttcaaagcgttcttccgtagattgataatgtgtccacctcttgtgtcatgtgcaaaatgatgtatgatgcttatgctatgcgaaatgatgcgatgatgttatgttatgtgagatgatgtttactccgaagatacatacgcatccctgcaataaaacacaatcttttataagcctcccttaggagcttcttcgccttttacttcagcggaatcagcgtttatttttcgctgcaagcctcccttaggagcttcttcgccttttactttcagcggtattcgcgttgacttttcgcgcttcgccttttacttaggcggtatcagcgttgacttttcgctgtatgctctgcattccctttggaacgactttggagcagaaaacttacactgcgctccctttggaacgacttttttgtgacttcggtaaacttactctgcgttccttagaacgactttttgttgcttcgaagaattttcgataggtcgaaggtcgtctttgttatcacaagtctttgaattttaatcaatataagcctgtgaagaaaatatattttccttgtaggaatcaacgaaactaattacatgaaacctaaacaatgtcctttattacagaaaataaaactgaatgaaaaagattgctattaaggtaggatatttgtcaatagatgtgctttgactctggcacagtgctattgactgtacgagcttcggactgctctctgaagtccctctggtgtggagcatactggctcccttctggctgctggccttgttgcaacggaggtggaggcggaggctgttgccaggaagcttgaggctgacttgccgaagcaacagaaactgcaggatgattgcccacatattctgggatgtagggcgaatgatacgaagctgtatgcatgacctgcttcggctgagcttgttgtgctgctgcttcagctatttccttttgcttctgaatagtaacatggcacatcctggtagtatggcctttgttctcaccgcagaataagcaaaagattcttcttggttgatcgccaaatcttcctccaaagcccctggcgcctctgcctcttggagctggtggtcggaaggagctttgctgttgccccgaagcctgtgaggaacattgtggcctttgctgttggcttcctctatcatcattttgtgtagagttatgaattgatctcacgtgcctcgggtagaacctccctccgaagcccctggtcatttcagaaaacctgaaagcctcctcccttctttggcgaaaatcattatcggcccgaatgtactcgtccatcttctggagcagcttctccaaagtttgaggaggcttccgagcgaagtactgagctgacggtcctggtcgaagtcccttgatcatggcctcaatgacaatttcattgggcaccgttggtgcctgtgccctcaaacgcaagaaccttcggacatacgcctgaaggtattcttcgtgatcttgggtgcactggaacagagcctgagcagtgaccggcttcgtctgaaatccttggaagctagttaacaacaaatccttcagcttctgccatgaagtgatcgttcctggtcgaagggaggaataccaggtttgagcaacactcctgacagccataacgaaagatttggccatgactgaagcattgccaccatacgaagatactgttgcttcgtagctcatcaaaaactgcttcgggtctgagtggccatcgaatacgggaagctggggcggcttgtaggacggaggccaaggtgtagcctgcagctcagcggacagaggagaagcatcatcaaaaacgaaattcccatgatggaaattgtcataccagtcatcttcgttgggaaaaccctcctgatgaagatcttggtgttgaggccttcggtgctgctcatcctgggcaagatgacgaacttcttcagaggcttcgtctatctgtctctgcaattcagctagcctggccatcttttctttcttcctctgtacttgttgatgaagcatctccatatctctgatttcttgatctatctcgtcctctggtggtgtcgggcttacagccttccttttctggcttcgggcctcccgcagggagactgtctcctgattgtggtccaatggttgcagagctgcagccccagtcgctgaagccttcttcggcgccataacgaaagtttatgatcgccgaaggtgttcaaaaaactcagagtggaagtgagttcaccggaggtgggcgccaatgttggggacttgttctcaagtgctatgagttaagaacaagacaacatagaaaatgttaatcgttaaggtccttcgtcctccgaagcattatttcccttaggatataatggtttacggacgaaggttatgaaggacgtaccttcataaattcattaaacaatgacgaaggatgaaatataaagaatataaaagacaacatggacaattatatattattattaggtataaacagaaatatcgttgaattacaagtgtaccttcaatcggaatgaaatgacagtacaagcgtgacgcaaaaagcgaatgccaagtcagcgtgaacagtacgggagtactgttcacctatttataggcacgggacgcagcccgtgcaaaattacattaatgccctttacattagataataatcctatagtaatctgtcgaggtctaaatagccttttcatctttaagtcggtttcaactgctgatgtctcgccagaagctttcctgtttacacctttggcgcttcaccaaccttcgtattattctggtctactgtgatgctcccgcgagtccgaaagataccctgttcccacattattatccagaaacacttattaaatcctgtttttgaggacccttaggatgccggaaggtccccaacatctaccttgctgatagcaaagataaagagatttacagaatctatactttgactttccaagtgtgaaacaaaactgatgtatcacaatttgctcagatatggaaatctttaagtctctgtaccaggaattcaggatcttgcataaaatggaaatggaacacagttcccatgaactacatttcttcataaattcctttttgtgtggtgtgaatatccacagtcatccttgctagtgtaatacaaaagggctagtgtcacaatttagtattgtttgttttttactgtgtgtttcacagtatctgattcgaataagatgtattttggactaatagagtaaacttttgacttagtgggtttccagagttctgtattttgaagattgattggaataagattagtgtgaatgttgttctctaatagcactacaccatcaggagccccaatcattcatatttgatatggcgatgtagaaattttcttttggggacatttaatgtttagtcctgccatattggtacctagcaagagatggttttagttccaacctttggccctatatctattataagtagagtacttggagtaggtgacatgacttcagtccctttcaaaggcctcaaagtctgaacctaatatcatattcttgtttgaatctgcacacattttgcactagctcattaatattttgttgacttttgcttctccttttttacattcttccttgtaaacccaaaaaaattgactgcattttctttgttaaccgcttaattatgacgaagagcataatatatttcattctcactttactgctgggaagtccttaataatccagaaaaaatgtggatttaaacgcttgtcttgtgttataatgttgcttgatatctataatatgttggcctacatgaccgaactttatcatattagatagttgtagtacataataaatagttaatatcttcaattgatatttggctacggatctaagtctggttgtaaattgaatgttaaaccagaacaaagttcccaagtaggaatttcgtatagctgcaaattggaagactttactaccattttacagctagaaggtgatgaaaaacaaaagctgcaaaaaaatgtggttgcatggctaacatatacctggttgatgctatttcagtatttctagttgtgaatctatttagtggctgaaaacagttgaccattctaccagtatttactataacataaaaacataagaggccctgggaacagctggtgcctgtcttaaccattctgtttggtagtcatgggacctaacacattttccgtttcaccttttgtgcag

SEQ ID NO: 1139 - DNA, 1259 bp, Zea mays
  Intron number 2 from transcript GRMZM5G804470_T01 (locus G RMZM5G804470) derived from phytozome v7.0 (chr-ID 9; pos 1 18181091 to 118182349)
ccggcctggccggtatcttcctcttgggcggcaaggtactgccctcagtccccattcctggatcacgcgctcgcccgatcccgtccgtgcacggtgcttgtttcggctgctccatcggtttgatgctgtatgacgcatggatctggttaatgcattcgtgtgggatgtggttgatgtcacattcgaacatggatacctgattgtacctatctgcgaagaaatcacgaactgcatactagattaggcatcttaaatgcagatggttaaatcactataatctattgattccctgtgttgttgttgtcttcattctcaatggaaagggtttggtttgccccttttttgtaatagcacaacagctgaccagcatgttctcaaatgcagtgttcgtcaatttgcgtaggacgaccatggatacatttagaaatcatgaactgcataatagattaggcatcctgaattaccattctaactggtccttgttatcgatctgcacatagtttgctgaagaaatttgatgttattcctattcaacggactgggggttgtgatagctagctgatagtcgggataaagctgactttggatttaaataaccgattttagagtgttcccctacaaatatcatttggtagatctgttaatgcatcatgcacgagatcttgttctgacgtgttgtctcacatgcatgttggcaggagaaattcagtcagtagagaggcttaggcagcaggacagagccacgatcggcatgcaaaactagagaggaagcatatgtaagcatgttcgatatatacagatcagaaaagcttgctatgtatgtcagcagcaataaaacttgtgctggtagtgtttggttctagagtctatttggatggaatagttccattccagattctgagtatggaatggctctattctgtgtttggcaatcagaacagagccactcttcgcatgattggttacctagcccctggcgccagggtccccgcatgcgttaactgggcttgtgcttttgattggttggctgaacagcactgtcggaacctgtacacgcggctgcaggcaaggcttttttacacttattagcatgcatgtgtccagatgccaaatatgagcgactcaaccggtacaggctcatgtaagccaggcgcagatgctgtcggcaaccaatcaggccgtctgtttctctgtttggttctagaattctctgtttggttctagatttaccagtcattgctgcaggtacatatatttgg

SEQ ID NO: 1140 - DNA, 3157 bp, Zea mays
  Intron number 4 from transcript GRMZM2G017634_T03 (locus G RMZM2G017634) derived from phytozome v7.0 (chr-ID 7; pos 2 0198758 to 20201914)
atgtaagtgatacctgataattggaattgcaaaacaatcagttcattcttagatgatttttatatatttaatgtttttaaagtgtaaggcgaggcaaggcgttagaccgccgcctggacgcctaggcgagcaaggagggcaaatcacctaggatttctgggcgttggcccaccacctggacgccttaaaaacaatgtatatattggaatcttgtttttctgaggcccccagcaaattgttatgacctttatgtccatttcagctagagttgagtgtctgaatgcatgcaggttctctgcataatttgtgaaaaactgaaaattaatcttgtattctcaataaatcagtatgataggatgagaacttagtagcaacctgttatgctaatatgctattcctatagatgcctagttccgtgatgctctctgaactggtttcattagtttgtggatgtccagtactaaatgtcatgtactgcttaataatcagatggagaaacatatttctgacttcatatattacaagtgtggatacaagtgtccatgtgggagcctccggcaatgagtttgcctcttctttttttttaattttttttttgacattacctgtttctgccatcttatagcaatcttaagtctgctcgggaaaagaacagtaacactctacagtcatccactgttccataatccaatgtgaatcacatgctaagtttcaagccatctcccatttgctacttgcccatttactgaggattctgatgagaatgcaccaattctgtctgtgcagccattatgacagagaaaaacagtgttttaccactaaggctatccgcagtgcagattactccatatctttactctatataactattcatagactagtcatcaagattccttaatctatattataatcctccgcactcatatccctctatatattccctctatattaactactacatattctattcattctaacccaactactatttattttttctatataatacatgattttgctacccataacactagtaccggaagtgatatccgtagagctatatatatttggcgtggcgcatagcgtatgctgctgcgacccttttgactgatagcgttcctgcatgtgcgttaccgggagtgttcccgtagcgcagtgcagatagcctaagcatgaaccagttgtctgctgtgcacctaaaattttgctccttatgtttttccacgttttgtttatctgctttgtctgtcttcagcatttcactcctttaggcttaaatccatcagttaggtggcttaagaggactaatttgaattttatatcagatcaaattgtgattgttgatgataaatgctttgggtggttcttttggcacttgtggagatatcttggtcgtaagatcaaaactttttatgctttccttctagcaaacatggtcaaactgaaaatgacaacaaccgagctttttagtcccaaacaagttggggtatgctagagttggaacccagtagaagccagacaaatcaaggttcagatatgtagatagttatttttcatgcactcctattcaagaccaaatctttgggtatattctattctttgagtctcattgtactgtctctttctatgtcaacttcgggctttcgttgcctctgtttccattactatcgtgccttagaattccactacacattggtgttattggaggtctgcgttgaaaatatccaaatcatctcaactagtgttggacaagcttttattcacttggtgctacctatagcctatcatgtataccatcgttccagactcgattccttgtatagccacaaatccaacgtagcatacgaatttctgcaaaacttatctgctgaacatgccgttttaggccaatattccgcatcatacaacatagcaggtctaatcgctgtcctataaaacttggtagatgcttagcgccactttatccaccctgctttgattctatggctagcatcttatcaatatcctatctctctatagtattgatcctaaataccgaatggtattcttgggcactacttggctctttcgcactaacatctccttcatgtgtagtagtgttgtagttacatttcatatattcggttttagttataaagggatagacctagtgtcgaggctcccatatgagtggggtctacgaaatggatacactgatgcaagcgcccccctcccctctccaaaaaaaatatggagaggttacttctctcttcgagaacccgtgatctggtgactcagtgggacaactcttaccactgtactagcctactgagtactgagtttaaaacctttggactctagagcatccccgcagatgccatgaagctgatttgaatccgtgacctagtgactctcacaaccgtcctcttttactaggctttgggacttgctatgtatgctgagccaaagtagacagagctggtcaaactgaaaataattgtaaaacaaattagtgtatacaggaaaattgatgatgtgttgccctaggcggttgtctagccccgcctagtgactgcctgtattctgactagtaacctattgcttaggggaactcacaagcttgttggtgaaaaggaaatggctgaaatttcaatgccataaataataacatggtgaagaatttaggccagcttggcaaaagcaaccttttgttaacgctaagcacaataggctatttttgctggctgcagaatacaccatactgatgaaattactgggtaatattcaattttatggagttggagctgcacattagttggaatgagcattatggacattttttaattgttatttgcaaacaattctgtgggggcaatagttgcgagttcacatttgaattttttcagtgtgctattgatacaacactccatagattaccttcaccaatattttcagaatttccgattgaacttagtgccatgattctccatttgaatttagtgcctgcctgaagtcccaaaccaatgacattggcgcattgtacaactacaccgtaacgcttcatcacaccaagatgcattgtatttgtgtaggatgcagtttcattgactttgacatgtgctttcggacattttctttaacaggtggaaagtggactaagaagaccgttgaactccta

SEQ ID NO: 1141 - DNA, 6527 bp, Zea mays
  Intron number 1 from transcript GRMZM2G572097_T01 (locus G RMZM2G572097) derived from phytozome v7.0 (chr-ID 3; pos 2 16892404 to 216898930)
aaattatttaaaaagtccattgcccctatgtgacacccggtttgcaaagaagagaagttggagggtattctttttgtttttttctctctttcggtggttgcgttttgggaatttggaatttgaggaaaaacattcaccagtagggcagtagaatttctttggttaggcgcttgcatcggggtcgggagccgtcgcgtgggcgtgttgggccgcaaatcttgtttcggcccactaacccccataaccctagccgccctccccctacccccccttctttgtgcagccgcccccccattcccctaccctcttggccgctccccctcccatctcctcctttctcaagcacttgcagccacacatcaaaccctagccgcccccatctcctcctcccatggtgccattcgttaccgcttggatctccgtcgcgtggtgcaaatcttcaacggttttcggtggagggaggaagggaggaagaaaagggggagaacccaaggtgatttttgtgtttatctcttgttcattttatgcggcaatccaattgtttagatgttgcgtgtgcgatttggtagaagggctgtccagaattttaagggggtggacgaacagcagcagaattagtgatttctgggcatttttcgtggagaattatgcagtgctttacacctcaccttttttttggctagtgtggctacttgccaacttgatcttagagtacaataggtttgtttccatagagcaaaggcaatgttgtactgtctatgaaatcttgagactcgaagaactcaagtgaatttgcaagatgacgtggatagataagttcaaccatgtttacatgataggttttcttattgtgtgcaaccttatctttaataataaatagggtgatttcaagtggattttatgtctatattatagttgaagaggcatgcatgttttccttctatggtttgtttctatagccaaaaaggttatgcataatttttatttgttggaggctagtcatgtgtacgatatggacaacccgttttatattgtttttaatcgccgatgatatatggtagttttttatatatgatcagttctctatgcatgcttgtggaattattatttggaccgctttatcttaaacaaagtcaatgtttaactggaagttgcttatgtttgttagtcatctatctctataatgatgtggttgttgcattagatggagatttttttatatgaatgatggtttgatagatcatgtatgtctactactttgaattcatcctatgacatcactgggtacaaattgttcaagtgcaataataggaggtattgttgtatgtgaggttaatcaaaatagtttggttaggtggattatcttattgaagtccaattactcctgttgagcatagtaccgtgttattattttagtgttgaaagtaatatttatgaagcttttgcatgagtctgtgtcaagaagtacattagtttttcttgttgttatccctccattgctttatgagtattgcaaattttatctcttttgagaggaggaaaagatgttttatgacatgagcaccatttgcttcacgtcaacagaatagttttggagatttctagtagttggattctagtgtaataacaaccatgttttatagtgctggagacgggtatgtcaggtgtttcatacattatcgatacatggatgtttgaccttagtggcattaacaaacgaggttgttgaattcattgattgttgtgcttagtgttctaacctatttggtagagtgttatttaaagactttgtggagttgcatcccagtttggtagtggaaaatcctagtgttgatggcacctaccaatgacttgggtttcattttatattgttttttattgttgataatgtgttgtttggtttcgggaggcattttaaattagttggaggctgaatcaggcttcacttatctagaatgttttgtagtatgtttcttcatctttccataggatgcttaatcaccatgtttggtctaaacatttgagagatatgggtttcttaaaacatctttgttggtgtctctagcagagtgagtctttaattttgtacggaagagtaggcattgaagacggtataatttggtctttgtggattatgaaagttttagtaatttcatgatcttttcaaagagtatgggtttctaattctcattgcatataattggagttaggttgctatgaagttgttgcactgttgtgtctgaactttaggcgtcgttataatcaccaataaatcgaccgcgttttgatagttgcagagcacaaatttgcgaattctctttaagcaaaacttgtaggtcttttcagtacctttttaatgggtatttacttgtaactgtctgttaaatagatttggagaggtggttgcccggatataagtcgaatctctaatgtgcagtatctcaggctgagtttagctgtaggtcatgcagagttgagggctataaggataaatttgggtgcaactttattgcaaaagtcgtggacaattttcaaaacttttccaacgcgtgttcgttgtagtttaagttgagtatagcaggagttataggtttttgaattttagttgtccattgtttcaatcttatcagttttgaaacaaaagagttgcattgttttatcggtttggaaaccaattccgagacactcattataataaaagttctagggaatgttataatcttttcaatgagtttatatttgcaaaattttgttagctgcagggagttatgatatcatgtatagaatgtgcttggatgaatatgtgggcagacataacatgcttaaattgattcttgtttgcatgatgtgagattaggcttaaatgatttaaaaagttatcatattgcttctatacttatatttgttctaggtgtctcgtaatgaagaacctaaagttattagtctttcaatgaacgcttaatcttagaagagtaatgaacctgataaaatctattgcttgctattgggactgcatgaccagttttagttatgcagctagttcaatgaagtaaaccttcttttctgtagagatgttatatataaaagttgtagccaacttctttatcttacttgtgtaaaaaattcatgaccataggtctagtagtttgggagttatgattttctcaagtccagtcttgaaatctgtgcagattctgtacagatttcgaagctgaccttgtttgcccaatttaaacttcgaataacttgttataaattataaagaagttgtagtacttttcttaatcgtttcaacaaattttggattaatttttttggagatctataagttaagttacaactattttaagtgtgatctctgaatctgtccaaatttggacaacagagcctttctcgtgtcttttgaccttaatatgcattgaattaacttgatatgtttataaatgaattatagacaattctactagctttctaaaaagtctgggagcacctgaattggatgattgagactccaattatggattttttgaattgagtagttgaattatgtccaagtctggacataatttacgtttagcattgtttgacctttctaaatgtcaaatcttgttgtgatgataataccaagggtatagtggactttataagttttccataaagtcctagtttactaattttcgatgcatattttgtgagttaggagcaaaacaattaaccgctgtgctgctatctagaaatatgcaggcattaagttgctctcttgaagttgctcttgtttggctaagtttggtttaggctataggaacattatatgccttgcattcatatatacattccttgaagtacttgcatatgtcaatgattgatttggtgtcaggaaagcttggtccgaggtatataggaccgtctactatcttggccgagttggcagctgggcttagcacatgtaattgtcggaatctgtgatcagagtacaccaaatattccatgtctttttgttgaggaagtatttgcggaatccaaaccatcaaatcgagctagagccgattcctgtgtagcaagagcagactctagagtgtcgtctgctgcgtatcttagaatcctaggagcttgaggagctgatgcggcagaagtacttgaacttttctttatgtgtgagttttgttgattcattgatctttcttttgttgttccgatagaagcgtcggaattcgaggtcgaattctttttaaggggggtagagtgtgacacccggtttgcaaagaagagaagttggagggtattctttttgtttttttctctctttcggtggttgcgttttgggaatttggaatttgaggaaaaacattcaccagtagggcagtagaatttctttggttaggcgcttgcatcggggtcgggagccgtcgcgtgggcgtgttgggccgcaaatcttgtttcggcccactaacccccataaccctagccgccctccccctaaccccccttctttgtgcagccacccccccattcccctaccctcttggccgctccccctcccatctcctcctttctcaagcacttgcagccacacatcaaaccctagccgcccccatctcctcctcccatggtgccattcgttaccgcttggatctccgtcgcgtggtgcaaatcttcaacggttttcggtggagggaggaagggaggaagaaaagggggagaacccaaggtgatttttgtgtttatctcttgttcattttatgcggcaatccaattgtttagatgttgcgtgtgcgatttggtagaagggctgtccagaattttaagggggtggacgaacagcagcagaattagtgatttctgggcatttttcgtggagaattaaggggaatcagtttgggaatcatgtagaactttggcatacctttccaacgagtatttatgcgctcaatttggagttataaattaaaagttatcaccatttgaaatcgggtatgtggctgtccaaaaaacagattttcaggggatgaacagcagcagtattagcagttttttggggatttttcgggagtaattagtgttaatcagtatgagaatcatgtagggctttatgttatctttccaacaagtacttatgcgctcgattcggagttataatttaggagatatcgttgtttgaatccggttatgttgctgtccaaaaaaacagatttttcaggtgggtgaacatcagtggtattagcagtttctgggaatttttcgtgggtaattagtgttaaccagtatgataatcatgtagggatttgtcttatcttttcaatgagtacttatgcgcttgatttggaattatattttaaaagatatcgctgtttgaatccgggtatgtcgctgtccaaaagacaaagaaaaacagattacagggttcatcttctggactgttttgggctaattagatattagaatttaattataaattgtatacaaaacttgtggggagttttatgtagatgcctctagagtttttgtttgttaccactgctgtcataattttaaagttaagaaattattaagcagcgccgctgcagtttggtgggtgtagggagagatgtaacccgcggcggggtttgagtttgtgcgtaggtgccgcgtcacttatgagcctgattatgtgaaattggtgtactaagttgggtgtcaaaaacaggtggtggacttccggatcgtacttagggatttgcccgaacttccggtaaaggcaagtaaatacagtggtggttgctaccgtttggtttgcatcctattccctgtcattgagtatgcataagttttaattatgttaatcattgaattctatgatgaagtttatttgtttggaagtattaattctcaattgtctaatattgtggatgatcataatttggtaatgatatatgtggttgattcccatctggatgaagttgaagtgtctttttgaatcatgttatatgaagtgttgtaggcatgacatgcacatcgcatcatccatcttgcattttgaagttatgtcgtgatcttatggtccgactgtaccggtacatttttagcatcgtacgttgcccgaggaggggtacgatgcggcttcatatccttagaggtatgaaggcagaagtcatccttgcatttgcactcatgaggaatatatgaagtgtgacattactatgttactattgtggtttctacctgcgaggtgtggtaactaggtgtgttgtacgttgtatacgtgctgcaccttcgtaataagaaggttgtggaatcaagtggtggtaaaacaatgttcttatgtggttaaactgtttgatattattttacttgctgagatgtgtcatctcactcttgcattactcaatgcaggtacttgatacatgtttatactctgttgccccctcttttatgcaatcttgcaaaggggatgctgccgaaattttatatatggacgtcggaagtgtagttcagtagcattcagggttgtttgtggaacccggagtgttacaccctatcaggttttcttt

SEQ ID NO: 1142 - DNA, 11124 bp, Zea mays
  Intron number 14 from transcript GRMZM2G014994_T02 (locus GRMZM2G014994) derived from phytozome v7.0 (chr-ID 4; pos 163260196 to 163271319)
ctcctctaagtgctgagcctcctgatctgatgtatgtatctcaatgctccgtgcgttttcttttccttcttttttcagaacatttagtttcacccggaattcaatcgatttttttggttggtggatactgtatgaacatctgattgaacatggatttcttagaactttgcaactaaccaaaatttagtgaacacggtcaagtgcttgtatgtgtgcatttagactctagcttagcttgattgatgaggaatgatgttcgtctacatcatgagtcaagagctgtccgctaattggagacgcacggaactgagctctcaaatagaccatagccagttgcgagaggtcgagtcgttttctgttagcccatgtccagcaacaactggggaatgggggaggaggttgggtgagtgccattaggctatctatattagtcttgctcgttgcataccttatttcaaactctacctctactatgtaaataatggtaaataatgcagtctgctctatgcacgatctttttgccacaatcttaaaaatgacataggaaagaagaccatagagatgataataatcaatatcaacatagtcttttagtcccaaacaagttatgataggctagaattaaaaccaacaagatgtcaccaaaaatagaaagagaaagaagaggaaaaaaaacttttgagagcactaaaagaaaaaaaaaggcataatcacggttcaggtgtatggatagattctttctaaacacttctatcaaacacaactccattgcagagatataactttatacacttgaaaatatactatgctaaaaccatgtatataaaatagaacgataatttgagatagagagactacagtaattacagtagcagtgaaggtatatgcttaaaagagcacctaatgcaaatgaccgtctttgatcgtccatgatcctcatcactgtctccctccagcccagctacaggcctacagctagcgtgccctgccccctgccaacctcgccaccgtcacatagcgggagaggaaacagggaatcaccaaacaaaccgcgtttgctccgcgcctccactccaccccgcgacgctaattaactcctccagctgtaaacctgcaacacttgggttggaggctagagcttgcaaacaccaccagcgaagacgtcgtggcgcgcatgtgggcggtctctgcacccggcgtcccaccgccaccgctactgtcgtagtcctagatccgaccgcctcacgagctacattccctcgaggccggccttcctggtgtctcagcagcggcggcgcatggcgatggctgcggggcgtgggctcttggccctcttctcggtcgtcgtagtggctgggctcacctctgcggcgaatggtcctttcctgtccggtacgacttgtttgctccggtgtttcttgctgtctgtttcgcttttcggtttcgtagctgatggcgatgggctggttgcctgcctggttctgtttgctctgcatgagcagatagcgtcttccagccgagcgccggatctacagggaggagcttactgcaggccaagaacagtacgtttcatcttttgctttctcctttgacaacctcaacctgcgattggctcgtggcttgggtgattttgatctgagattgggagttatgtgctggcgcacccctcacattgatggcataacagtttgggtacaaactagattgcacaacctcttggaagagggatggtgaatcggaattgggtagaaggaatatagctctagaccaagggagaaggaaccggaggaggaatatgaagaggacatgtctctgtattcaattcatcgagttatcctttctgatgcagcttctcttcttgtggtgttgcccttcagttgcttgagccagtaggcaacatggctcatggcgcaactccagctcatacctaggatgattcctcacattcttccttccataaaaaattgacttgacctcaactccatgcaaaaatggcaaaccaccggtatcccacacctgtggttcttcagtgctatgccttgactttgctccatttgtcttttttcagttgtttcacattcaactccctgcagctctggcaactcctttgttgtacattgacagacctttatcttcatggttgcccagactattctgatgcagttgttcctctgagatggactaagagcggatgcttagccaatttcaatgttcagagcttgacaataataaaattagtgtgcttggattcttctacaagacaagctcctcactgcgaacaatcttgccactaggggctggccacaccatccgaactgttccctctgcaatgggcacctagagactggccttcaactctgtttgcattgccctctcgcccgtgctgtgtgggatcagattctagcttgggaaggtatgaccctccctgccctgacggaccctgctcgcttctctaacattaaggactggtgggaaggagcatcctccctgctcccaaaaacccaaaagcgcgacttcaacggcatcgtgatatacaccatgtggaacttatggaaggagagaaacaggaggatcttcgaaaacagctccgtaacccctatccaggttgccttgaggatcaaagaggatgttttaagttttaggagggctatgtctatcgtgtaattgagatgttgatgcgcctttgcagctagctgctctgtgtgggtctgctgggatcgttcctcccgccgtgtgtgctgcgatgtcttgtatctggtcctcggacctcgtctcttgttttccgaaacctttctcccttaatatataggcagagctcctgccattttattcaaaaaaaaaagatttaggtgcacaagtttgaaactttttaaaggtagaaaaccctgcaaaaagaaccactttttaactactacaatcttatagggagataacaaacttcattctcttcctgtgtcattctcatgccactgccaccagaaattaccctctcaatcttgtagtgcctttcaagcacatgccagaagcccagaacagacacaccatgcatctgcatatctcctggatcccattgcccttgtactttcctcataatttgtaagcatggcatgaatctcactgccaacaagaggaagcttacaaataattctgcatgctgttttatcactggaagcacctaaaagcttgtccctactgaatggcaacactattgtcatgtgatgcatacctagcaatatatgtggaaggaaggttgctctgacttgtgttatcaatcgccgcatcaaacaaattatctcgatcatgcaccaatgcattttttgctgttgcaatattgttcgtaaacagaaacttcatgtggcttgtggctcacggtcgctgctggacagctgatcgtctagcgaaagaagggctacctcaccctccaaactgtttgctttgtgatcaggaggaggagaccttgaaccatttgttagtctcctgcattttctctcgggaagtttggtttcagattatgagatctgttggacagctgcaccttgctcctagccatgagaattcttcctttgaagattggtgggaaggagttacctctttgactgttggcccagcatataaggccataaggggctgcacaagggtctgaattccctaatcattcttggagcttgtccatctggattctggaagcaccgcaaccgttgtgttttcaacggtgttcagcctagtactatcatggtcatcaattgggtcaaggaggagtctcatctttggtgtaggactggaacccggggattatctagcatccttgcgctccagcacaccatctggtgacctctgttttggggtcttcaaggtcacgggtctagctgactactgttgtatatctacatctattctagagtgtgtgggttttgtgtggagttgtatgaggttttctttttaccttaccttttcttcttctcctgcgtttttcgaagaaaaaaaactcttaaccatccaatttccagcagctcaagtaaaacaatggaatactgctagcattatcaactgcagaagcaaagcttatatgtccaaaaacatcagtcaacaatgatttgaactcaaatatcttgactcttctagctgacaacacatcaccatgcttctgctgcacataatgtttattgtgaaagccatcatggtactttccatcctctctagtagtctagtgaaagctgcacccaacttgtagtttgtcagcaaattgtcgcaggctgcaattctattagttccacaatccagcacacccatctgctcactcgttagctcgatgaaaatgcactccgataaagcaactgagcacttattcaaggacaggaccacagagtgaaagctccaaccaaaactgttaaaaatgtccaattgacttccacagatgctagaaatatgtttatgtggtagtggccatagagtcaagtacagcaatcctttggatagaatagtcaagtctgcaaaataaccactgcatgcccttatgccaagaaagtccaaacataccataccaccacactgcctctcaaatcagcacaagggaactcacttttatcaccatcttgtgtttccaactttctacaatttcagcacgcacacattagatctcaatgaactggaggtgaccatggaggcttccagtgccgtatccaaaattttacaatagggtatgccagctagaatttacatatatatttggtcaaaccatttaataattcagtgatagttttaaaatttgaacattatttggtatgcatacactaaattacacaataaatcttatatttaaagattaagtaaaaaacaataataagtcttgcattttaaaattaagttaaaaatattcacaaactataatataaaatagatgaaaagctatactggtagtttataaagtatggtgtagctgtgtaggcatgaaaacgggattaatctactttttagttgagaccttctaagagacataatggatgtcttgacttaagcctatacccagcagtctagcatccagtggcatctcacaagccgcattcgtcaaagaatctgagcgatcgaatgttgggttgtcaattttatgattgtattgtccgttcagcagacagcaggtcatcccaagactttgttagataggtcctgagaccatatgcctgaacacaaaaattcaaactacaagacaattagcgcaatattctttctatattgaactttttctagatattttttgttctttctctctctctctctctctctctctctctatatatatatatatatatatatatatatatatatatatatatatatatatatatatatatatatatatatagggcaggtataacgggagccctgggcttccaatagttaaagaaagcccaggccgatcacccctgcaacctggttcaacccagcgcaccgactgaaccaggctgtcggttgcgtcacccgccccacgtctgtgtgcgcaaaaaaggaatgcatgcatgagtcaaacacgttcccttgcatgcgcgtaaatttaggaaagatatgtgtgacagtttctatttttaaatgttttatttactccataaatttaggatcgctgcaacagccatgcaactagactcgtaaggaccattttatgatatatactgctactaaatatgctaccctgtgtagatagttatgcaatccggtatactgcgtaaaaatctgttaccagttgcatgcgcacgaatttatgatgaaaataatgtgcaatgaaaggaaatgaattgcacgcataaaaacaaaaaatcgtatttaatgttttatttccttcataaatatagtatcctttcaacaaccatgcaactaaacacattagatctagtttatgatatatactgatacaaattatactacatggtgtaggtatttatgtaattcgttacactgcgtaaaaatttggcatgttgttcactgttggacgcatcttcgggttggagcgtaataatcttaagttttgagcataaaatccctcggttataagcataaatactgagccaatgtgagaggttgatagctctagtaggttgttattacgatcttatttttatggcagatccgaaaaacatggcagccgcatgcatgcggttatacagatccaaaaattatggcaaaatgcatgcattggtctaacacgttcctttgcatgcgcgtaaatttaggaaagatatgtgtggcggtttctatttttaaatgctttatttcctccataaatttaggatcgttgcaacaaccatgcagctagactcgtaatgatcattttatgatatatactgatactaaatatgctacactgtgtagataattatgcaattcggtatattgcgtaaaaatctgttactggttgcatgcacacgaatttatgatggaaagaatatgcaatgaaaggaaatagattgcatgcatagaaataaaaaatcgtatttaatgttttatttccttcataaatataggatccctccaacagccatgcagctaaacgcattagaactagtatatatactgatacaaattatactacacggtgtaggtatttatgcaattcgttacactgcgtaaaaaatctggcatgttgttcactggtggacgtatctccgggtgcagcgtaaaaatcttaagttttgagcataaaatccttcaattataagtgtaaataccgagccaatgtgagaggttgatagctctagtaggttgttattacgatcctatttttatggcagatccaaaaaacatggcagccgcatgcatgcggtttctatttttatacagatccaaaaattatggcaaaattgtgggaatttccattgcatgcgcgcaaattatgcggtttctatttttatacagatccaaaaattatggcaaaatcgtgggagtttccattgcatgcgcgcaaattacgaacaacaaaaatcaagaaattgtctttccaatgtgcatgcagtaaactgatatacgaactccgtgttcaagcataaaatcgtacagtttttaacgtaaataatacatgtggtaggcataaaacacaataatcgaaaagaaaacacgaatcgaaggatgtagtggccgtagggcgtcgtcgatgacaaaaacacaaatgtaggtcgtcactcgggccgcccaaactgcgccggatcggaggatgtcacgcgcgatcaacgctgcgcgcatctcgcgccttccgtgacgtcgctcgctcgaacctcgcgcctcatgcgtcgctgtcgctactcgcacgtcgacggacgccgcttcctcgccggccttagaagtgccgcctcctcggggcctcggggacgccgccgcttgcccgcacaagggccctgctatcgctcgccctctggatcggggagccgccaccggatgggggtccaccgccgcgcacgctctggggcaaccgccgtcgtcgcacgcggcgtcgctaatgaatcggggtggagcgtaaaaaactgaaccctagcactccgggtcctgttttatagacgtccggatttggtccggctcgaccagtgtgcaccgtacgacctgggcttcctctagttattggaagcccagggctcctaatatacatatatatatatatactacgtgagtacccgtgcattgcaacgggaacatataattacataataacttatatacaaaatgtgtattatattgttataaaaaatatttcataatccttttgaaatcctagccatacataaattttgttattttaatttagttgtttcactactacattacaatcatcagtatcatgcagacttcgatatatgtcacgatttgcatggtctcatcattgaagagcacgtgtcacacctgccggtagaagttccctcgtacattatcagtcatcagatacgcaccaccatacacgcttgcttaaacaaaaaaaacaagtgtatgtgtttgcgaagagaattaaaggcaggccgacacaaaagctacccgacgatggcaagtggtcattgttgtcggtcctcctctgcgtcacctctggtgccaagatgatgccatagtccttgatatagtagtcgtcgaacgcgcacgacatgacgagtaccgatgactcttggctgggctgccaaacgaagtgcaccccgggctcataagcgaggtagtacacctagtcgttgcaccaccggatgtgctactcctctacataaatcttgttcgaggacactcacacaatgtcagcaacggtcgtcgtcccagcgcacaagaattcatggctggtaagtagtgacttacgtgggaggttgagctttaggctagctccagcaatggaccctaaagggttctgtaccataaatatagaggatcaaatggtcctctatgctctccagcagcgtcttctaaacggttctctaaatttagaggacgctgctggattctctatatatagagtttctctgaacggtcctctatccatttgaatactttaaataaccggtttagcaaaactaagatatgtacaatacatttaagagtatgacaaatacgtatgtgcaaaaaataaaaataaaaaatatctctaatatagatatttgagtatagaggacgtgatttagaggacgttgttggagataaaggagatatagaggatgaaatcttttagaggagactgtaaaggatggatatagaggatggatatagaggacgttgctggagacaaccttaggtggatgatgagctagacggtgtgacggcgccgttgtcggatgttgtgcccaaaacaacccgagagtcgccagcgttggcgacgaccatgaggtccccttatttgaagatggacagcgcggtgcagccgctctggaccgcatccaagcggcggctgcgccggagcttgccgaacacagcgacgcatgcggccacgtagtactgcttctagaggtcgaactggcagtcgtcaagcttcttctcgtcgtcgatgagcgacgccaacgcgagcgcctcctgccagtggtgtttgttcggggtttccaagtaagaaacatggatttatctttggcgttggtttatgaaaatgactcacaagtcagattcatggaaaaaatattacggagaataaatgtcacacatataaaaaaaattaagttgaaaacattattcaaacaaaagaaattgtatgcaagactcttttttaaatactactctctccatcaaaaaatataattcaggaatctcgttgataattatctactactaaacattgtgcaaaggtagcaaggtgggctttaggaaagatatagtagatatttttactgtaacagatattgacataaacacacatgtggtgtaatggtagctacgagcacatttacttgagaggtcctaggttcaaatcccattggagccacatttgtgtttttttaatttaattttagctacgcgtgggatgcacgtgagaatgtcaatgagcgggcagggggtaatgggaatggcagaacactgaatggcagccgggaatgggaatgagctttgcggggagggggaatgggaatgacagaacacggaatggtagcctatccctcaccgcctttaataagtagtatatatatatatatatatatatatatatatatatatatatatatatatatatatatatatatacacatgcccacatggtgtatacgctagacacgtgtggtatgccagggcatacctggcttaccccctagctacaccactggaggctttctaagctaaatagaactactccatgctgtaaccaaatgaggaccattgaaggatgtccatggcattggctaaatcttatcactacaattagtaatcgtcataagtgcatgcagcgatagccatagaacaattgtccactctaggccaccttgcttcttgatcctgtccagcagcatatgctgacaatggcccaacagcttgcggactcagaacttgcaattaccaagtgagtgctctcttgaaaacatactctgtctaatccaaggttagtagcacaaagataggtaggagcagatgaaaggcttgctagttgctgctatgtttattgaatgcatatgaggaacaggctctttgctactaaagcttcaatcttcaatgatgcatatgaggaacagtgtacaaggtgcatatatgcttatatacagagtgacatggagcttgtggacttggagaatacctgttccttagaattatgaatcatcatcagggactaggaccaagtttgtctatttgtaaagggcgtacccagtgtcgtaggcttcccgcactgtgcggtgtctggggaagggtatctttaagcgtcaagccttacccgcataatatgcagaggctgaggctcgaacccgggaccttccggttacagacggtaggctctaccgctgcaccaggcccgcccttccaagtttgtctatttgctatcaaaatggtagaatctgatggttataccccgctgttaaccaatttatattcatctccatgtttatacacccccgatcctaccttaccgtagaggcagtagaggacgaaacaaaaggaaggatattatcaagcctgtgtgccctatgatggtgaagcaggaaccctttttccttctaaactgaactgttcagaattcagatatgaaaaaatggatatttctagataatggttaaaatccggcttcaaaccttttaaagaatgggcatcagtccaaaattgatccaaattttggctaactccacacaatgtgtttagcattaatatctaattgttaacgtgacatggaaaatttcattggaggaactaaaagtcagttaagaagcctggttctagcactaatcggcaacaaagaaaccaaaatcttcgagatagcccccctacgactttgatggttcactgcaattaggagtacatatatattgcttttatcttgtgttttgtctcttaacacacctcctgtgttttgtctcttaacacacctctggtcacattccataatttttactacttaaatattacataattgtattttataattttattaatgcctacctgtgcttatcatcaggttgccccgtgaactttgagttccaaaactacaca

SEQ ID NO: 1143 - DNA, 4063 bp, Zea mays
  Intron number 1 from transcript GRMZM2G091595_T05 (locus G RMZM2G091595) derived from phytozome v7.0 (chr-ID 5; pos 6 4847443 to 64851505 reverse strand)
tctccgacggcggcatcggcttcgtgctccgctactttcccaaggcgttcaagccccgcccccgcccaggccacgaggtggacgacctcgccaacctcatcaagctctacgcggactggcactcccgcctgatcccctactactccttcgaacagttcgtgcgcaaactcgagaaattgggtgccggcaaccgcgtcagggtaagctgcctttaccaggaactcaagtttttctttctcgtcagttggacggacattgccgtgacatgtgtgcgttcttgttcgttagagatgtgtttccgttctggtgcgttcttggtcgccagaggcagtgatcctacgcttctgcacgaaccgccagtccaacagcggcacagcccacgggccacgcccagttgatatccctgatggcctgatgtcgcaactcgcaaccctagctcccagcctcccactcccacgcgcttcaagtcttcccaggcggccggcggcgtactcccagagtcccagacggccaatcttcccagcatcgggtggcgtcctcactccaggcggcaggcggctgcaccgccgcagtcacgaactcacgcgcaccgcgggcccgcggcagcgcgcacacgcgcacacgcgcacggcgcaccagcagccgtgagccggccagtccggcagtcccagcctcccaggcggccagtcctcccagtcccagtcccagctgcctaggtctgccgcctgtcttgaccccacccactggccacttcccctcctgtccgttcccaaatcccgtcccctccacccgcactccattggcgccgctcccctcccctcgccgccgccggagatctgatccgatccgtttgtgcttgtgctggtgagtcatccttcctatcgatatccttgtcctttggtcttatactgtattattattgtctaatcagatccaaggtagcaatttctatccccttccctatacactccagtcatattcatagatagacaacaacgaaatcacgacccagagcgcgaaaggaaaggaaaggtaggtaggtagatgcataagtaagtgctagcccgtattgcgccggtgactgcaccacaatcacatgttcctctgggccaagaatcgaatgcacaccgctgactgagtgacggggaatcaatctcctggtgtccagtctctgatttccctgtcttctcatgacagcagcaggagtgagaagtaaaaaaagaaaaaaaaagaagatatggctgccctgccactggccaccgccgaagtatgcgacgctaaccctcacctgatcatgaacggcgagctccgcgcgctccagcccatcttccagatctacggacggtgccaggtcttcgccggccccattgtcacgctcaaggtctaggaggacaacgtcctggtccgcgagttcctcgaggagaaaggccacggtagggtcctcgtggttgacggtggcggcagcatgcgctgcgccattcttggcgacaaccccgtccagcatgcgtagaacaacgggtgggctggtatcctggtcaacggctgcatcaaggacgtggatgagaattgagatcaacggctgcgacatcggtgtccgggctctcagctcgcaccctatgaaggccaacaagaaggggatgggcgagaagcacgtccccgtcaacatcgctggaaccaggatttgcgacggcgagtggctctacgccgaccctgatggcattcttgtctccaggacggaactcaccgtgtagacagactggaaacgagccgagccgagctcggctcggctcggctcggctcatccattttacgagctggcgaaggaggctcggctcggctcgaccttggctcgcgagccggctcggctcggctcgcgagccatattctggtacttatcgttgcattatttggtgaattaacattatatattcatcatcaaagactaaaaaatgaggtattatccataaaattatctaatattcattattattccataaattgatcatttttgcaaggctcgcgagctggctcggctcggctcgctacaaaaacgagctcgaataagaggctcggctcggctcgttcgaggctcgcgagccgctccgagctcgagccggctcgcgagcctcgagctaattttccagccctagacagacacctggttgtatgtgtgtgtgtgtgtataaggaatcgggcgctcttgctgttaagcccgagcttgcaataatggattcttgctggatcacacatttatacttagaataatcgaatgcttgcttccatggttacaagatgttcttggataattcttttttttgttccttgtcaattttctattccggcgacgaagttgattaaactatagatccccttgttggtgtagttctgaagctgagtgttctgtgtcttggccctgtgcctttgttcaagtatgtatttcatcttttgaaaagaagctgtgacacatactattaattaatttgattaatcttatgtccctttgatatttggatgttgatattggaggacatagaattttgtaaagctgattctaatttccaatttcatgctccaatatctgcatctgaacggagtattaccgaattcagctcaacatataccattgccctcaaggttcaagagcaaaagcaggttgatttggcacttatttaaagtatacacatagtggcaaatttagaagaaatttagggcaccggtttgcaattctgtgaagttatttattagttttagcaggatggccattgtgccatgactgtttctgttgggtaggtggcagactataaaatttcccaacactgcgttcacccctgccgctctcctcccactctctcgcctcctgtagcccggccaggtctcagtgctcattctcactcctttcaaattaccggcgccgagtatccactacgtacgcgcaccccttctctcgagttcccgctatttgactttcgtactggcctgtgatccagttacgagacctaactaagttgcactctaggtgttcgacggaatgcctctctcaccggttgtgttcatttctgtcccgctgtgtccaggacgatggtgggcctctctgaaggggagaaacacttcatccgcggcggcattgcacaagacgttcgcactgatggacgtaggcggctgcagttccggtccctctccgtccaaaccggagtcattccacaggtaggtttcacaactcgtttttgggcagacacccacacgcctctctcttttccttttttttctgaaatgcgcctgcgcgtttatgctgctttggattggtgattgttacaggcgaatggctcagcgcgtgttaggttgggggccactgaaataatcgctagtgtcaaggtaagagcctgtctccccttgcattttgttgcaaatagggcaagacaagtatttttttcatgtctagttcagccctctctgatgttcccaagacagtgaggttgtcagttattgattgttaataagcattagacacgtatgttgcaaagataatgctttaactcgattttgttatgtaaatctgttaaccctgaaatctcaatgcaagttttgtttgatccatctcagtggcaataaacattatgttagagagtcaacaagttggtgtctatctgtctactgatattgttactacttagataaactcgataaaataaactcattgcaaatagtgtgttgtatctcttccatggtgtcattttatttgactttctatgttttcgatggcttggcatctgcaggctgaactaggaaaaccaagcattcttcaccctgacaaaggaaaagttgctatttttgtcgactgtagtccaaccgctgagcctctgtttgaggttggtgatttgctgtggctggatcggatgaaaataaccagcagtctaatatattacttatgttcatcatatacccaatgtttggcactgtagtctggactttacttctgtatgcatatcttatttcctttatttggaattttctagggtagaggctctgaagaattgtctgctgagctctctgtttccctgcaaag

SEQ ID NO: 1144 - DNA, 5801 bp, Zea mays
  Intron number 1 from transcript GRMZM2G702739_T01 (locus G RMZM2G702739) derived from phytozome v7.0 (chr-ID 4; pos 1 85704879 to 185710679)
gtcgccggtctcttcgcgtctgcttcccctctcgggtgagtcgcctcgttcgttgtcttctccgcccgcaaaaccctctccctcgctagggtttcctctggattttgttggtgcgcattcttttcctcactgtgccgccttcctctcgcacctctggtctctcccgtcctcggtgaggtctagttttggtgggggttggtgcgtttcgtcctttcgtcctccggtggttgaggaggagtggccgcgtctgggttctggtgttcttcgttgcccttcgaaaatcgctgctatggatccgaaaggaaagaccccccagaactcccaatgggatcgttggggtccgtcggagaagccgcaaggttctcatccttggaatagaccaagaaaccttagctggaagctgaagcctaatatcggcaaatctgagcagcaggagggtgtgttgtctcctcatcctgttgagggaaatcaacctggtaactcttctgtctctcctgttcctttgaagaaagatcttgatctcgttcgccctgcgttctgtcagaaatgtggtgttgaaggacatcatgccagaaattgttttaacgctttgtggtgtgatatttgccgcaaggagacacatgtcacttctcgctgtgttcttcctaagcaaaacaaatccaccatgcccattgttggtttggctgctgatggtttagggttttatctgtctcacttcgctaaaccattgaccaaaaagccaaaaagggtttttatcggtctggttaaagtggttgagggacttgtctcggctgaagatcttgagagagatttcgggtttcacttcccatggaacaaaaggtggaaagctactaaatgccattcaggatttctgatgcactttccctcccaagaacgtcttgaggaaatgataagcttcccggagctgaaaatgaagatgtctggggccaagatcgttgttgtgccttggagttctagggccaaacctaaatctagactccatactgtgtgggttattgctgaaaatgtccctgaggaattacagaattatcaatctatctgtgaaattggttcaatgataggcgctgtggaggaagttgaccttatgtctctagattctgatgatattgtgagatttaaaatccacattaaaagtgtggctatgatccctcctgtggtggaagtggctgtcaagccttttctttatgatatcttctttagaattgagtctatttgtgatgaaggatggaatgatgattctgtgaatttgggtaagagagcctcggttcaaattcatgggtctaatgatccactctttgacaaatctgggaaaaaacccaagaatttggatgatgttacccccgaagaggagcctaatcctaatctcaaaattggggagtcttcttctcaaggcaaagagtttgccaaaatgtctgaccctaatcttgtgccttctaaagatatgtctgatgatgagcagaagcttgataacctttctgatgagaaagtggattttgatccaaatgaagacgatctgcttagctctcaagaattggaagaattcgctaaggatatggaggaagatccaactgattttcaatcaaaaattggtgctatgatctcgattccccccaatgatgagatggttcttgatgagaagaacaaaaagcctctggacttgcctgctaacacggctgatggcgtcaggaaaagttctagattggagaagaatgatgatgtgaaggtggctgataaagcgatatacagagcagaagccaaggatgccttcctcaataaaggtatgtgttctaattccttttctttgcttgattctaataatgatgatttgatagatttagcttgtaaacttggagtttctttgggtccctctgactctgatgtcattgataatttggagttgatcaaagatctggaacgttccaggaaaattttggccttccaagcttgcaaaaataaaatgaccccaaatgtggaggtcccctcccttgttgatcacataaatatggatagtagtgtccatgatgattctgacctgaatattgatcaggacttacttgatgtgatggttttacgaaaaggtaggaaaattaagcatcggaaaaaaacgattaaaaaaaaggcttccccaaaaagtagaggttcatctacgaaaaaaggggagtctgtctgttctgacctccctcctgatccgttttaaatcatgagaggccttatttggaattgtcagggtttgggtcgcgacactaagtttgatttcctgagggaaatcattagggaagagaaaattgacttcgttggtttacaagaaactaaaaaagaacattttaatgactctcttctgtcctcgcttgcgggtagcaagctttttgcctggttctcctctcctcccaatgggagatcgggaggtcttttagtgggttttaattctgaggtgtttgatgttagagaatttgaagcgggtgaattcttaactcgctcccttgtcctccacagagaaaaaaaatttatctggaatttcgttaacgtttatggggctgcccaaaatgagcacaaatctcgctttctcagtgaattgtctgcagtttgttcgagaagccaggtccccatgctaattggtggtgatttcaatattctcaggaaagctgaggaaaaaaataaacctggtaccctcagcaaatggagttttctgttcaatagtattatagatcatcatggtctagttgaatttgatctgaaaaatagactatacacgtggtctaacaaccgtaatgatcctacttttgaaaaacttgacagatttttggccagtcctgactgggatcttgcttataataatattagtgttattggattaaatagatccttttcggatcatgttcccctttgccttcacactgatttcctgcccttggtgcgtaaggattttcgttatgagctgtgttggaaggttaggcctgattttcacaaattagtggaaaatgtttggactcttccggttggtgtgtccaatagtcttgatgtttggaaattaaaattgaaacgtctgcgtcagaagcttaaaggttggaacagtaatattgtaggtcactacaaaaagttgaagaaaaacttgattgaaaaaattgatattctggataaggtcagtgagacctctggcttatcggatgctgacagatatctgaaattagatttggaatctaatctcaggaagattgttgatgaggaaaacattagccttagacaaaaagctagagataaattcttattagaggatgatgagaattccaagtattttcatttgatggctaggcacaaaaaaaggaaactgaaaatcttgactctttctcacggtgatatcgtggcgcatgacgatcatggcattaatcagttggcgacttccttttacaaagatctctttggtccttcccgagaatcgaatatttctttggctaacttggacatgaaacagcttgtggagggtgatagaaatcttctcaccaaccctttttctttggaagagatcaaagatgtggtgtttgctttgaaacacaatagtgcaccgggccccgatggcttcccttctgaattttttcaggagttttgggatgtgatcaaaagtgatttgttcaatctctttaaagattttcatgatggctctctcaacattgaaagactaaattttggtattgtcactcttattcctaaggtccctgatgcgactgatattaaagcctttcgccccatttgcttgcttaatgtttgctacaaaatcattaccaaagttcttactaacagattggctcgttgcattacttctgtgattagtgacctccaatacgggtttataaaaggaagatatattatggatggtgttctttctttgcatgagattattcatgaagttaaacggaggaaacagaatggggttattttcaaagtcgattttgaaaaagcttatgacaaggttaattggaattttcttcataatatgatgataaaaaaagggtttggagatttgtggagtgattgggttttgaagactgtgaaaggtggcaaagttgctatccgaactaatgatgtggttgggccctactttaaaactcataaaggtgttcgccaaggtgatcctttctcccctctcctttttaatgtggctgctgatggtcttgcttgtctgatccaaaaagccaaggatgaaggtgttatcaaaggtcttattcctcatattgtccctggtggctgctgttgtcttcaatatgcagatgacaccatttttctgtttcaggatgatttggaaaatgctagaaatttgaagtttattctttgtatctttgaacagatttctggcttaaaaattaattttcataaaagtgaaattatctgcctgggaaatgcttgcaacagagaacatctatatgctgagatcttcacctgtcctcccagtggtcttcctatgaaatacttaggggttcctattgataacaaaaaattgtgcaaatctttgtgggatcccatagttggaaagattgagaacaaattgggttcctggcaaggtcggttccttagtttgggtggtcggttagtcttgcttaacagcagtctcaccaacgttcccctgtatatgctttccctgtataaatgccccaaagctgtgttaaaaaaatggatatcttcaggaaaagattattatggcagggaggtcatgatcagaaaaaatatcatttggctgcttggaatttagtctgctcccctaaaaatatgggcggtcttggtgttttggatttgcaaaaaatgaatgaagctttgttggctaaatggatttggagactagaaaatactagtggtttgtggcaatccattataaaaagcaaatacattaagaataaacctattatttcggtgaaggatagaccttcagattctcatttctggagaggtattctctcggttcaagacaaatattataaatactgcaaaataaagattggtgatggtaagagttccagtttttggaaaaatatttggtgtggcaatgtgacgctggctgacaagtaccctaatttgtttgaggtggcttatgacaaagatatcactgttcataaggttgtctcctctaattttcagttgctgactttcagaagaagacttattggtgctttaggagaggcctatagtgaccttatggatcattgcagccaggccttgctttctggaaatgctgattcttcaaattggttgttggggtgcaaaggttattcgataaaatccttttacaaaatgttaaataattccaggattgtggttcctgtgaattttatgtggaaaaccagacttccgcaaaaaattaaagtgttcttatggttggtcagaaataataagattttgaccaaagacaatttggttaaaagacactggcatgggaatacggcatgtatcttttgtggattattagaatccatagatcacttattttttcattgccctgtggccagattcatttggagaatcatccaaattgctttcaaactgtcttctacccctaaaaactcagctgacctctttggtccctggattgatagtttccataatcctgaaaagaaactgatcctttttggatgtggtgctgttatttgggctatttggcgtactcgtaatgattgctgcttcaatgctaggctgattgatgatccatctaatgtgattttctcctgctgttattggattgatgcttggtctattcgacagacaaagaagggaaaaagactggtggaacaaggaag

SEQ ID NO: 1145 - DNA, 11863 bp, Zea mays
  Intron number 1 from transcript GRMZM2G427444_T03 (locus G RMZM2G427444) derived from phytozome v7.0 (chr-ID 5; pos 2 09947952 to 209959814)
tttaaggattggtagtgggtggatttcttgtaaatttatttcaaacctaaattcgggttttatgctatagaaaatagaaatacttcatgatgatgaatcatcaggttaagatcgatctaaaccaatccattttatatatacatacgacatgccaacggttaaacaacttattagaaatgcaagacaaccaatacgaaatgctagaaaatcggccgcgcttaagggatgtcctcagcgtcgaggaacatgtgctagggtgtatgtgcgactcgttcagatcatgagttcaaacaaataataaaatttttgaagtatccatgatcggtaccaatgaataggatagagaagctctatcctagatttctatggtatatggaatttatggtttcctttggtgcaaatccaatcatctagattggaagaagcaattcccccattggtaacaaatggttatccattaagcggaggaaatagtaataaaaagaaaaaggcttatgctcctttatcttaaaagaacggactaaagggtcagctacttagccaactttcataattaaataccgtcactgtatgaataactcttattgtgaaaagagttatttactctataatggataggtagagccaaagaatgtgaactatacaagttcacaataccttttgatgaaagaaagggctccggtgtatagagagggcctcgccgtttaaaagggaaccataaaaacgatggaacccactatttttttagtatcgttagaatttgttatttctatgcgaaataactaaatagaataaaaaatcgtggttgggaaggttatagtagcaaaagccattggaattaatattttatatatcggaataatccgtttagttattaatgggaaaaaagagggttaaaagaagagaaatcattagttattcattaaggttaatttgattcaatgaccagagttccgcgaggatatatagctcggagacgacgaacaaaaatgcgttcatttgcctcaaactttaggggggctcatttaagacttaatcgagtgattactcaacaagtaagaagagcttttgtttcttctcatcgagatagaggcaggcaaaagagggattttcgtcgtttgtggatcactcggataaacgcagcaacacgggtatataacgtattcaatagttatagtaaattaatacacaatctgtccaagaaggaattgattcttaatcgtaaaatgcttgcacaagtagctgtatcaaatccaaataatctttacacgatttccaataaaataaggatcatcaattaaaggataaaaaagtaatatacaggaataattaaaaccgaattcccggagagggaactccgggaagatacaataaattaagattaagtggtaggaatcgacgagcatgttgcaataaataaaaaaactatttattttttcccatttttctttcttataacaaacacaagaatccaaattggattactttactttatatatgagtctgagtctttcgaataaaacatcaacaatcggaacttaagtttcgattgttgtttcttaaattctggttggagtttcttaagtttcgattggaattgaacttttgtgttaattgaggaatatgtctattttttctgtgtctaggaccagtaattattgaaattgcctgggcttgaaattgcttctcattctcatagttacgaaatggtaagaaagataaaatacgagcctgttttatagcaagagtaattaatcgttgttgtttcaaggttaatctatttattcgtctagataatatttttccttgttcactaataaatcgattaattaaactcatgtttctataatcaattcgatcccccgggcctattcgagaacgcctacgaaaaggttgtttggatttacgaaaaggttgcttagatttacgaaaaggttgtttgaatttacgaaaaggttgcttagatttatgaaaagtttgtttggatttacgaaagggttgcttagatttacgaaaaggttgtttagatatatacatgatttattccttattttaaaatttgaaaaaaaatggatttctttcttttattaatttttgatccagaaccagaagaagtagtctttctttggtccatatattatttgattaaatcaaaatatactatataaattgattaaatcaaaatatactatataaaaatataaaaaatccaaatatataaaaataaaaaccctctatacatatgaaataatatctacctaaaatcagatgagttgatttgtatttagtattctatctatgttctatatatttaataagaagttcttactctttctgttctttggaaaaatcgaacacacgatgctcctatttctttatttcattatgagtggtatgcttgcgacaataacgacaaaattttcttaattctaattgtccgggcgtattgtggcgattcttttgagtactatatctagaaatccccgtcgattccttattggtaccctttcgaacacaactaatacattccaaaataactcggattctaacatctttgcccttggccatgaacctcctttcctttttggatcgacttaacttaattcttatacctattcttttattcttctattttggatccaaagaaaagaagaagaataaaatccatagaagttcctaactaaaaatgtgatttctaaagattttgttgtaattcttcgaattctcgaacaaatccaatccaatagaatacaaaatttttgaaattcgtaaattaagtaataaaacatagagaaataattaaagaatacaatccttatccatcttttctttctttttgcttcatatactaaaaaagaattcaaaaaggggaaattttcgtcatgtcacgaagaattctatctctcgcataggaataactagaataaaaaaaaagggaatgacaaagcatctgggaataaacgattgatttctatcaataaacctgctaaagccccaaaccatagagtacttagcacgggtgctacagagagatatgtttttatatcccgcattgaaaatcctccttccgtattggaatacatatatgatcagatactcttgcccaagatcctttgtatttcttttgtttaggcgaaattcctaactaaaaaaacaaaataaatattatatatatatagaatgaaccgtatagacgagattttcctatccctaaaaaagatgaccccttcttcctatacattactaaggaatagtagtctttcttttataggtgaaatttgactggattttagtttataccccttccttgattatatgagaccaaaaacaagaaatgacaagaaagttctatatggataaagaaatagaagaaaattacgatgtggaaaacaagaaaggaattgtgtacaatggcattgtacaacaatttggaaaagggatgtagcgcagcttggtagcgcgtttgttttgggtacaaaatgtcacaggttcaaatcctgtcatccctacctattaattctctcttcgttatgggcagtagtggggagatcgattaaagtgggtataacttgaatttgtggatactatacggacgtgagacacgttaggaatagaaaaggattttcttttttttttgttttgaaagcgctcttagttcagtttggtagaacgcgggtctccaaaacccgatgtcgtaggttcaaatcctatagagcgtgattccatatatcttatgtcgaaactaaaataacttaaaaaaaaacaaagtagaattgcaactccaatttgacctcctccagaccagagaggaggtcaatcaaaaaagaaatattactcaatcaaagatccaactgatccccacgcctgtattgcaaatacgcagtcacgaataatcccgctaaagtaataggaattaggcctaagacgattccaaatagaaaaacttcaatcatttcgatttgttcgaggggataaaaaaagaggtacgatctatctctaaataatagtctaaactacccacgaatctcaatgaccaagaaaagaattggtaattagtgtggaaaagagtctagaataccaagaatccaaaagaaagattcttctattcaattcatttcaaataagacgtatcttgttcaagctaataaatagagctggggttatagttaaagcagccagtagaaaaccgaaataactagttatagtaagcatgaaggggttcaattccattttttttactacactacatatgttggtaaagcacttacctaagtttaagttatggaaaattcataattcatcggttattttagataatactaaaaaacaagatagagtgagatacagaagtgtaaaaaaaagagaaaatcgattcatcagacggaacatgagtccctaattccgaatcaagagatttgttgtggaatctgtcagttaagtaaactaataatattaagaactagatcatctaaccccattgaaaaatgaaattggattttcgggagaattttggaataaaagataaataaagaattgaatttgaaaaaaaaaattctttctatttcggattcggattatttcttttttaataggatggatttcatcctctttttggagcaaattttaactcattgtattccatatggaataagaggagaagaaaagcattccacgacccccgaggggccccctcaaaaagggaactattccttaaatttacttttttttatttatttttattcgttttttgaaccccaacaaaagtggattcaaagttacttcaattatccttttcttttaagttcttcttgtaaagttccatgcttgctgtttggtcaagaaaattagacctaatccaacaaacaagacaaggattgattacgaatcttgattcttcaaagaatgtattccgtttctttcataacggattatccgctattcgattttctatttattagatattattttatgctaaccaattaaattcctttaactaaaaaaggatcgattttgcatatacttatctttgtattgcgtcaatatgagaatatccttcctaaattctttatcttattaatcattaacttagattttcccaagatcttggccgctattccaaattaaattattctactattccgaagacaatgaaaataagtaggacccaaaaaattgtggggttctattgatgccttgaataacatgtaattttcctatagacaaggaacaaaaaagagaaaaaaggaattctgtttcgggaccaagcaaaactggattgctgtgccataggaaggatagctatactaattcggtatactcaaaatacacctttggtacaaaattgacaatctcacaaggatgaaatatcagtaattttctatttactggtggatcccatcttttacggaatcaattccttttttgaataaaaattttgggagctcagcatgtctggaagcacgggagaacgttcttttgctgatattattaccagtattcgatactgggttattcatagcattactataccttccctattcattgcgggttggttatttgtcagtacgggtttagcttatgacgtgtttggaagtcctcgaccaaacgagtatttcacggaaagccgacaaggaattccattaataaccgaccgttttgattctttagaacaactagatgaatttagtagatccttttaggaggcccccaatgaccatagatcgaacctatcctatttttacagtgcgatggctggctgttcacggattagctgtacccacggtttttttcttgggatcaatatcagcaatgcagttcatccaacgataaaccaaattccaactatagaactatgacacaatcaaacccgaatgaacaaaatgttgaattgaatcgtaccagtctatactggggtttattactcatttttgtacttgctgttttattttccaattacttcttcaattgagagaaagaaagagagtagtaagaattctcttatcccatttggaaggataccatctttataactatccatgactgtttttgtctctagcatgaccacttgagaaaatgtggaggaaagtaggggaaatggccgatactactggaagaattcctctttggctgataggtactgtaactggtattcttgtgattggtttaataggtgttttcttttacggttcgtattctggattgggttcatctctatagtaatcggaggatccagattgtaaacatgaaaaagtaggaacttagcgggtccttactcccctttatctgattagagcggaaagggcccgcggaattcttattgttataacgcggttttgttccataatctagaaattggttacctatttctatttgtaaaaataacaaagagaaaacctttgctctgatggttggaatccctccatttattcttttgtttgttaatgatgttagtgagtgaagcaatccatcggtcgatttaaagcccccgcctttcgcccataaaatggattcactcttatgaagcaacaagaaagaggggagaggatccagtattttattccatgaaggaagtatcctgcaaatcgttgatttagtttagagtaataaactaataaaaccttaatcaaaactactcaactagcctaaaaatcaaaaccacccttccatgggagggtatagattttttttacaaaatttctgtaagttcaaagttgaacttaattcaaaaagtaaagcaattctatttgctcacaagaaatgtgtcccccgccataccttctttccctctgtttgtccactaccgcgcccgaacctaagcaaaggaagtccaaaagacagacccgaataaagaataaatagtaatctttgacaaaacaaataagaagaaaaatgattcttacttcgatacaagaagaatcgacacaagaaaaaggcaaaaaagcctttttcttgtgcccaatagaggattaagaagacccacaattcctcctaaaaggacttgttccttttattgttctcgtctttgccttggatcctcttcttttgcatgagatagaaataaggaattccagaaatcgaggcttttttctcacttgatggtaagaaatcccaggatctagaaattcatttcgtacaattgaaccttttcaaactgtttctttttgagaaccaaaaaaacttgtgccaaaataacagatgcgaagaaaaacaaaaggccttggacgcgcaatggatcctgaagcactatttctgcatccccctgaccaaaccctcctacattaggattgcttgttaatggttgatcaagcttgattgattccccctctgaaacaagaagttctggcccgggaggtataatatcaatcacttggcgtccatccgatgcatccactatggatatttcatatccccccttttctttacgtagtattttttttactatacctgttgacgtagcattatagaccgtattgttactcttgctaccgtcaggatagatctgtccccttcctcggtttccccctacatatatgggatattttaagaaatgaacgtctttttttgtagcgggatcgggggaaagaatgggaaagacaatttcactatatttcttaccgggaacagggcctatcacaagaatatttttttattgggacgataactctgaaaagagagatttcctatcttttctttcaactcaggagaaatacggtcgggcggcgctaattcgaatccctcgggcaaaataagaacagcacccacattcaaccctccctttttaccattagcaagaacttgtttcagctgcatatcataaggaattcgaagaactgcttcaaatacagtatcaggaagcactgcttggggaacttcaatatccacaggcttattagctaaatggcaattggcacatacaattcgtccagttgcttcccgcgggttttcataaccctgctgcgcaaaaatgggatatgcgtttgaaatagatgtgcgagttattacgtatatcatgatcgatacagaaatcgatcgaatcatctgttcctttaaccaagaaaaagtttttctattttccatgtccaatcgcggatcccggaatttctaaaataaattagataggtagctaagctaatctagttccctatacacgagtctgttgtcattctactgcaatagttgtactagaatgatgaataccttgagcaggtagaaatagaaagaattttgttaaaaaggaaaagggctttctttccatttctaaaggaagaaaagaaatatgctaatttgattaatattaggaaatgaaatgagtgagtttatgcttcactaattgaatgataaatgactacaagtgaaggagatagacggtttaaacaaaaaaagacccaaaatttcaaacacgtgtctagaatcacaggaaaactacaaacaaaaatagtgaaaattagctcgttaggagcccatccaagattgttgtagacccaacgaattagtagttcccaaccgcaggtagagtgaaatccaacaaaaaaatcagtaactaaaagaataaaaaaagcttttattgaatcatttaagttatagaaaaattcctgaacccaagaattcaaaatgacaagttcttctttacccagaaaaaaagaaccacttagaatagccaaacagattatatttgttgagaaatgcaaaatgatatggagatgatcctcattatctattttggccaattgtattatttccttgtgtattcctataggaagtttttgtacatgtgtcttcggtttctcttttatcatttcgtccaagagaaaaagttcctctaattctatgaatccttctagaatccttttctcttgaatatcacttaagaaagtttcggattgcctggtattccaccaattcttaatccaaagttccagacatttgttaaaagagaaagagactccccagggcaaaagtacgataaatacaagatataagaaagaaggcaatgctttcttttttttcatttttgatctgtaagctgaatatatatgatatttcttttctttgaagcaaaaattctataacaaggtttgagaccttgtgtttgtatctatttctctttttgtatactagtggaatttcattgtattgggttctttcttagatctaaatggagtggaatagagaaataaaaaaaggcctttcgtataaaaatggaagaatagtatgccatatatctcacttggacaaaacaaattcgaagcaattttctcttatcctcgtttgttccttcctttactttagataaatactcgaaaatccccttacaattgcaaaaaattgcaattggtactcaaaatacttcaattggtacacgcaagaaataggccaattcggcagctttttgttcaatttctcgtggagtaaaaaacttctcatcagtacgagtcaagggaatgaccccctggccccggatttccatataaaggatacgacgaggataaagaccctctttaacctgaattctaattgattggatatcccgcacaaggaattgaaggaagatgcgacgttttattccagggaatccccaacgaaaaatgcacactattccctcttttctatcgaatcggtcataaccactgcctacattccataaaatagtgcaccacaaataggagctaatgaataggcctgcgattccgtagaaagacatcacgaccccctgtggaaaaaaaagaatttgttgagatggaagtacagatatcatattcttaccaagataactggaagccccaatcgctaagaatcctaatgaacctagaaaaagaatacaggcccagaaaaaattacctctttttcgagaaccttttagaagttctatccatatgtgttctgatcgccaattcatattagatatactaaatccagtagcggtcaattgaaattgagagaataagctaaatgatttttactttactttttttgattctgaaatagccttcagtagctagtactcctgtgaaataattggttagatacattgactttctattcaaaaaaaattagtggatccacttaaaaaaaaactcgctatagtcggctacgcatatgcatgcatttatgctcgtagcttatatctgcatccatagacgtttttcatttgtgtgtagaaagagctacataccctatcatattatagtacttacacaaaaaatatctgtattatgatcctggaaatacattgagaaaatttggccccgtcgtttctagacaatcttatttttctgcacataaagaaataaggaagtcattgcaattgccggaaatactaagcctactaaaggtacgaaaatagagggtaagttaaaatctgtcatagaatatgtgtctcaattcaaatttactatttctatctattcaaaatatatcttaagattcttatgatataattaagtatatctattataaggaatattgactattgtattttttagtttacaaaataaagattttttatagatatagaataaaaaagtattctataaaataaatgaatggaattgataataagaaaattgcaaaaaagggaagaaaaaggataatggtagcccccccattaactaatttatgaatttcatagtaatagaaatccatgtcctaccgagacagaatttcgaacttgctatcctcttgcctaataggcaaagattgacctctgtagaaagactgattcattcggatcgatatgaggacccaactccgttgcattgccagaatccatgttccatatttgaagcgggttgacctctgtgcttctctcatggtacaatcctcttcctgctgagccccctttctcctcggtccacagagaaaaaatgtaggactggtgccgacagttcatcacggaagaaagaactcacagagccgggatcgctaactaatagaatagtactactaactaatactaatatatagataactaatactaatatatagatattaatactaatatatagatatatagaaatagatatctagaaatagaaacgaactaatatatagataatcgaaatcgaaaagaactgtcttttctgtatactttccccgttctattgctaccgcgggtcttatgcaatcgatcggatcatatagatatcccttcaacacaacataggtcatcgaaaggatctcggacgactcaccaaagcacgaaagccagttagaaaatggattcctatttgaagagtgcctaaccgcatggataagctcacattaacccgtcaattttggatccaattcgggatttttcttgggaagtttcgggaagaaattggaataatatcgattcatacagaggaaaaagttctctattgatgcaaacgctgtacctagaggatagggatagaggaagagggaaaaatcgaaatgaaataaataaagaataaagccaaaaaaataagtcgaagatagaagagcccagattcaaaatgaagaaatggaaactcgaaaaggatccttctgattctcaaagaatgaggggcaaggggattgataccgagaaagatttcttcttattataagacgtgatttgatccgcatatgtttggtaaaagaacaatcttctcctttaatcataaatggaaagtgttcaattagaacatgaaaacgtgactcaattggtcttagttagtcttcgggacggagtggaagaagggcggagactctcgaacgaggaaaaggatcccttcgaaagaattgaacgaggagccgtatgaggtgaaaatctcatgtacggttctgtagagggacagtaaggatgacttatctgtcgacttttccactatcaaccccaaaaaacccaactctgccttacgta

SEQ ID NO: 1146 - DNA, 9209 bp, Zea mays
  Intron number 5 from transcript GRMZM2G137786_T01 (locus G RMZM2G137786) derived from phytozome v7.0 (chr-ID 1; pos 1 60004261 to 160013469 reverse strand)
gttggtaccacgtttcctcccgatccacccaggtatattcttacttccaccaagtgctagtttgaaagcttaataaatactctttagatctctggagtaatttgaataaggcatttatttatttataaaattatgttctctctaggtttgaccctctttactttctaaggactagtttggaaattagtttatttctacatcaatcatctcctgtcctaaaaggattatagagaaatgaactaatttcctttgtaacccctccaattctgaaggaaatttaagtttccaaactattgcttaaatacgatatccatctgttttactccttgaaacagtctctcgtgtttctaggccaatttttcatcttgctggtacaacaataaaagaggatccttgcgctccctaatagtatagttttttcaagagcgtatacaaaaggtagttaaaagattggtccctaaattataaatatacttaagagacaacatatatagaaagagtcgtgtagaaacaagcttttcaagaatatatatcgtcttgtttgtttatttaaactcctatagatcctcaagatacctaggtcgtacatgtatatgttgatttgatcaacctgatcgacagttcactactccgtaagtatgaaagtccactcaatgctataagtacaaatatgtttgtgaccgttcgatcaagttaactttttaactatatttcattagagacaacatatatacggaaagtgtaaaagtttttttctaatctttttaaacaacctccgttagaaacaatttcattaaaaatagtacacaaataggaggaaaaattgctgcatcatcgaagaacccacggtctgaaactatccgacacagaacgtcaataccatcaaactacatctgttattgataacaataagggcttctttggttatatgcggattggagggatcccatacatccaaacaagctctgaaagaaccatttcttccgaacatttggtgaaaatggtttttatcaacatttttatgaaggcaacatcaacaaagatgatttgcagagacaaatgatttaagcaacctgctctaaaattattctaaaaggtgtttgttgggattatgatatctaggggggggggggtaattaggttttctaaaattctactataaaccatagaatctaattttaacttagctaaacctattctagaaagtatattaataatttagatatgcatctaaggttgtgttaagtgtactgctctctgtaccgaataagtgatacgcaccctaagtttaattctcccaactagcctagcaagctaaattagaaatagtaaacacataacctaagtacaaaatataaatgtgaatgcttaatggatatagaggtgcaaactctcgtaaatgacttcggtgtggtatcgagaacctcatgcgccttattgcagcccttgcaaagatgcccccgtaaggtccaagcttctagtaagataactcctaggtagaccctaggtcttgcccatgtacaagtgcgtctccgatatggacactcagaaatccctctatgttgtctttgctatcgagattgtgcctaaactgatgtgagccatgtttccactagtatatgatggcgatcacaccacaaatatggttggtgcatctcataaggctacaagcccctctgagtataaaagttatgcttgcaagcactgagtgagaaataaagaggcatgcaaacctctcaaaatactaggtctaaacctagaacaagcataagtggtgatctaactagtccaagcacctcacagagtattaattttaatcatctattcttttcttaagcacatatggtggctacaacttgaggcattgttcacactccttattcaacacactccaaccatcacaaaatgtcacacccggatttaaggacaaatccacttgcgtctcaaatgtgtgctaggatcaagtcttgtacgtatgatgtctcatggtacataaaatcattatcaaatatatattacataataggagttatgtacaaaataactaaacaaattacaccatatgacaacaacgatcctctgcaaccatagttgactggaagacgacgacctagatctctctaaactcatcgtagcatccttcatgctcctccagcggtacatgttcttgacctagtgtgattatagcaagaatgagctcacatacgttcatcgctcagcaagtgtggagaaacacagtgctaccacaagcatggaatatgtgaagtgtaaggcctaccaaggataatggttagggttgagcattgcttttgataagttggtcaaaattttattagcaattactaagtataactctataccaacccaattaaataaaagatcacaattataataaatcccacaatacaatgcatatgacagattaagtttaagtctataaattactcatgtgagtgtccgagctgctcttagtcgtgagaacaactgatatatcagttttacactctgcagaggttgcacatctttatccacaagtcgtggtacccatctgccatggggttgtacggaccccatgcacctataccgaggaggcgaggcagggtaagcaccacgatgcctttccaatgttccactagcatgagagaacccgctacattttttgggccaaaggcgatactggaatccctcgttcaaaaagcaatcgcagacagatcgacctgaggacctcactattctagcagcttctccaccccgcttgcccttttcgggaaaggattaacttacactggctttactaattaatcaaccaatggcgcatattgcacgcttttggtagcactgttttctcgggtggtcgctccatgttccaattaatagaataatcttatcatgggcaataaataatcgagcaataatgataaagcatgatcataattcatatatagccttaatcctaaaaccaggtagagcaatagcaagactacccaatagttcatttgtttgcaaggtgtagggtaaacaaattaggtaacctattaggtcccatcagattaacctaatagtgccacggtgattaacaaatcattattaggtaaataaagtgcttaaggacacactttgccatatacttgcgataaccttgtcgtcgagatgctgccccaaaaattgggcttcaggttcctcatcgcctcgcctctattcgtagcaatacatacaatcaagtgaataatggagatggtaacattacaccgaagcataagaaaaaaatacgtaagaatattctacatgtcgctacgagatagtaggttcaagaattactaaattctgagttatggttgcaaagatatggctttcggaagacctatgtgattaagtaattaaaactaggtcttatgttgattttataaatcgtgtgagaaagataatctaaataaataattaattcgactttaatctaaattataaattgattaaagattatattttagtcagtttaattatgtatagattaactttgattagcaaggttaatctactaaacatggtttaaacaaataactaattataacagtgtggatatgatacaagtatgttgttactatgtacataattttttttatgaaggtaacacatctggaacggagtaaaacagagttataacggagaaaatatgaactatctaggttttttatccatttttatataaattttatgcctaaaatatactctaagggctaaactgcaaagtccgagtttattttatttattttaatacggaaaatagtaggcgggctgatttaacagaaactgatggtctctttagaaagaatccgcccgcgaaggggcatctataagcctcaaccgttggatccataaccgagcgcccagtagatcggccttttaactgaatagtacacaaacccagttgttggatcgaagatcgatgacatagatttaaaacatccttaatcaaatcggacccgctcgatccgagatcgacagctctcgacgactctacgaaacagtacaccatcttttaatccaggctatacagcctatatctaacgattagggatcatctcccccgttttgttaggcgaacacggcaggcgttggtccggcgtggcagtgccattgccgcagacgcccaaaacttcatcctcggcacaatctctacaacgaacggtgctacatgatgctatggttaaggcaaacttaagggaggcttcttacggaggctggtggttatggcgatgctgtccacgccgagcagcggctccacggttgcgttcgtgctccggcgagcaagtgcagacgcacctgtccaccatcgagcctagggattgtacactcatgctccacatgtgctggcgggcctctttgactgattgccagactctgagtgactgcggggacgagaggggacgatggcggccttcctcgactcgcacgacagcgaaatacgcccgtgccgccgagccatccccgtgaacaacaatgctgcggaatacgaccagcgtgacccggtgactctccaggaggggcaccgaggaccaaccgaatgcccaatcgcgccgttgactacggtggctacactgctttccttctgcgctttctcccaatggcggctattgcggtttgatggatgaagaaggtggttgcagctattcttatagtcatgatcgagtccggcaggatagacctagggcacggcgaaggggatccaccatcttcgtgctcggttgacacgaatccgcagtgaggacgacagactgagcacgtgggcccacacggtagtgaagatggaggcattatagatgtccaataatcacgaggcccgcgagcccggcacaaagtccgctatttgggcccggtacgagcccggcacaacccgattctatgtgggaccaggtcagcccggtatgaataagcggttagacagtccgaccggttttctaacagtgcccggcgggccgcccggctctttgaaggcggaccggtgggacccacaaggcggcgagtgcgggcgctacactgagcgcgcggtgctgggccgtgctgcgattttcaggtgagagtgggccgcgtgaaggtgttgggttcgcgcgatgagcagtatctccttctcttgtcttttctccttttctatttctattttttaatctccaattcaaatttgaaccagtttgaacacatgttaaattagcacagataaaaaaacccagcatgagatgcaagtttatttttgttatttattttatccctttatttgggaatcttttttagatatgcaatgcacacacatatttatttactttaggaaaaatatattttaaaaagaagaaatctttattgttcaaatacattttatctcgaattttttggagaaacttttgtaaatcctaaaataagattttaggtgttacacaaaagacaaccaatgggtattaatagcaccacaaagaaactagcagttaggaaatgcacatcacattttgcattcataacaaaaatttggtgacttgattagagatttctatgagtgccacatgaaatagcagaactcgattgttggatcatttgtcgattgttatccctttctatgatgcaaccatcgatgcataccagataatttcggttgcattgttctgcctttgggttaatattctaagcttcatcgaagaatccgtttcatttggtgccataagttaggcatttgtaattatggaaattcctttcaagaacatcttcgaatgtgatcctatcctctagcgttgtgttcattattccatcgaatatttttcggtgatggcatctatacagtgctgccttcataatattttctctggtgctctttctatttttatacgagacttttctattgagtcttgttgattctatttgactgatgttctgccatcctatcttctaggtgtcattacctagtcaacaccaaagttatccgttgattgcaataaacatgtagtgagcttattttctttatgtcattgctttgtttgttttatcttgtgtcttggacttgtagcacaccttataggtcttctatgacaccatgtcttctcttcagctagaagctactaaacacaaataaaaccttgctaatactacctcaaatctaaaagacaaccattagaattttcaataaattttccctataatgaggcatatgaaatacatgcacataataaaaccacaatagatgtaaaaattgattatcacagtctgttcccaacacaaggatataaaattaccagcacatcaaacaaaacatcttcaacaacaataatagtcactaaaccaaactaaggaggtacacattgattttattacttatttaaaaatagttattatgtgattgtaagggtgtgtggacttttgaggaagcatctactcccatctttcctgcatgttgcaattatctagtacctaaaaaccaaaagaacacaacgacgagtaaaaaatactgagcagtaataatttagaaccagaataccaaaataaagcatggattaatgaatgaaatccaattcgattgtcaaatgatctatagttttcattagagacaaaaaatctcaaagtattcctttgcatttgctagtaaagccgagtaagacaaaaaaaaacctcaaagtattcctttgcatttgctagtaaagccgagtaagtagtgctaggacttactcataggaacaagaaccgaatagacttgaattaaatatgaattgtgcaacagtaccttggaaagactcgtgatgagctcttgtcaccggatgtgctagaaactattcaacaaagccaccattataaaatatcacatactaatacatacatgaaaatcaaagcagcccccacgaactatagttccattgaaccttttttttttgaatttttggacagatttatgattctacagtctttaatctattacttttgacacttgacatcaaataagacaaacaagtattttctagaaatctatggaaactttcctacagctttcatgttgatcaccaagcccagtttgcatggatagtacccaaaaattaggacaacttcatacctgaatctgataggaatgaaacagtggcatttgataaataacaagaaagcctacatcttttgtatttgtggaattaccaaattcttaattgacctatactagaatttgaattatatctgatgtctagattgtaacaaacaaccgacaacaattgatgactaaattcatttgaattccttccttcttctcctacacttcaatcgcttggaggaggggttccacaacaaaaaggttatcctaggtgtccatggtccaagagatggtgaggaggaagaagtgggttcctagggctctttagaaaggagagaggagggcaccaccatggtagtcaggggcatcgatcatgaagggaggaaggggaagagtccttacgtgcatgagaggagtccctagtcgcatgatgtcacactcgattttaaggacaaaacctaatgtccactatacatgtaaccatatcgagaatcacatgtatagtgacatcatacattggattatatcaaaacacaatgcttttttatcaatgagatagagtatttattacataaacttgatatttatttaatgcactagtagaccccccacagctgtctggtttattgtaggcccaaaactcgccgtagtcctagaactcttggggtctaggacacctgttttccactatttggatggaacaatacatatggtggggtggaaaaagctagggtgagtactttcacactcaacaagtataccagtttgggtaaaaagtggattggctatatagcggactagcttgagcggttgcttttcgttggtgaagtttgaattgcatatgcaaagcatactaatcctctttgtaaaacatttgttaggtaaaactatgttacattctagtaacttaaatgttcattgcatccgacaatgaaccattcaccaaatctcttggtgaaccattacagtaaagtaaccattgaaaatacattaattgcatcccacaatgaaccatttactaagtctcatggtgaatgttttgaaaaccgttcattgcatatcataaggaatcatccgccaagtcctatggcgaaccttttgaaaccatctcgacatctcacccttgacattttgtgtttgtaaaacactaatatatgaggatccaaatgcctctcttgaccatgagcatggctaattaattaaccagttttacactctgtagaggttgtacaactttagcacaagtcatgctacccacatgccctagtttgaaagacccttcacctctttcgaggaggtgtggcagggttcactatgagacccttacaaaggatctcctatgcaaatgataccataatagaatatctagaggcaatttcttctaatatatctccaccacaaacctcacatgtaggccctctagggcatctcatccaaggcctagtcaaaggtaagggtgttacattttaaaatctattcaacttatagtggttaaatacaaaaaatgtttcatagtatcgaatacatacttacatattatcctaaaaactgtaattgtacacacaagttttatttgaggagaacaaaatgaaaaatgtgattggtgggtgaagtaccttatttatgtaggtaaaaggagagaatgaaatgaaattttggttagaatgtcattaactaaaaagttagataaatggtagtaaacaaaatactctttcttgcttattttttttcatatttaatcatgtgacatgaaggttcagttctttttttgtatatgttgtatgagcggggacatttaacatatatagggatgattattactaggccttggcatgtactttttcttgtataagttatgcgttatgtgaaaaatgaactcttgctgttattaccttattatcaaacaaagcatatgggggagacgacaataatgtagataagaattcatttaagaatcatgggtatacaaaggaaggtttaagtattcattaataaattacagattacatgatcatattagtgtgttataagttattagaaataaaactcacaagctatatttggtataaaactgttatctatttaaatatatcattactaaagtgagctttctcttgtacacacaggacggttctggtgcttcacaagaattacttac

SEQ ID NO: 1147 - DNA, 22170 bp, Zea mays
  Intron number 9 from transcript GRMZM2G057140_T01 (locus G RMZM2G057140) derived from phytozome v7.0 (chr-ID 3; pos 1 91433252 to 191455421)
tcgcaaggagcatttgccaagccttcagacaagcggtaaattaaaacctttctaccaaataacactaagtaaacaacatggtttttttgttgttttcataaattttgtaagataatctgctgccctctttgttgattttgccagctgcctttggtcagctcttgttgtccacccagttactgttgaagtatggcaatagatgaagtatgtagtggcaaccctaaaacagggtggctgttgtatatatagtagagagagaaatacatggcctagaccaaggccctttacaacaacaaacacacaataatctaacacccccgcagttgaaactgtagccacgattgatgttgagattggagtgaaacttcgagaacaatgaggagagaggacttcctcaaaccagtctaaacccccttctcaagcacttcgggcaaagccatcgggatagtggcaccacaaaatccccctctaacctacaaatttacttgtcgttgaaaccatgatagttcgtatccaacgagcaggagtgttgcaggtgcgtaaggctatctatgagttgaggcaggctccgctcgcttggatcgtgaagctagaagccatgctcggtgagctcggcttggatcgtgcaggtgcgtaagccaccgagcacgggctctacacgcgttggcggggaaggagcagctcatcgctggcgtgtacgtggatgacttgatcatcactgaagcacatggagagaacatgacttcaagcacaagttgccagacttgttttcgcatgagagatcttggcttgctcttctatgtcggcatcgaggtgaagcaggggagggactccatcaccctatgccagcgcgcatacgtagggaaactgctaaagcgaagcagcatggtggattgcaagtcgtgcgcaacgctgatgaggagaggctaaagttggtgaaagccagcatcgcggctaagatggatgacatgctcaaccggagcatcgtctgtgggttgtgctatctaacacatgtgaccgaacatctcctttgtcatcgggtatgtgagcaggttcgtagaggatcttcaagcggattattggttttggttaagcgcctactgcactacatcaaggggacgaccgatcaaggcatagtcttccccaataccagcgaagcagaaccgtagctgaaaggcttcagtgacacaaacatggcaggtggcattggcaggtggaagagtacctttggcatgctcgtcttcctcggttcatcccctattgcgtggtagtcgcaaaagtaaaggtggtggcgccatccacatgtgaggcatagtacattgtagcggccatggtggcatgccgaggtgtttggctgcaccggctgttgggtgagctcgtcagagaagaagctcgcccaccgactctgatggtgggcaattagtctgccatcgctcttgccaagaaccccgttctccacgaccggagcaatcacatcgacatcaagcatcacttttttcgtggttgtcgaatgaggacaaattgccgtcgagttcatcgagaccagccgacagctcgcatacatcctcaccaagcctcttgggcgtcttcaattcacaaagctgcagaacataaattggcatggtggatctcaaggctggggattagcagcatgattaggggaacgactgtaatataatctgttgctctccttgttgattttgcttgattaggaatttagattttggtcaaatcttgttgtccatatagggtactatagaagtatggcaataagccaagtatgtagtggcaatgtagggagtaattgggggatgacatgagctatgtacaagcgcaggatgatgtcattactcttcgctatgtgtgttcggagcttcaattggtcgacttcttcacaagggcacaaatgagagctcagcatcgtttctctctctctctctagtctcagttttcgcgatccatcctgagttttgtgatgggttagatatatgtgtgtccttgtatatttctgtttgtataagggtctctttgcatctgtacatgtacatattgggctttattagtccttttcctcagtagaagcactattccaaacaagagaaaggacattgaatagaccataaacaaggatggcttgcccgctcgctctcgcgctctccctcgcttccccacacccactgccgctgttcgctgctgctccgcctaccaccatgcgtttaccctggtcatggtgtcgccgtgggtttagtatccttcatccctggatcctaggcttctcctgtctcccatccggtagaggtgagcggctacttctcgatggcttctccatttgtttgggatgatagggggaaattgcttgcgaattctttggactgctcttctggtaaagcttttcaacattcggttcttcggagatatggatcctcagtccaccacgcctcttcttcgctttcgggctccttattgattgcggtttttcgccgttacacttttcatctttcggctaagtcggtcagcttggctttgcatcttttcatctttcttagtggctccccggcgggttttcatgttgttgaagaatcatatcatcattttcgtttttcagtggcctccaagaaagttggtttcatggtcttggctctgaagcgcatcatctctgcaaactttgatgtttatttctatctttggagaaacgggagcccaaattggagaaaagaatatgctctttggtgcagagaggaagatgagaagtggatagttgttaaacgtagaagttgtcattcttcaaaattggtctcttttgctaagaatttggtgcaagactgaccaagcaagaaacatggtccttcgggtcgaatcaacaatggatttttcaggttggccataaagacgaaggtgaagctctttctccaaggtactcctatgatcagtgtcaactggatttcgtgcaaatcgagaattttaaatgtccattgccaatcttaaattcaaatatgagatctcgtttcagctcgactttgaacaacgaccctcaggagactgctttggttcctgttccagccatctttttctcggatttctcatgatttggatagggcggtgtctcatgggactccgtgcaaaacccgcctctcgtctgctgggcgtgtacgcacgtcgcatgcgcactcggcgctgttgggcccaccatccttcaaggtaaactttgctaccggtgtctctcgaacacccacttcatcaggacctgttctagcccggtcaggtctcacaggtgttttctgcttggtcactttgaaaaatatttcaacagtagtcatgctcaacctattgacacacgtctactctgaaggcctaaggcgcactgcattaaaggattggcggaaggttgcaatgatgctcatgttgcattggaagttgctcctggagccttagctaaggcccctctgccttcagtcaccgggcccactcaatcttccggtaaaggtgccttttcgcattctgacgagggcaactgttcggctctgatccctgaaagcatttcgcttagccttccacctgctacagttactgggccgtctgctatacccgattgcaggcacctttttgattctaacgatggctactcctctcttactgatgttgagaaaaccctttcgtcttcatcctctcgctctaaacagtgctgcggtttctccccgctgccctcacctctcttgcgcatggccaacttttcggcagaccctcatcctttcctcccaccagagttcatcaccgtggatggggacgctaaccggcgcactctcgcccgcattcatcttgctttggagcaggagactcgtcgggatgactttgtcattgcgatggatgtggagggagtggtgcaaccggctgactttggtatgtgggttaatcgcattcgggattaccttcaaaataatcttagactgcatgttcttagctgctccgatcacctgtttgggctgggaatctttgaaatgggaagccttctctagaagcacaaattgatctctggtgatattttcaatattgacgacactttggtgtgttttattcgaccggatagagtgcaaaatttcagagaagtgacctatagcagaaaagggtggattttgttgctgggttttcctgttactcttatgaatgatatgtgcatctaccaagttgtggcatcctttggcaagctccttagttggcacaacaaccctagaatcaagtcctatgtcctggttaagtgcatgtacagatgattcaatgacgtgccaagaagcattgtgctcactcagagagaaatttccactggtttgggatgctcttggaccgtccctgtgtacatcctcacttcggaagacgattggaggcttggggacattgaagctcttgccaaccataaggatgatgttcctcctaacggtaaccctcatccacttctagaagaagacaatgatgatgactttcttcaagccgacggagatttcatggaaaatgcagataatcacaacttggggggtgttcaagtgatcctgtatgggaaaacgcggccctgaacttgggaatcactaataattgtcagccgtggctccagcagccccattttcctccccaggttcatggcatgcatgagcaactcctgttggatcccaatgataggccggatgatggggccgagtcctcctcctccagcaattcggttgcaagatgcaaaaatcgcaatagattcccttacaggactactgatgatctccctgaacttggtgttttttatctttggatcttctctcgcacgaaatgccaggatgggctgaagaattcatgtccatggggctcaaaagaattatgtgccatgctctccctcacctaagtgaggtctcttggtggggctcctcctgtcgcagtctcacaccgcctggtccttccactgttcaaattcagattctagaagaaaatgttgaggcttctgtcactgctaaggttcattctgtcactagttgccaacctcttttttcttctccaaggtctaccgagcctgctagctcacattggcacaagcaggaagctttaaaacaaaggcaagtggttaccaaagtatatcaacggcagatgcctaggtaggccaggcagattgtcaagaagaagaccaggtcagcacttaagaagtctgcccgacaaccatacccatctcaagttagaagaagtgcaaggataaataccagaaccaagggactcaaggtctcctttaatcttggctcgccctcagggccctggaggtaccttctcagcatctgccccatgagctaggagacttgaatgatctcaattcttttccagggccgattaaatttccatctttgcaaaaccttttggattttgatgtaatttttctagaaattaatgctactaccttgcagaaggtggctgttgagaattgtggaatgccccctgtggaggcatctgtggaggtgctgcttcgtccggacccaggagtggaggacatcatcatccccataggacctatgcaagaaccatgatgatttacaaaactacgtctcatgctgcggtgcaggtggctgtggttttttgtgtcttaaaacttatgtgatggtttaacattgtcctttgtacccgtggggtaccttttggtggtttgtggaacttgggtgaaaaacattatttgacctcgtcggtgacttggtcatcgtcttttatccgcgccttgatgatgatatttcttttgcactattggttcaatgatattgccccgggaaagtttgctgtgggggttactccctgtgttcgcgtcttggatgtgatatccatacgctcgttggctttaatctttaaagtgataatttatgaatcacaacgttagaaaatggaatgttcttaattggaacattagaggtttgaattattggaaaggagaatgggggtagtattctatattgatagaggagaggaggccttacaatatataggcttacacaggtgacgcgccagggaagggtgtggcagcctggtgccaatcagaccaaacctaccaaagatagaaatcctcctttctatactagtacaacatatctgtctatctaaggaagaaacctctagttgccatagaagactatattgctatactagcctagatagaagagcctcacgcaggaggcaaccaggaacattaccaagactgtctaacacccccccccgcagtcaaaacatctagccgctgcaaattgagactggtcttgaactcaagaaacgcggaggaaggaagccatttcgtgaagatgtctgcaaactgagaggtggtaggaacatgctgaacacgaacttcaccagtagcaacccgctcacgaacaaaatggagatctatctcaacattcttcgtccgatgatgcttaactggattagtggataagtagacagcgctgatgttgtcacagtaaacaagagtgcttctatgaagaggactgcgaagttcttggaggagttgacgcaaccaacaagcctcggcaacatcattggcaacaacacggtactcagcttcagcactagagcgagagacaaccttttatcgcttggaggaccaggagacaagattatctccaagaaataccgcataaccagaagtggagcgacgagtgtccggacacccagcccaatcagcatcagtatagaccacaagctcggaaatagatgtggagcgtggtagaagaagaccatgatcagccgtaccttgaaggtagcgaataatacgtttcagagcagtcagatgggactcacggggatcatgcatatggagacaaatttgttgaactgcatatgtaatatcaggtctggtgaaagttagatactgaagagcaccagccagactccggtactgagtagcatcctgaacagcaggtccactgtcagcagcgagcttgtactggagatcaaccggtgtagaacaaggtttacaaccagacatgcctgcacgatcaatgatatcaagaacatatatacgctgatggaggaagagaccagccggtcgtcgctcaactgcaataccaagaaagtgatgtagaggtccgagatccttcatgggaaaatttgtctgaagagctgcaatgacacgctgcaatagggctgaactggatgcagtgaggataatatcatcaacatagagaagcaagtaagctgtctcagtgccattgtgaaaaatgaacagggaggtatctgctttggcttcgacaaaacccagagtcttcatgtgggaagcaaaacaattgtaccaggcacgcggtgcttgcttcaggccataaagagacttgttgagacgacagacataagtgggatgagtagggtcaacaaaacctgcaggttggctgcaatagactgtctcagaaagagtaccatgaagaaacacattctttacatcaagttggtggataggccaatccctcgacagagctatcgagagaacagtgcgaaccgtagtaggtttgaccagcggactaaaagtctcatcataatcaaccccaggacgctgagtgaatcctcgacatacccagtgagctttgtagcgctcaagagaaccatctgcatgaaatttgtgacggaaatgccatttctctgtgatgacatgggcacctggaggaagaggaacaagttcccaggtattgttggagaccagagcctggaactcctcttccatggcatgacgccataggggatcagtcaagccttggcgaactgaagttggctcaggggagatggctacaatagcgaaagcagccggtactcaaaaaccagccttggcccgggtggtcattgaatgattgttgaccaccacacgtgtaggaacagcgccgggaggaagaccagacatcggcgaaggtgcaggtgcaggctcaatcggaaatgcagaagcaccagaggcaccagcctttggaagatctgtagggaaagtagtctgctggcgccgacgagtgtacacgcgcagaggtaggggcgtcggagcagctccaggtggtgatgccagaccaccagacccggagggaaccaccaggggcggcggggcagctcctggtgcttgagccaggtcacgcggcgcaggggcagaaggcaccaagtcctggtctggagaagacagggacgacgcaggcgatgtagaggctgagacgggcgtgagtggcatgggtcctgccagatcagccactgagccacaaccagaaccggacaccaagggggacgccatggtacctgcagaagagggcaaagtcccagttgaaggggacaaaggcgcactctcaggatccaaaaaattcaagttgttagttagatggggcgaggcagagaaggggaaatctgcctcatcaaaggtgacgtgtcgggaaatgatgatacgatttgtggagagatcaagacagcgatagcctttgtggttggaagaataaccaaggaagacacacttggtagagcggggagctagtttgtgcggtgcagtagcagtgatattagggtagcaagcacatccaaaaactcgaagatgatcataggatagaattgtgccaaagagagcagcataaggacagatggcttgtatagttttggtaggaaggcgattcaaaagataggtggctgtgtgcataccttcaacccaatattgagcaggaagggaagcctgaaagagtaaggaacgaatgatattgttggtggtgcgaatgatgcgctcgactttaccattctggggagaagtataggggcaagacatgcgtagaagagtgccacgagcgaggagaaaagaatgagtggaggagttgtcgaattcgcgcccattgtcacactgcaaatgtttaattgagcgaccaaattgcgttgtgacatacgcaaaaaaggaagaaagagcatcaaaagtatcagacttaagacgcaaaggaaaagtctacaggtaatgggtaaaatcatcaaggatgacaagatagtacttataacccgacacactggcaattggggatatccatagatcacaatgtatgatatcgaagggttgctcagtacaggtagacgagctagaaaaaggtaatctagtgtgacgacctaattgacaagcatgacataaatcaagggaactacgagaacactgaatgaccgaggagctagtgagttgggacaaaatatcgatgccggggtgaccaagtcgtcggtgccaagtacgagtagaaattgcagccagggcacaagttgtcgatagggatgaactgggcaggcgcagggtgtagagtgggccagcactattggacctgataatcacgttcttggagcaaagatccttcacagagacaccaaaaggatcaaattccatagagcaacaattatcagtagtaaaccgacgaacagatagaaggttttgaataatgtgaggtgtgtggagaatattattaagatataaaggtcctggcaaaaccgtgtcgcctactgaggagacagggagaggcgccatttccaacaatgatagaaggagtagtgagatcaggtggtcgaaagagagagatgttaccagcatgaggtgtggtatggttggtggcgcccgagtcaggaatccagtctgtaattgtggccggcggttgaagattcattgtactgaaggtgttggcgagggcacgctgatcccaagatccagtccaaggggactagggctgaggagcaggaggtgatgccggggccggcatgggcgcaggagggggtccaagtagactagcttgcagggtaggcagacctggtgttgccagataggactgcgacggagctggtggacggtactgctgtccggggcgtggggaggatcctgcaggcatggatccaggccacatatgaattgtacctgtccagggattgtagacggaaggccaaggtgagccaccaccacgaccatggccgtgacgacgatttttgttgcgacgaccagcacttgaacccggcacaccaccctgggcaagtggtcgagttccctgggcaggaggacaggctggtgatgaagccgatggagttgcagtggaggtgtacagggcgctggccacagagtcaggcggcacagcccctgcgacaatctcttccaagaccaaatcatcccggactttgtgaaaagtcgggaagggaacagaacgggtgatgatggtctggagattggcatacttggggctcaggcctcgaaggacattgagcaccaggatgcgatcggagacgggggcgtcgaggtcagagagagcatcagcaaagcctttcatcttccgacaatactcaccaacagtgagatcgccctggacgaagttgcggaaggtggcgttgaggtggagagcacgcgtctcgtgatttctaatgaaatggttttcaagagcgagccaagcctgacgtgccgtgccatggcgctcctgcagctcgatggagacggtaccaaggatccaagacaaaacaatgctatccattgtaagtagagggactctaactctcatcaagaggatgacactatgaattggggcaattttctgtttatttcttcaaacactacacaatgccatacccatctaagggttggagacccatatttatagccctagaggctgcactaccacaccttctcacacacactacacaacaggattgttctctagatgctaaagagactacagaggacagtcaaaagcgactgttgtcctctagatgctaaaggactacagaggacagtcaaaagcgaccgctgtcctctagatgctcaagacttattccatcattctccccctaagtcttgggcgtcgtcttatgagaaagttgggccatcccggacctggagcaaagctcaacaaacttgatcttcccaaggggcttggtgagcaggtctgcaagctgatctttggtgttgatgtagcgcgccttgatgctcccttccaccaagcagtctcggatgaagtggtatctcagccggatgtgcttgctccgttcatggaacacggggttcttggccaatgccagagcggactggctatccaccctgagttccaccgctccagtgtctctcccgaggagatcaccgagcagtcgagccagccagagtgcctgagtcgaagcagtggacgccgctatgtactcggcctcgcagctggacatggccaccacctgctgcttcaccgactgccagctaatgaggcacttgccgaggaagaagagaatcctgcttgtgctcttgctagtgtcgatgtcaccgacgtggtcgctgtcgctatacccgacaaggtgtgcctccccagggcacctcgggtagtagagaccgtggtcgagagtccccgcaacatagcggatgatcctcttcacagcctgctcatgctccgtcgtcggtccctgcaggaaccgactaacgtagccgacggagtatgtcaagtcaggccgtgtgtggacgaggtagcaaaggctccccacaagacgccggtactgtgtagcatccacctcctccgtcgtgctgtcgcgactcagcttcagcctctcctccatcggagtgagagctgggttgcagtcggtgagcccagccagctcaacaatgcgcctggcataggcggtctggcgaagtgtgatcccggagtctccctggtgcacctcaatccccaggtagaaggagagatgccccaggtcactcatttggaaggtggccttcatctcttccttgaacgctgccacctctgcatccttggcgccggtgatcaccaagtcgtcgacgtagacacccaccagcagggcacttcctccattgccccgccgatagatggccgcctcgtgcgggcttggcgtgaaacccattcctttgagcgtggaatccagcttggcattccacaccctcggtgcctgtcgcaggccatagagagccttgcgcaggcgcaacaccttgccctccttgccagggatcgcaaaacctggcggctggtgtacgtagaccttctcctttaagtcgccgttaagaaacgccgacttgacgtccatgtgatgaacgtgccagccttgctgggctgacagcgcaaggaggagccgcacggattccatccgtgccacgggggcgaaagcatcgtcgaagtcgatcccctcctgctgtaggaaaccgcgtgccaccaagcgagccttgtgcttgacgatggcgccggcttcatccctcttcagtttgaacacccatttaagggtgatcgcgcgatgaccatgagggagatcagcgagctcccaggtgcggttcgtctcaaccgcgtccatctccgactgcatcgcagcacgccaagccgcatgtttctcggcctccgcgaaagactgaggctcaccatcgtcgcatgtaagatgcaactctcctgccagaatgcgagatgcagggcctggcaccgacgggtcgatgagaaggccttccacccttcgataccgcaacggctcgccgtcgtagcacgcgtcgacgcgctcctcgtcgcgggacagaggggtcacgagctccactgggtcgtgctcgacacgagctggtgtcagagaggacgttcccggagagggtaccgtcggtgctggagtacgtggtggcgaagagctcgttgtagccggagtcgtggctggagtgcgtggtggtgaagagctcgttgtagcaggagctggagagtttggcgctggagtcggtggagacttgggggctggggtagacctgctcggagaagagttgcctactcccctagctccctcaacgtggacgtactcgatggtgaagtcgtacgtcggagtcgtgtcgtcgtccaccgccttgtcccacgcccatcctcgcccttcgtcgaacactacgtcgcgcgccgtgcgcacacgctgtgttcttgggtcaaggatgcggtaggccttcgagccttccgcgtagccaataaacacccccggggtgctcctatcgtcgagcttgctgatgtggccaagctccttggtgaacgcgaggcagccgaagacccgtaggtgagagaccgccggcttgcgcccatgccaagcctcgtacggtgtcatcccgttgagagccttggtgggcgagcggttgaggatgtaaaccgctgtcaccaccgcctctccccagaagacagctggcattcctctctgcttgaggagagtccgagccatccccacaaccgtctggttgcgccgcttgacgacgctgttctgctgcgggctgtacggcgcggagtagtggcgctgaacgccctcatccgcgcagtacgacgcgaactcagccgccgtgaattcgccgccgttgtcggtgcgcagcacgcgcagcttgcggccgcactccgcctccgcagcgacctgcacacgcctgatggcgttcgcagcctctcccttgctgccaaggatcatcacccacatgtagcgggagagatcgtcgacgagcagcaagaagtagcgtcgtcctcccggtgtggctggtgtcaccgggccacacaagtccccatgcacgagctcaagcctctccttggctcggaagcccgactgctggggaaaggggagccgtctctgctttgtcaacacgcagacatcgcagaattgctccacatggtcaaggcacggcaggcctcgtaccatctccttggcactgagccgcttcagggcctcgaagttaaggtgcccgaagcgctcgtgccactgccatgccccgtcgtctcgacgagcagcaagacagcaaggttgtgccaccttcacattgaggatgtatagccgatttggactcctgcgtaccttggcaagaaggcgatgagagggatcccaaatcctcatgactccgtgctcgacctccactcgcgaaccgttctcatccagctgtcccaagctgatgatagagttcctcatcgcggggatgtagtagactccggtgagcagcctgtgctcaccagacgcggcggtgaagacgactgagccggcgcccttgatctctacgccggaggcatccccaaacttgacggagcctcgaacgctagagtcaagctcggtgaagaactcccgtcggccggtcatgtgatgagtggcgccggtgtcgaggcaccatccttcgatcatgtctttgctggagccgtcgccgaggaaagcgcgtgctttcgactcatcaaggtggaggagtgccgctgcggccggtgccgctggagatggctcgatgcttgcatgtgccaggagcagggcctcctcctccgcctccgcctgtgcgacgttggcctggccacgtcgtggctgccgacagtccctggcccagtggccaagcttgccgcagttgtgacagccgtcgtctcgtgccggcttcttgttgccgacggcgccgccttgggcacctccacgggcaccaccctcagcatgtcctcgcgccccggcctgggcgcctccacgcgccttgtgcggcttgccgcgtttgcggcctcgtgtcgaggaggactcccccttcttcttgtcaccctggcaggcctcccactgctcccgagtgagatgtagcttcccgccgatagtgataggcccagagagagcatgtggttcgtcgccgtcgatcaccttgaggcgaccaatcgcctcttcgatcgtcatcatggagaggtctagcagagactcgatcgagcgagcaatctgcctatacttctcggggatgcaacggaagagcttctcaacagctctctcctcatcgtaggtgtcgtcgccgaactgcaccatcttctgcaacagagtgttgaggcggagagcaaagtcatcaacatcctcacctggcttgaaggccaggttctcccactccttgcgaagtgcctgcagtgtggtcttgcgggcacgatcgctgccgatgcgggtcgcagcgatggcgtcccaggcctccttggcagtccgcttctgagaaagcgaaaactgcatctcgggcgggattgcagcaatgagggcatccagcgcccgtcgatcctcgtggtagtaaacgtcatcgtaccgaactgcttcccacatgtggcgaacctggagccgtaccctcatcaccgcggcccactcgacgtagttggtcttggtgagggtaggccacccaccgccgggaccgatgtccctgacaatggcctgggccatgcggtgaccatggtaccgatccggggagggagaaccgcgccgcctgaagaggccgcgatctccgtcgactcggtcgccgccgccgggagcaccgccggcgcgtctacgcccgtctgggctgccgccgcgtgcgccctcacctagagcgtcgtcagcgcgtcagcgcctatttgggctgtcgccacgcgcgccctcatggggatgcgcggctgcccactgtgccgcctgctctcgcgctgcttccctcgccagcctgagctcttcgtcggtgttgtcgtcgacagaagcagagctgccagctctactgccgcgcagaacctcgagctctgttgccgccgcacgtgcagcatccgccgcctccgctgcttctacttccgctctcgccgctgccagttccgccgccgccaaccgtgctgccctcgccgctgtcgctgtagccgctgctgctgctcgctcgcgttcttgtgccgtggcaacctcggcctcctgctggcgccgcgcactcgaagtggccgagcgtagggacatggtgggctagtgaggggtcgctgcgtgtggaagaggctgtctcagacgaaaggctgctcgtctgagcaggggaggaaggaacagttggagctcttgctgccgactgagtgtggggagaggcgcgggaaggagatgagcaagagatgtttaggctgcaggatagtttggctctgataccaattgtaagtagagggactctaactctcatcaagaggatgacactatgagttggggcaattttctgtttatttcttcaaacactacacaatgtcatacccatctaagggttggagacccatatttatagccctagaggctgcactaccacaccttctcacacacactacacaacagaattgtcctctagatgctaaagagactacagaggacagtcaaaagcgaccgctgtcctctagatgctcaagactcattccatcatccatgtgatcccacgccgggtcgttgggaaagtaggagtcagcaagaacatgatccgtcaaggcataccgtttgagggtaagaagaagatggccgcaccaggttgcaaagttggtggaggacggctcgagggtcactggaaccaaagaacggatgttctgaacgccagcagcctgtaggtgcagattggcgacgacggtcgcctcatagccaccagagggctcgagcgtcggtgaagaaagagcgccagtgtacgggggcggcgccatctgcttggcagcggtgactgcctgctcctccagagcagcggcagtgacccgttccttctcaagaacagccgcagcagcctggacccgagcgcgtgctgcagcagcctgctgctcagcatcctgagcaatcttgatcatggcggcaatttgctgaaggaaagctgcttcatcgtcggacgtcgccatggtaggtgaggggagggtggagggaaaaaaggaacaaccactgctggagaggcaggggccagagaggcggaagacaggggctaggaacgtagaagctctgataccatattggaaaggagaatggggtagtattctatattgatagaggagaggaggccttacaatatataggcttacacaggtgacgcaccagggaagggtgcggcagcctggtgccaatcagaccaaacctaccaaagatagaaatcctcctttctatactagtacagcatatctgtctatctaaggaagaaacctctagttgccataaaagactatattgctatactagtctggatagaagagcctcacgcaggaggcaaccaagaacattaccaagactgtctaacatggatgatgagggcaaagcccgtgtagtgcggcaaacaattgaagagagttgttgctctgtcttctgcacccaagaaacaaaaatggaggcaatcacccctcattcttttcaaagacttgcccccaagagttttaccaaattcgtctttagtccctctagaggtgccttggggggtattttgattggttggaatgactccttgctccagggaacgtttcaggaggttaacgttaatcttttctccattacagtggattttatctctcgccttttcgcggatcactagaagttaacaactgtctatggtccttgtcatggccctggtcgtactgtttttatcatttggttgagctcccttgatatttcttcaacagataactgggtgctgattggggatttcaatttctatcgttcgattgctgatagaaataagccatgggggaatgttacagatatgaatacttttaactctatcattagtaggcttggtattatcgaaatcccccctcaaaggcagaagttttacttggagcaatatgctgtccgatcctctgttggtgtaattagattggtgtttcacctccattagttggacctctgcttttcccaacaccttgctagttcccttggcaaagaccacttctgatcatatcccttgtgttgcccaaattggtccttccattccgaaagctaatattttttgctccgagaactactagatggagttaccaggattttcagaggtggtttccaatgtttggaacagagaggtcagaacagtctcctgtgctgcaagaatagtcgccaaattcaaaaatgtcagatatgacctcaagaaatggagcaagtctacctccaacttgaatcgtttgacaacaaactgtaatgaggtcattttagtcattgataaattggaagaacaaagatccttgtttcttcaggaagagaatttgagatcaatcatcaagactcagatcgacaggctcctaaaatacaaaaaaacagctactggaggcagcgatacactgaaagatgggtcacccttgaggatgaatgcactaaatttttccatgctgctgcaacaaacaggtacaagcacaatgtcattgctactttagtctatgaggagggtattagcttctctgatcaggaaggaaaagttgcttgtctctaggtggcgttcaaggatcgtatggggatctctgatgaccccaccatggtcttcaaccttacagacctggttcaccctgttgaaggtttagaggatctcaccacgttgttctctacaaatgaaattgatagaattgtgcagaatatgcctgcggacaaggcgcctggccctgacggatttaatggcagattcttgaagtcctgttgggccatgatcaaggctaacttctacaagttatgtcaggacttctttgactgttctatcaaccttgaagggataaacacctcgttcattactatgacccccaaggtcagcaacccggttaccattagtgactacagacccatttccttcctcaacatagccatcaagttgatcaccaaactcttggccaacaaactgcaaccaaagatgtcgagtcttattcacataatcagtatgggttcatcaaacacagatctattcaagattgtttggcttggacttatgagtacattcatcaatctcagcagtccaaaaaagaaacagtggatttaaagctggattttgctaaagcctttgatacaatagagcacaatgttatcttgactatgcacaggcagcttggtttccctgataaatggatcaattgggttcagattattcttaattcaggatcctctgcagtcttattgaatggtgtcccgtggaaatttttttggtgcattaggggggtcaggcagggtgatcccctttcaccgctcctttttctcattgcggcggaccttcttcaatgcatcatcaacaaaaccgcaaatatgggcatcctctcggcctccattgaagcaccaccccttctgacttccctatcatccaatatgcaaacgataccctcatcatcatgaaggcttcgcagaggtagttgttctgcttaaaaagtattctgcattcgttctccatatcgacaggactcaagattaatttccacaaatcatgtcttttgccgatcaaccttgatgtcaccaaaaccactcaactggcggcagtgtttggatgtcaagttggcactttcccattcacttatttgcgtttgccaatgggcctcacgaggccgaaagtcaaggattatctccctctcatcaccaaagttgaaagaaggctcggtgcttattagtatatgtatatattaggatcaattagagattgattaacgatcagttgtaatcccctagataggctaatcatgctatcagttcctggttatctatagcaggaagacttactctggtcaactctactttctccgcgatgcccatctttgcaatgtgcaccctaaagctaccggcgacggtcattaatgctatcgaccgtatcagaagggattgtctctagctcggtaacagtgaaaatgcacatcgaaaccctctagttgcatgggacaaactgtgctgccctaggaatagagggggcttgagtgtcctcaatttgaagattcagaacacaaccctcttgctcaaatacattcacaaattctatggcagagaggatatcccatgggcaaatctaatttgaaccactcactattatgggggcagggtccctcatggctcccctgaaacaggttctttctggtggaaggatgttttctttttttctcgaacacgcaggagaactgcgcatcattatattaagtagagagaaggtctaaagaagaccaagaacaacagctatacaaaaaaaaggataaaagggggaaatcagaaaataaaggagaaaaaggaagaaaaagaaagaacaaacaaaaaagggggggaagtgaaccaagcctctaatttaaggccacagccttctcagagccttagcacctgccatctcccaaagcctggcatcctcctggatctgttgcagaactgtattcgagtttggggagacaccatcaaaaacacaagcatttctgtgcttccagatccaccaagccacgagaataaccaatgtgttgaaccctttcctgtgcaaagatggcacaagaccttcagccatactccaccaatcctggaaaattgacgtctccagccctggtgccacaagctgcagccccactttgcataagatctgccaccataaattcctggagaagacacaagagaccaagatgtgctgaattgtctcctgctgctgatcagatagaacgcatttcaccgggtggtcaagacctctatgagctagacggtctgctgtccagcatctattaagggaagcaagccaaatgaagaatttgcacttagggggcgcccaactcttccatatccttttacctggctcaaattccatagaaccagccaagaaacgttggtaggctgttttagcagagtactcccctgaagcacctggaagccaacggaaagcatcaggtactccaggttgcaaatgaatatcctgagttaaatcccaaattattaagaaatcaacaatcacttctgccggtaagctgccagagatgtcaccaacccaactgttgtccctgagagcttgctgaactgttttcctttttctcaatcgaattggaactctatttaacagggaaggggcaatttctgagatacattggccatgcaaccagcggtcagtccaaaacagtgtaccaacaccatcccccactatggagcaaactgaggctgagaacatggcagtaacattaggatggacttgtacatcaaactcagcccaaggcctgtctggttgagttttcttgagccacagccacctcagattcaaagcccaaccaagaatttcaagattgtgaattcccaaaccccccatacttaggggtttacagaccttattccaccccacaagacaatgaccacctcttacatctttttctgcccttccacaaaaaaccccttctgattttgtcgatagccttgaccacccatttagggcagggaatcgcaataaggtgataaatagggatggcagtgaggacagatctgacaggtgttaatcttccagcttggttcattaaagtggaaggatgttttcaggttggttgactatttcagaggccatgttgtgccttgggctagggatggcaggacaattcttctgttgcatgatgtttggaacaatatctcccctagattcacttttccttgtctcttttcttttgctaggaaaaaagattgttcaattcaagaattttttgccaacatggatctggaacacaacttccatactcctttatctcctcaggctgctcaggaatatcatgcttttcatgagcttgtcagaaaccttcagaattctagagttgataaagacaaatggacctatccgtggggcaactctgctttcagctcatccaagttctatagccttacttttcagtcaattcagcccctgctgcctttaactggatttgacagtctaaggttgggaagaaattcaagatttttgtatggctggtcttcaaagatagaattaactcaaagaacatcctcagaagaaagggttttctggcacctgacagcaacctggactgcattctgtgtgatctgcattgtgaggagacgacttatcatctgctgttttgatgtcctttcagtacagactactggagttatgtgggtttccattggaatcatgatcttgacttctcgatgattcaagatgccaaggacgcctttggccacagtttttcatggaaattctggccctggtggtatggtgcatttggaagcagagaaatgacttcatctttaggaatgaggcaccttcttttacttcttggtgacgctgctttaacgatttgttgaagttgcaaatgctgagatttaacccctcttaaagctagtttgctgtttttgctaaattcttgatagcttctttcctgtttttctttgtttccacctgtgattttttccttttcgaaaaagttttaataaaagcgtgctacaggggtttcccctatagccctttcccctaaaaacattgaatagaccatattgcccctacgatcatcttctcatgaatttttaaatcatttctttctgcaggtgtgcggttttgatcttctaaggtgcgac

SEQ ID NO: 1148 - DNA, 2094 bp, Zea mays
  Intron number 1 from transcript GRMZM2G107867_T01 (locus G RMZM2G107867) derived from phytozome v7.0 (chr-ID 1; pos 4 4367623 to 44369716)
tgacctgtcgagggccggcgaacccggtaagtaaggtaaccacgctgcttgctgttctcgtggatttcctcctggttcgcacggctctcctgcttcgattcttcggattcggaactgggggaataattgtcgggggattcgggggttggttttgagttgcggatcaaggtgggctcgctgtcgcatttccttggggagggcgaggatattgacggacggttagagcgaggcggtgttcgtctccacggacgcaacaccagcccaccaggtctgtaaggaagtgctctctagtgtcgttatctggattcttcccggctaggctctcatcgcttggttgcttccatgcgatctcttgcgtctatagtttctcagtcgattgaacgtacagtcgacctcactttcctcaatttttagcttttgaactgaacgcctatctgaccgagcgattccgatttatatatcccgtccgtttcttgtatagatgaaaccgtagtagctgattggtcactggagtgtgctctgcgtgcagattcacgtgttaatactaagcgttttgactcttgatactaggtactcatgcgaattaggtgctgccgttatcgatctatttgtctgaggtggccgggttacctctgctggttagggcttttgaaaggaattaaaccaacatgattccattgcttactaatctctttccagcaccaagggagctcttgctgtgttaatctactttttgcaccacctattaaatattgtggatgcaaggcctgaacatccatggacgagatccagtgagcactgagcaggcactataaaggttgtgctgtaatcgggaattctactttcctaggatggcttaagaggttttgtagttctagtagatgaaagccgggaaggagtaaatagaaagctagagttaccgcgtcagaccctagagtcaaaaggatttagaattagtaggaccaaagctgagtatatgagatgtgactttggtactacaattaatgaggatggagatgtaagcttgggagaccaggtagtactaaagaaggacaccttacattatttgggatcgatgctacaaagagatggtgatattgatgaagatgttagccataggatcaaagcggggtggatgaaatggcgtcaagcatcaggagtcctatgcgacaagagagtgccatagaagttgaaaggcaagttctacaggatggcgattaggcttgctatgttatatggggctgagtgttggcctactaagagacgacatatccaacaactaagtgtcgcagagatgcgtatgttgcgttggatatgtgagcacacaagattggacgagtgagaaacgataacatacgcgatcggctaggagcagtaccaattgaagaaaagcttattcaacaccggttgagataggttgagatggtttgaccatgtccaccgtagacccctagaggcaccggtgcacagaggcatcataagacaggacaataatgtgaagcgaggtagaggacgaccaaacttgacatgggaggagtcaatcaaaagtgacttgaaggaatggaatatctcaatggagttgtgtttgatagaagtgcttgaaaataagttatccacgtgcccgaaccatgattaggacttttcccttttagtgctttcaaaagctcttcctcctcccctttttctttctctttctctttttggtgacttcttgtgggttttaactctagcctaccccaacttgcttgagactaaaaggctacgttgatggttaatggttgatgggatggcttaggaggttttgtagaggacaaaggcctgcaaaggctttggtatggcttatgggaggatgcgatcgcataaatgcatgatggcattcctttttattcttaaatagaatggatttgagcatttacatagttttatatccgtaattaagttcaataatttatgttgtgggggcaattaggagcattgtacaccaagtatgatctatatttctaccgggtaatgaatcctgttaaaaataaagtatactgcactaattcttatacaacgaacataatatctgcttttattaatggcagagtgaaa

SEQ ID NO: 1149 - DNA, 2975 bp, Zea mays
  Intron number 2 from transcript GRMZM2G412470_T02 (locus G RMZM2G412470) derived from phytozome v7.0 (chr-ID 6; pos 6 319850 to 6322824 reverse strand)
gtcgcattccgggaaggccatcaaggtgaagaaaggtgaggtggcggagccccgatctgttcactcctgctatgtttagcgccttgattgcttgtttaggataggagtgtaggacaggagataggataagatggtttgtgtgactcgtgtgctgcatattattaatatgctgccttgtttgcattggtcagggcgcgatgccgatactggttgcagcgtcatatatgtaaattttttgcttacgttgctacggatgtaggtccagcagctccgttcatatagctctgcttgtttattaggaggatctatacttcttcgaggcgtctccttgctgcatatagctctggatttctagtgtcctgctagtttgtggctcgtgaaatggtggactcattattaacgcagagacgtagcattgatgcgaattgttgtgtagaaacattgatgtttttctagctggttttatatctgcccaacagaaactgttaagtatataagcactctgtttaaaatattctgtgctatatatacatgtttgttatgtagaactgtagaaggttggttgtgaatgcataatggttgttcattgtgcgggttgacttctagtctcagctgtcaataggggattagctggtggttgagccacataagggagtgatttagttggaccatgccatttgtatatttggcagtgtagtgatttctatcggaaggccaattcatttggggtatgtgcattctatcttcactcgccacccttttagctatttctgtcgccaacatactcttttgtcgtatttctgtgtaactatacaaactgtttcttggatcaaaatatgatacagtaaaattgacagtgcaaattgtgcccttggttctgatagccagctttcagttagttgaaccactgaattttcctgtgtgatggtatgatgtgaaccaccttgcacaatccagctgctaaatcaagggcgcactgaaagtagctcctgtgtgccatgtaggatgttttatacgtgatttgtttttattaagcacggctactacatttgtttttgcttatcaatcacctatcatctcgtttggcaaattgtgtcctgaactcctaattggggttctgtagagcattctttgacttgaacctaatcattcagaattgttccattcctttcagttggcaattttacctgatgatatttggactttgtctacgcatatgcagtgtttttaaggcgtcgcataggcgtccagacgctcggataattctaggcgccttgctcgcctaggcgccgcttaggcgttaaggtggtgatcatgtttatttgctcgccttactgccttaagaacactgcacataagtgtgtgcaacctgcatgtcgaaaagtgggctgagtggaaaatccatacctatcttatagcatgtgcttctattgcctttatttaattgtcaattcttgttgtcactgatcacaatattcatccttgatactgccagctatctatgcacattaaaacatggtctgcagtgctgttttggacttactttcaacctttcctttttttgtttagaaacttaggttataatgtaattttacatttttgtctttcagtcatggtttccttaatctgttttatattcacatggtgtattagggatatgtttagaagcatgtttgcttccaggtctaccatgaatgcataatatggttatatcttgtgcgaaagcaggatatgtatcaacataatttgctgttataaaataccacctgtcaggtgtactttggatgtccatgttcctttagctttattctgcttattgtagtccttgcaactcaagaaacaagaaaaggatccatctatgtgttagatctagtgttatggttgctagttcggtgagggattggagctgcttgtggaacagtacccgccaatgaacagtagatacgtagagggcattggagagggaggatcgatgcgcaggaacgccagggcctctgcccatggccgagcaagaggagggtttctcctatttcttgcctactttatttctcatccattgattacatagatagaccagctggccacccttatctagttagagatccttatttccttaaaacactcctaaaaactctcaacaaactactaactgatgaccttcctagataatctcaactaatcttcttatcctttgacctgcgcttcttgctgctgctccttgccgcagccccctttggccctgacatctagtttatcatattagggatggccatatgcagcctacatgtaacatttatagcatgcggccgactatttatgtagcctacatgtgatttccatgtgtgttgtgcaaagatatgaaatgcaagtgtgcaatgcgtactttggactatactactttgaaaactcatgtgccttctgacactgttgcatgctatggagtgtcggttgtttagttcttgcgagtattttattttatgcatgacattgttgactaactacttatgatctaaggcaacacatagatgggattaggcccgatttgatgacaatagctttgtaaaagcatctccaaaagcctttctaaattttactatctaaattttagagtcatttgtataaaaatcactttctatatcttttcaatctccaacagcttttctatatcttgtttatactttagagagtcattcacgttttctatatttggctagcgagaaacccggaatagaagatggctgtatttggataaccatttagacaagctgttggaaggtatttttctaaaaaaatctctattattagatattagaaagaatatatagagtctcttggagttgctctaaatactattgtgagttgtacttgtacctaagattagtactaccatgttttatactttccaagatagaaaaatgtgaaatatatctatggtctacagtattctaattgacttgctgaggtttctgttgcag

SEQ ID NO: 1150 - DNA, 348 bp, Zea mays
  Intron number 4 from transcript GRMZM2G065641_T02 (locus G RMZM2G065641) derived from phytozome v7.0 (chr-ID 9; pos 9 6947329 to 96947676 reverse strand)
cagaaacaatcattctggtgtgcattttatttctatgtataattataaatgacttgtctcatcaattcatcatgattcaggtaataactgaagagctaggaatgaaccttgagaaatgttgagcctcacatgctgggttcatgcaaaaaggtatagtagatgatttaaaaggatttttctcttgatttggattgcagcaaccttcagccttaagtcacagtattctaacattaaggtgctttgaatactaaaacattaaggtctatgttttgtgctttgaataccaagaattccttattattttttcttgcaggttaacattaaggtgcaggtaacataaatcttaca

SEQ ID NO: 1151 - DNA, 7379 bp, Zea mays
  Intron number 12 from transcript GRMZM5G883741_T02 (locus GRMZM5G883741) derived from phytozome v7.0 (chr-ID 5; pos 193188945 to 193196323)
agtctgcctggtcagaacttgtggtttctctgaaggtagtgttggcatatgattctcagtaacaatttctcttatgattagctgtgttcagaaagatcaaatggtacagatagttgcagtgcaaaacatacactagtctaacggtctgcttattctacgcaactctcctttatagctgaaggtgtaggccatcttatctgcaaggactattgtttccttttatgaatttttgtagcatccttggatgtagtatcactgaatcatccttaattccttattcacattttactatcttatttcgcatgtttttactcgtcatttgagtttttgacataaatttggaggtctctgtgcttaatttgggtggcatgcataattactaaatgtcaatcataaagatgttataaatgcataagaaaactcaaggtgtgtcatttttcatgttgtaaaaatcattcatctgaagggcaggcctggtacagtggtgagagctgtctcactgagtcaacgggtcatgggttcgaagcagcctctctatatttgctggggggaaggcttgtctcagtttattccttccctagaccccattcatgtgcgagcctccggcactgggtctgtccttttaaaaaaacattcatctgatatctttcaactcgcttttcatgagtactcaaagttctacttctaccaaagagccttaacaaaaatcattctgttcttggttcagacttgcagtccacgttttgatgtaatagttggattttgtttcctgtagaactgttttctctaaatatatgtttcctacacaatttatctttgaaactttgataaaagatatggtttttttctcgaatacgcgggagagttgcgtatcaattttcaattcgttatttttatcggaaacgttggagagctgcgtatcattataataagaagaaaaggtgaggtaaaaagagaaacctcatacaactccacaccacccacacacactagaaaatatgtaggattacaaaattataaacagctagacccgtgaccgtggagaccctaaaacaagggtcaccggttggtacgctggagcgcaaggatgctagatcatccaatggctccagccctacaccaaaagtgagactcctccttgacccaattgatgaccatgcttggactaggttgcacaccattgaaaatacagtgattgcggtgattccagatggcccaagctccaagaatgatcaaagaattcaggcccttgtgcaaccccttatttgttgttgctgcagcccatttcttctaattcttttcagcaccggatctcgctctatgcagacgacgtggctctcttcctaaaaccagagcctagggacttaaacactgctgtgaggattttggatctgtttggggatgcttcaggattgagaactaatatggcaaagagcagtattgtacccatccgttgcacacatgctgatttgaatttggtccagcagctccttccctgcagatttgagacttttccaattaaatacttgggtctccctctctccctgaagaagttatccaaagctcagcttcagcctcttattgacaaggtagctgatctcttaccggcttggaaagctgacctgatgacccgtgctggcagagctacccaggtgcaatttgtgctcactgctactgttatttatcaaatgatggctctggatttgcctaagtgggctattaaagcaattgataaaatccgtcgtgggttcttgtggcgagggcgtaaagaggctaatggtggtcattgtatggtggcctggggcaaggtcacacgcccaaaagagttaggggggcttggtatttctgatctccaatgcttaaatagggcccttcgtgttagatggatttggctccaaaaaactgattcttccaaaccttggactgatttcccattccattcaaaccggttcttggatagcttgtgctctttggcaatggcctccatagtgggtgatgggcagtccactcttttttggcatgacagatggatcctgggtcagaggattgcagacttggcccctcatgtttttagtttggttcctaaaaggctggtgaagcgaaggacagtggctgatgctctgtgtagctcatcatggattggggatttaaggggagtggtatcttgggaggtcattgctgacttcattttgctggcagatgttgtggctgatgttgatcttcaaccgggagttccagataaacattattggaggttctcttccaatggtatctattcggccaaatctgcttatgagataatgttctctggttctacctccatggcgggctttgagagagtgtggagcacctgggcgccgccgaagtgtcagttttttctttggctggtcctacataataaatgttggacggctgaccggctcgctaagaggggtcttccccatcctagttcttgccccttatgtgaccaggaaggagagtctattcatcacttgcttgtttcttgtgtcctcgcgaggcaattttggtatcttcttctccagcgggtcgacctgtccgcactctcccccgggatggaagatatcaattttgaagcttggtggagtagatcggctgaggttactcctaaggaccttagagatggccttaactctttggtggttcttggggcttggactatctggagacaccgtaatgactgtgttttcaatggtgctcagccttctatagctagattgcttacctcagccagtgatgagttcaatatgtggtgttttgcgggggccaaaggcttgacccgtctttcggacctagcttttgtgttcaacaccggttagaagggggttattattactagtgttgtttgtgtgtgtgtttgtgggagtggtgtttaggtcattgtagttatcatccttcttttaatgaaatgatacgcagctctcctgcgtgttcgaggaaaaaaaaacccttatttgttggatcaacaggaactgtggtaactccttcccaccaatcctcaaaggaagaattcacatggctgggagcaagatgctgcaacccgacagatttcataatttgaaaccaaacttcccatgagaaaacacaggagactaacaaatggtttagggtctcttcctgatcacatagcagagtagcagacatatttgagagtaaggcagccccttctttgccagacggtcagctgtccagcagggatcgtgagccacaagccacatgaagcacttgcatttttcaggtgcccaacttttccaaatcctctcccaaggtttaaaagttgttgctccaaggaagaaaccgacatatgccgatttgaccgagtaaatacctgagcttgatagcagccagatatgcttatcctcctcctgatccgggtgtggggcctagtctgtagtgaggtcccaaactttgagaaaatcagacaaaacacttacagtgatagctcctctgatgtcattcacccagttccttaatgtgagagcatcgtagacactcctatttttggccctagaggagaccaacttgaccagatgaggggccagctgacttagactttgtccatcaatccatttatctgtccaaaacatggtgttcctactgttgcccaccaccgaagagactgttgcagagaaggccttaacagaaggatgagcgtttattttaaagaatgcccaaggccggccaggttctgttttttgcagccagagccaacgcaatctaagggcccaactcaacttctgcaggttggatatgcccaatcctccaaattcttttggtctagtaacctttttccaagccaccaaacaatgccctcccatagcatcttttcttcctctccactggaaacttcttctgattttgtcaattgacttaatagccctagaaggaaggtccatgtccataactaagtaaacagtcattgaagtaaaaacagcctggacaagaatcaatcttccagctctggtcaacagatcggctttccaactgggtagacgatttgcaatcttatcaatgaacggttggagatgctgtttaccaagctttgtcaaggatagaggcacccccaagtatttgcaggggaagttggcaacaacacattgcagcaagttgtgaatggtatttaaattttcagcacagtggatgaggaaaatgctgctctttgccatatttgttttaagcccagatgcctcaccaaaaatcctgataatgtccatggtgatcccaatattagatgccacagggtggagaaagacaccacatcatcagcataaagagatatacggttgtgatctgaattttctgttagaggctccaacaatacatcatcagctgccttctttattaagtagaacaatacatccataaccaatatgaacaacattagggagagagggtctcccggcctaagaccccttctatggagaatgtcaattcattaatagaagaggagctcacacccacccactaggaacagaactgtaataacatttgtgcatgttacagcacatagaacgatcctaacacaacaactaaaaaaggtctgtcgtagcctccagaagttgcaaatccttggcccctgctgcactcaggcgtggaggcttgccatcaggggcaagagctactagacccattcggttaagaaaaaagaaccagaattgacgcgaaaagacataggagacaagaacgtgatctagcgtttcacgttcttggtcacacaacacacaagcttcagtgtgtggcagattcctcctttcaaatcgatcagatgtgagatgtccaacacctattgtgggcaaccgaccacatgaaggcacatttaagcggcatccacgatttccagatacactcccatggttcaaaaaacaacgaccctgcatgagagcatcatatgctgaacttgttgaatattgccccgacggagagaggcaccaccaaaaatgtccatccgacacccctggctgaatttgcaccacctgtatagcctcccacacactaaggaactcttgcaaactctgccaagaaacaagtccgtggatatcttggacccatagtctaacttaagggagacatcatggctgccatgaaaaaggcctgaagattccccattgaccagcccattggccgggaggaccggcgacgcaggctgcggtgcctgctgtggctagtagggcgccttggggcgtggaagtgtcggagcatgtggacccaactacatgtggatggtaccggtccacatgtcctggtaggtgtagccgacgggaggatagcgcccagtgttgttggcaccgccccatgaagcacctgtgcaccataggaggaagagttggtgtccttttttgtagcgcttgacatgtggttgctgctgtggaggtcgttgaggctgctgttataggggcttggccagtggtttggagccaccagcgccaccccaagaggttgcagcctaaggagccttagccatggtgagctcctcgaggcgcaggtcacccccaaagacctacaagaatgagggaagtgggctggtgcggctaaggtggagtccatgagcgttgaaacactcgttaagcctgcttatatgatgttgaggacgagtgtctcctcggtgataggttggccaaggtcctgggggtcctccgccatgcgcttgagcgacgacaatagtcgatgacggacatgttgccctaggagaaagctcgaaactcgtggtcggcatatagtgcgagtggtgcggttcttaaggaattgggattcgatggcgagctagatcacgccgccggaggtgccactcacggagacggtgtcgacgaggtcgtcggagatggcaccaagaagccatgtgtggatgagacaattcatccgcacccaggaaggagatgctggggcaacggtgttggagagaacgtgtggttctagcgagcacttgtcgaggacatcgaggaaagactctttccaacgggtgtagaaggtggagttgaggtcgaggacgagtgggaccagagaatagatgttctggacagagaccacctacgcgtgtaggttgagaagagttggaggcctcctgctaaagtagcacatccgcaaaggagtgtccgccttcatctgaggcggcggtgtcggtcgcaccatcgggagcgagatcctcgagtcgaagtggtgctggcatggcccgctcgcgggctgtgcgttcttgagcggcatgaatgcgcgcggaggccgcctcgttctccttatggatgatggcaacttcacagtcggcctcgacggtatgcgccaaggcggtgttgtgggcctcttgttctgtgtgcgtgctcctccgcgtggcgatgggcatcagcaccaccgccggtggcggagggagagatcttggcagcgacgtcgtcgatgacggaggaaggcgtagggccggcgggcgtgcaaaggcagcatcggcggacagcgcacagtcatgctaggagtggcgccggtggagagggcgcgctaacaattgcgcagacagcggaaaaaatgaaaacctagagttgtgataccatgaaagagattgaatctgtttggaataatagattgattattgagagatacaaaggctacaatatatagcggtgagatcttgggcaaaagatcttgcgcgtttgagaaaaaaaagatcttgggcaaaaggaaacccacaatcaagatctcctcagggaaggaaaccaataatcaagggatcccctcaggactctaccatatatctctctacaataccaaataggggatgggcggctatagagccaagcgcggccctgctacatggtatgtccggctaaggagtcaggcacaggacctctgcacacaataatatatcaattgtctaacaaaaagtaatccactaagaggaactaggtggctttaaactagaccaacctatggattgacatccaaatttgtcttgctgagacttaatctaggcggtttaggcgtgcacccatatcctcaaccacccgagctgggctcagctttcttctatgcactactttgatccctggtcgttactgttacttgaggtggttttgatttgtttgggtgtggtcgtgttcttttgctcctggtgcatttgcaatcttctgacctgtgaggggcgtgttgtttgtattacattcttcttaatgcaatgatgtgcatttctcccgtgtatttgagaaaaaagtataaataagatgggaaataagatacctttttttgttatctttccaaaaagttttttttttcctgagaaacggaatagctgtattatgtattattttgttttgcaactccaactgacttaactttcttggcatgtggcagtcagaatatccgaagtacacacctttgctttctaa

SEQ ID NO: 1152 - DNA, 7930 bp, Zea mays
  Intron number 2 from transcript GRMZM2G110244_T02 (locus G RMZM2G110244) derived from phytozome v7.0 (chr-ID 4; pos 1 59736113 to 159744042 reverse strand)
ctccaactactctgtctcctggagacgtggtttgggtgagggcgccacttcttgaaggcaaggctttgcttataatcttgaggaagatggctacaacataactgtggctctagaatcacgccatggtgatgctaccttctctaggctatttggagaaaagtgtgcgaattgaccaaatttaagattcgctgattctctttcatataaggtattgaaattctgtcacggaactaaagtgtatctgctcttatcagtcagtgtttaagatcgttttgaaacttgccagtgatatgataataatcttatgtaaatgtttgtagtatactatatcatggaggtggcggcgtcctgggcgccggcgaggataggggcgggcgggggaagccgcgtcgctagtttcctggaggaggggtaggcgtagcctgagggaggccaatcgctggccatggagtgggcgacaacggctggtgagaggagagagagaaagagaggaaacctaaacctagctagatactatgatagtgggcctaaaaccctatccctaaccagggttggaagatatatttacaataggagcagttgggtctaagcccattacacaaatacaacccattacgatactcattacatagattacatagaggctctaactgttgagaacaacgttaccacggatcaccagatccgctcccttccctcccgtcagcagtagaggcgcgagaagctgtagagaacccgtctcccttcccagaagtacggcagagtaacacacgagacacatgatatagggttggacctctggtctctttcttttctctgtattatgaggggtgtacaggttccttatatagagatgtgagacccctcagggacaaagcaggtatttgcccacataaccctaactagggttacttaacactcccccttgagcgaataccgcgaccaacacatgcctcgttaaaactccgaaaaacccagtgggaaaatgtggggaaagagtgtatggtgatacaaattgcatttgcactttgttgcctcgttaaaaacctcatgtgagaaacttcaagaaaactcacaaagggaaaaaagagtacaacagttgtcatcaggacagatttcgatcctctgggatctagattctatcgaatcttctacaagggctaactttagaaatatgctccccctgatccttgcaaaaccgtatcaataaggcaaaacatcttctagaagtatatgcacataaagatttagaaaacggattgcatatccttgcaaggactatttcaggaattttacctctactcacttctaggatatacgaggtaagtgcacgtatcaatataaataagccactttgactgatggtgtttgatcgactggatctatatatttgataaaaagttctataaaggttcacatattgatcatcaagctcacgccttcagggcatagaatatgacatttattgtctcacggttgtgatcaatataagcattcgctccccctgacgatgacatctgtcaaagtcgttatccctcattactcaagcatattcttcaagatatatgtctcattgttcatctggaataacgagaatggatgaggttggggtgctatcattttctatcttacaccacaatttatacataattgtgcaaagcaaataacatgtccttcaataggacttaggggataatatagttgcaatagtacatattctaaatatgacacatcgctccaggcgttcatccatcgcaacatctatgatggtgtaacaaaagtccatcaaagatcgtaatccatcagagatttttcatcgatcagatacatcgttatagtctgtcattctggcgcaatggggatattttgccagtaacacctaaaccttataggtttctgccatcgtggctttagaggataccgcaattccacatctagtggaaattaccatgagtaaaactcatggaatgcacatgtgcttattcggtgaacttcaagtcctttggtacctcatcttattccttttcgggtatgtatgggtctttatccctttataggggttatcaaactttagtgttcaacacagactttgtttcttctggaaagattccatctggaaactataatctcaactaggagatattctccctacacaggagagtgatcattcatcaggaatatattattcgatatgagatttatatgttgcatatttataaatcaaagatatgaatcctcataggatctcatgatggatcttcagaatcttattaactgcatattttaattcatgccatttgccagatattttacatagcggaacagtgtttattcaacacatatgtgggatgggtctctcacaagaccacttgaaccatcgcattcaccacacattatttcaatagtgctcataaatgtccgaacttcaagctcgcgactttcattttgcgattcttggttcagcctcgattgcatttatcaatgacccgataagagagcttaaagcactcatgcctaggactttgttttggatccatttgcaatctagagaggcaatataggtgtcgacatatttgtctcccacatttaataatgatctccgttatttcccaaaacgaaagattcattgttccgtattcccagcacaatgatattgcgcgcattgctaggaatttcatcatcaagatgaacctcttcgtgaggcaaatcaccatcagggtgaattaatcggaggagagttatcacagaccatgtgaatctgcaatcagaacatatgctttgactaaggttgatggatcatattcgcaggcgtccccgagaatagatcaaatgccgataagtcaaatatggatatgatattaatcccgggtatatccacatcatatctacatcaggtagaagcattcagaccaatatggttactcctttaatgattttctggcaaactccatatacacaggagtacacaccgaacgacaggttcagtttgcctttatgtgcgtttaatagaaatatttgaggcattacactatatgggcatttcctccccctaatgccgagatgttttaaaaagcatacagataaaatccccaacccacaatcatcccattggggggcaatgtatgctattgtggtgatttatttgggaaatcttacgcacattacagatagggttttatgcagaaaaaaaaaaaaaattagattaatgtagtggcataaatactacatattttgtccttcaacatgaagggttagtctcaacatccagcgagacacgcaacaacaagttgcttcatggttacaattctgcaaacttattgttattactaccaaatgcatagtcaatcattaagatttagactgatatgtgcaacactattttatccataagggtccttcaggggctcatgcataccatttgtttggagccattagttgacttcagatcgacaagtaaaatgaccatcagggtctaatgctcacaaagacattcactggttgcattttgcttttaagcacataggaaaaatgtgtgtgtttatattggtagtgaagtgcacggcatcaggccaatgctgccaagcaaagatttttatatgcagagatgtatagtccagctcgtttttatcactgcccatggtttacccaattactcatactgctctgaaattgggtatcgatttatgcaacatttttatgtataataattttgagagagaacttataacaatagttaattatttgtggtgttgccagcaaggcaaacatttctcctcatattatatagcaaattgttctatatagcattatttcgatctcttcattgttcagcaaaaagagaagctttggaatagaacagacaagaccaagaattcattttatctgggaaaatcaccatataactatcttttgatgaagaaattgatgataactgcttggcaagaacgaaacaatactggtatccgcctaggatccatcttcaacaacagatattactgctctcatccgaagaaatcatcaggagtagagaggatacaacaggtctctacaagatcttcatatttctatcacaaattatcatcactagtagtctagaggtctagacatatgacttttctggctccgaggaccaaggacatgttaatgtctaatttagcttcaagctctgttgtgatgtgggatttcatagttatttgtctactcttctcacttctgatagatcggaggtagataatggtaagcatgccaaagagtggaattcaatgtagttcggctacataaaccccatgtatgtgtccattcagaatcgacctttaccatttagcttacagtgtataccaaacttgtcaaaggactatcccgagtcaattcagtgactataagtatttacaattccgagagatgtatgcgacacaagcatagaggtcctagataggacgatgcaacacaaacatcgtgaaaaaattctcagaattacctttcgatgtactcgcaacatcgtgttgctagcggttacatgtccttttatctcatagtttgctttatgtcatccagcgacaaagagaacaatgtgctaacatctggttgagcaatgtatgactgagatttctgatcttaaatcatttggtaagttcttttttgcttactaatataatcccaatttgtgatatcttctatgccaaaaaggctttcatgcattatattatatatcttcgggttacttcgggtaaaactttatgcatgaggagagagttgagaattaacttatccatgttctgttgtatttcaatttaacttcccagatttccaagcactatagagcttgatatagttgttaaggccacttggcaatatatataaatatatgataccacacaacacaatcaaacaaaatatagagcgaaaaaaattgtttaagaaggttgcgcgacaaagtaaccttaggggctcagataacccaccacattctacgcgagtacaagctccagcgtaactggtgtcaatgcgtgtgcggccatcagggctacgacaacacagtaagccctcgtaacaagcgcaacaggcgcatatatggcttgatagtcggggtacacgaaatgtccacacaacgtgcgcaacaggcgcatttgtgtctcgatgatcacgatagacgaatagtgccaacagggcatgcaaaaaatatgcgactccacgatggcggtttgactcaacgggagctgtccgattaaacagagtgctacatagcaatcacaatgacgcagccaagttcgtacgacacaaatattgcgtcgtgttgccagggcgcagccaatggcaaaactcagccgtttaataatttagcctgatcggcatgttcgggtacccacgataaaatttaatcgctcggcgtgagttcaaaagctcaacgcagcacaaatatttagagcgatttgagtatacacaatataaccttcacatgcattttaataattttctgctaattatttactacgggaaataattattaatgcagaaaaaatgaacaccataattaatatatgaacataacacatcaggtgtaaaagacatttctccatatttaagcatgcattttctaccaattatttactacgggaaataattaatcaaagtagaaattgcaacataaacatgcttcattctatttattatttgcagcataaaataaatagaataaatcatatggaggatgcatataaattaaaattcgtctgatttaattcaacgagaattaataggaaaaatggtatgccttttttttctagccgtatgcactcatgcgccatcacgtgtggaagacgaccaccaactaccagatccatatttttagcagcttgtttgactgggcattttttaaccgcacaactatgctttttagctacattttttctaataaatgaataagtgactaaataaataatgtacacatgcatgggtccatgcacatgcgcgttttttatctcaaccatgcagcccttgcacgaactcgtcatcgcaggccagcatgcagtgtgatccgttatctacggactacagttgctggacgcggtcaacaacgagagtctgttgagatctgtaggaactgggtaatgcagtctcctgtgatggtggtcgacacaacgccaaattttctagatgaacagttaccacgagcattagatccaatctactaacaaaaaaaatcataccgttcgattgtgtatacggggaatcgaagcctgtcgcgtaggacagttcggctaggccgagggacctgccgacttgacggtgagttgatgcagatctgatcccgcagcaacgtcgaggtagagcgtgctgataacgtgttgagaacaacgttaccacggatcaccagatccgctcccttccctcccgtcagcagtagaggcgcgagaagctgtagagaacccatctcccttcccagaagtacggcagagtaacacacgagacacatgatatagggttgggcctctggcctctttcttttctctgtattatgaggggtgtacaggttccttatatagagatgtgagacccctcaggggcaaagcaggtatttgcccacataaccctaactagggttacttaacactaacaatcgcctctacaactttgtcctatatggtttctgtaggccactttaaatttagtggtccgttgagctttaagaaagtaggttgttagcttgatctgctatgtttctagtaatatctgttaaaagcatccaatttttacgctgaagattgaacaaacgctgcatattagtttcatttatgctcatcctcaatattcttgataggcatctttaagtttttaatcatgagtttcatgagctaatctaccttcatgatatcctagaaaaggtgccctttgagttttgtgtggtcagtatgtttgagcttgggaggtttgccaaatattctgaattttgagattatgcattaacaatgatacagctaaattactcctcaaaagtaatttaaaaatgttataattttctaagctgcgtaaatatatcaggataaaaattcgtgtcaaagttatatcttgggcgtatagctgtccagaacaacactttcatgttactgtatgtagttatttgtaccctgacaatgtattcacagatatgtaaacagtttgtttgttttactttttagttaaagttgtttggctactatgcactccctctaggttcaaattataagtcgtttaggtcaatgacatggtctccaaaatataatattggtcagtgttttttaaatacaaattaattcttaattcttaatacatttatacttttgtaaaagtactttttaaaacaaattagtacatatgactattaggtttcaaaactaaataacaaaacggttatttgtagtcaaattttacaagtttgactgaaaccttgtctaaaacgacttataatttagatctgaagggagtatgtcattgaggatagagtctaagtgttgaagattacaagatcctttactcaaacgtctttatgaatccagaatcctgtcagttttactctacttggattatttagctcatgttgttataaatttattcagataggcatgggcatgtagttgagcttaatctctgctgaatttccaagaaaatttgttatacatcacatttgtatattggagataattgtttgcatgaaaaaaatattatgtatgaaagaaacagttggatcgaaactgtctctgaacaaacccaaagtctcttcattcttgttctcttatttatttgaagcccgcgtgtttttcttgaggatttttttaatcacgactgcactttatgttgctagctggcctgaatccttgaacaaatacagacatgtcaatcggatctttcgttgatttcaggctacttggataacacggtgcccgctgctcttact

SEQ ID NO: 1153 - DNA, 5478 bp, Zea mays
  Intron number 1 from transcript AC189766.3_FGT001 (locus A C189766.3_FG001) derived from phytozome v7.0 (chr-ID 8; po s 175682910 to 175688387)
tgactgctgctcaagatagtcaggaggcttgtagtttaccaccagattctcaaccaaacagcactaacagcttgcagttacaaaacttcatcgcaaatataactatgccaccagtactccctctgattcaaacccctccacacaacaagtcagccaacatagcaaatgctctaggggttttgtcccagcagcatactaagatgcctaatcaggtccccacctccggcaagcgctatagtgtcagattggctgcaaagaaaaaattatcgttggggcgttctagagattcaatagccaaagctcaagatattctaattgctaaactatataattcaacaatgaaaaataatcagggctctctggcttcttgctcaactaatgaagtcaatcattttgaacagattgcaaggctttttgcaaggcctcttaccaaggttcagatggaggaaatcatggagctggccaaccaaggaaaaggaaggaaaaccaacaacaagaaggggtgtaaggtggcgcccttcgtagcgccggtcactctgccggctatggaagcctgagtgttgttatcctgtctgtaatggtggagatggtttgctgatgttacagcagtcggttcttttggtggtccttttggctgtattgttgtcagtagagggagttttagagtctagccgctggctcttgcttccagggcaaccatggcagctctgtcgtcctgccttcagtgtagggtactgcgtctttctccaagtgcgctctcttttgttgtcatggatgagggtggttcagctgcaccctatgttagtcctctcagatgttttaaattcctcaagtagtagtggcatgttgtttaatgtgttccaattgcactgttttctcctggaatgttaggggcttaaataaccctgctaaacgagcaagtgtgagacaaactattagttccacaggtgcaactattgtttgtctacaagaaacaaaaatcatgaactggaccaatgatcttctcaaagaaacggtgggttccaaactagtgaaacaagtggttcatctaccttcccagggtgcctctggtggaatcatcatcgcctctgatgcagatttttttgatatggctcttttgcattgctcatcaccttattcgatttcggttagaatcatctcaaaattggaggatgaggtttgggacctcactggagtttatggtcctcagcaagaaaatgagaaaatggatttccttaatgaacttcgtaatattcacaatttggtgggaccggaatggataattttaggggacttcaacatgataaggagagcacgtgaaaaaaataaagggttaattaacagaagaattatgagtcttttcaataagacaattgatgacctgcagctattagagcttgatctcaatggtagagctttcacatggtcaaatgaacagaatgaacctacaatgacgaggattgacagatttcttgcgacaacagagtggcatcaattattcccctcggcggaccttcaggccattggcacaatgacctcggatcactgtccgctaattatgcaaggtcgttcttccttcccattctttaggggttttagatttgagtcgttctggacaaaaatcaatggatttaaggaggttgtgcaacacgcttggagcgctggtgtcaattctgctaatgcgattcttgtgctccatgtgaagatgcagcgcacagccaaggctctaagcgcgtggagaagaaaatcagtcggtggtgtcagtgtgcaattggcaatcattcagattgtgctaacccttctggagaaggctcaggaagctaggcagctcaccagtgatgaattggaattcaggaaatggcttaaatccaaaattcttggtctagcttgcattcaaaaatcaattgcaagacaacattccaggctcacctggatgcgtctgggggatgctaataacaaattcttccatttgatggccaacaatagaagacgaaaaaataatatcatatctctagttcatggtgattcaatcttgaccagccaacgagataaaatgcatgaggctcatcatcactttaatgcagtgcttggaacaagtggagtgagacagagggctgttcgttgggataatttgggttgtttgccatttgatctatccgagttagacaatgtgatagaggataatgagatcaagaaggtggttatggggttgcaatctgaaaaggcgccaggaccggatggcttcattgggctgctctattgatgctgcttcgacgtgattaaagacgacctttccaaagcaattaacgacttttatcacctaaaatgcaggagcttgcacctagtcaatgaggcaaacatcattcttcttcccaaaagagaggtctctgacacaatagacaaatttagacctatcagtcttatcaatagcttcatgaaaatcataacaaaaattctggcaaacaggcttgcaccgcgaatgaacgagatcgtatctactgctcagaacgccttcattcagaaacgatcaattcacgataacttcctatatgttcaaagggtgatcaggaaacttcataaaaacagccagtcggctctgtttgttaagcttgatgtatccaaagctttcgattccctaaattgggcttaccttctcgatgtgctaaaagcccggggattcccccaaaggtggcgtaattggatcgccgcaattcttggttcttctacctccagagtcaccatcaatggtcaacaatcagacaagatttaccacaggcgtggtgtgaggcaaggggaccccctttccccttttctattcatattagcaatggatcctcttcagaggatgattgagagggcagctgaggctgggttactggggcgggtcctgccaagaggggcaaagcttcgatgttccctatacgcagacgatgcaggggtgtttattagagcagataaagaagatctcaaagttctaaaatcgattctagagactttcgaagggtgttcagggctgaagataaactttgataaaacagaaatttttccgattcactacccggaggagctgtggccaaatcttgtagaagtcttccccagtaaaatcgctaagttacccgggaaatacctgggtctcctccttcacttcagaaccgctaaaagaattgagctacaacctttagttgataaaatcaataaaaggctcgcaggatggaaaggaaggcttctctcaaaggcaggtagagagacattagttaaatctgtgttatccgcgcaacctatttatcatctgacggtcttcccggctcaaaaatggctattgaaaaaaaatgataagataagaagaagtttcctctggaaaggaagtaatcctgaatcatgcaactggggtcactgtctgatcaactggtctactacttgtttaccaaagtgcaaagggggattgggcattctagacctgaatcgttttgcgagggctttaagactaagatggctgtggtttcgatggaaggccaaagacaaagcatgggtgaatttgcaactgccatgtgatgaatccgatgaagatcttttcaacgcttccacttgtgtgaatgtgggtaatgggaaaactgctgtattctggaaatctagttggatccatggtcaagcaccaaaaaacattgcaccaagtctttttaacaaagcaaaaaggaagaacatttcgactttccaggccctgagaaacaaccgttggatccagttatgctctccctacgatggtgcagaagaattcaaggaattgctcggcctttggcaggccatcaatagtacacacgagctcaacgatctagaagactccatttcttggagatggacagaagatggtgagtacattgcaagcagcgcttataagatccaatttgcagcaaattattgcacaatgaaaattgaccccatttggaaagcaaaaactgaacctaagtgccatttttttgcatggactcttttgcataataaagtgctgactgctgacaaccttcagaaaagacattggcagtgcaacccagtttgctgtctttgtaactcagcactagagacggtaacccatttatgcaaagattgccctttcagtagagaggtgtggaacaaaattttgatatgggggaactgttctttcctgggaggaaaccagacatcgaagtcgttgtatgattggtggaggaatctaagaggtctctgtaataggcaatctaggaaaaaattcgatgggcttctgatctacttttggtgaagcttatggttagaaagaaacaacaggatcttcagaaatcagcagaagaattcagatcaggtcgcttatttagtgagagagattgttggcgctctagtgggttagttttgggcctagtggctttggagttgtttttttaatcttagtagacagtcgagttttgctcttcttgtttcttcccaccccccctctctctttttcgtcttcgtgtgtgtcttgtaagtgttttctcctgctctaatatattggaccggcaaatcttttgtccgtacctttcaaaaaaaagtagttcccatgttaccatttcttatattatatcatactacttagctgtaagcattaatactttcctattcaatgccagtaaataacctaactatatcttttaaggtatgtaaacatccacttttagtgacactaacaaaaatatataataacaattagtgtttttacatataaatgtattttatcataatggttctgtatcaaaatagtttatgcacatgcaaatgcttcaatgccccatttaggttgcttgtttcaggtgcacaaaaatcgttaatggacatatgatgtatgacatgtactaccccgtgtcctcaggcgatctacaggagtttggcgatggagcaaaaaaaaacatgccggacatattaatgtgcgtgaggcggatgccgacgaggctgccctataaacaacaatatctctttgttcagtgaagggaacgagagtagaattgagcctgatctcgcgcaccccaagaaagatgtgaggaagaaggccatcatgacactgcacctgttctaccagcgattctccctgctctatctcccacctcgtctccaacttctacaaggtccacactttcccccttcatattttggttctcaataaatccatgtttctataccctacagacatttctgttggagatgaatggtagtatgcatttagaaatgtccattttcacatgccttgtagtttagtatgtcactctagataccacagattacagctttggaccgaatatgcctggactttcaaagatggaattatttgcaacaatacatttttactttggttcttaaattcttgctagctagatagaataacttttcttaccttaatctctacatggagcagtgagggtcttaatatttttggttctttctgtgccgaggctctgtgctaatgatctaggggtg

SEQ ID NO: 1154 - DNA, 6702 bp, Zea mays
  Intron number 3 from transcript GRMZM2G034453_T01 (locus G RMZM2G034453) derived from phytozome v7.0 (chr-ID 3; pos 1 33490440 to 133497141)
gcgatcagcaggcatgcactttgcctcctaactttgcgttccatgcttactgtttataatttccttcacttgtcacaaaaggcagcagtatattaggtaagtcggtgttcccccttggttcttcctagcgctcataaatagtggtggatagccatgagttacactgtatagaggtattgttctaattgttgcagtaatcagaacaaatttgtagttgtttgttccatggtcgtcatgagtgtgcatgggaaatgacagcatcatagtgcagctgataggacctgggatcctaccgggactacgtaggtttatgtgtaggatatcgatggccggggcttgtatcctcggcgacacacaagagctgtggtcacgcatagggagtgagcgagcgagagaggaagagacgtgggagataaaccttgaggctaggcaagataattgtttgcttcctttattccaaaactgcttagaggtatttatcctcttctaacaagaatcaaccatgatcttattattatggaaacaatgcaaaatatctaaagaagaaaaatcttgggtattttgcccctaactgccaggtggcctagccgcaagtgtggccttagttccttaggtgacgttggtacaaatatctcttcccgctagtttgaatagctcgccctcgagttgaatgttggggtagaagtccttgaagtgttgaagcagctcccaagtgatgtagtcactaggcaggccacaccaccgaacgagaatgtgtcaggtgccatgacataattgggcatacaacacatgctctggcgtgagtagtagttggccatcttgtacgtgtggcacgggcggtggagtcattggagggttcctacagaacgactttgagcatccccacgtggaatatgtcgtggagatgagcgccctctaaaagctaaaggcgatacaccacctgcttgacacgctccaacacctagaaggggctggcatagcgtgatctgagcttgcccttgggctaggactatgatgagtgcgtcggttggtggaggagacaaaggcacacccaatcacccatcgtgaacgcaagctcatgatggtggctgtcgtagtagtgcttgacatattgttagaccgggaccgagagaagaagttcgcgaacctccgcgaggaagacgtcgtggttgcgcaggagggcatccaccacctctttctaaactgccattgcggcgtgcggaagtagacctggaagggcatagtgtggagtgccatgtggaacgaagtattatagcaatactatgcctgaggaaggcagtcaacccaggtgtgcggacggtcccttgtggcgcaacggaggtacatggctatcaccttgttgatgaccttcgattggtcgtttgtttgattgcgtaacatcgtgctcaagaggttgtgccacatgtgactggtgaagaccgagttgtggtcattggcgatggaggtggggaagccatgtagacgaacaacactctcgaagaagacgagcgattctgtgtacgagtggctgagggtgatgaagtgcgtgtacttggataagtggttgatgacgacgagaatgacggacttccagcggtccttagggagaccctcgttgaagtccatcgagatgtcgacccacacttatgatgacacatcgagcggctgaaggagaccgaccgactgcaggattaacatcttgttgtgttggcacgtggtgcacgtgtggacataatcctagatgagcgcccgatcatcggggatgtagaaatctgcgagcagtcgttggagggtcttttgtatccccttatggtcgacgatatgggccaatccaagcacctgctggcgcaagttgagctgtgccggcatgaagatggacttgccgcggaagttgtcggcggtccaccatggtgcctcaagggacctgtcttgcaactgttggtggagccggcttgcctctttatcgtccgccgtggtggcgtgaatcttgtagagaggcccaagggccccaagagggtatgcaactctatggagtttgagacagtgttagtgtgatggagtgagatggtgatcgcccctgagttgaggcgatcaagcggtactcgactgcgaaatcaaagccgaagctaaacaacttggtgatctgctagtgccggggaactatgatgcgcggatacttcacaaaactcacgtaccggtgtcggataccgtatcggatacggatacctttcggatacttccggatacgtatcagatatttctgcagatttaaataaataaaaaagacggatactccatgaatacctcttcgatacctgcgggatacgacccaaccctagttcgtagtatacactcgtgctcctgtgtcgcataaccactgcccaaagccgcctccctgcctcctcttgcgcgtccccaaccgccgcagttcgtcggtctgtggccgcctctgctgtagttcgccggtctggtcgcctccgctgcagttcgccggtttgtggccgccgtcgccgtcacccgtcagtcactgattggagcagtcgccaacacgtcgcgaggtatgtgaccgtcagcctgccagtcaccggcgcgccgcgaggtctatggctattagcctaccagccgccgattggtgccgccgccacgaggtctgtggccgccgttcattgattggagctgccacctgatgagccgtgggctcgtggccgctgccgcagtcgatctgtggtcatcagtcgccgattggagttgtcgcccgatgattggtgggtctgtagctgccgtcgccagactgtgggtttgtggccattgtcgccgatccgtgtcacagtgccacccatcgatccacaggtcgacgtcggtgtgttttgtggttgcctgcacacctttgccacaaatcaatatgtaggtctgtgttcttatcttcccttgcttctcaaactccttgcttctcaatctgttgactgctacaactccggtcttgttagatcccatggcagcgaccaacgagttcaaatgcttctgcatctactgaggccagtggcagcgaaggtagttttcacgttgctaataatcttgctatttatttttatttataatatatatttatgtatcgctgtatcagtgttttttgagaaatggcgtatcggggtatcgacgtatcgcgtatccgtatccatgtgtcagggtaacatagccggggaaccgtggacaaccactagtccaagaggaacttgagggtgtaatgatcaatgtggacaagaaagcgatgaccttagtgttacggttgacgacctcgcatagcctggaccaggacgatgagctagctcacgctcatggtgctagcttgtggtgaaggacgatgaatggccgactgaagaaggccaggggcctaccccataatggagaatggcgtcgaaccccatgtctgaagcgtcgcagtcgacgacaaactactagtcgaagtccggcatctacagtactagcatcgtggagagggcatgcttgagcgccgtgaatgccttcgtagcctcaggcgtccaggcaaaggcatccttgcgcaaccgttgtgtcaggggcgagaggatcatgtcgaagtcctggatgaccttccagtagtagtcggccagccctaggaagttgcgcacgccctagggtgagtgggggctctagcctggatgagacggtctccaccttttcgctgtccatggcggcgccattggcagagataacatggtcgaggtaggcattcgacattgccccaaaggagcatttcaactgcttcaggtggagaccgtgtgcatagaggccgtcaaggacaggaggaacgtgctgtaggtgctcgaaccacgacaaatcgtagatcaaaatgtcttcgaagaagacggacaagaacctacagaggaagggttggaggatgttgttcatgagggcttggaatgtggctgacgcgttggagaggtcgaaaggaagtacgaaacatcatcttcttgatgtcctcgggatgcatccgcacctggtgatagccagattgttagtttagtttggtgaagtacttggcgtcatggagctcattgaccacagggatgggaaacttgcatggcagtgcactgccactcgagcttgttcctctagcttgttcctctgtagttgcaggtaatggtaagggtggatgaccaccgacactatgcctgtcagcaggtggatccaatgatcataggggcgtgtcgtactgctggaggcggtccaatagtgattgttggtggtcgctatggcgtgtcattgtgaggggaggccgtacctccaaaggatgtggtcatcggcctctgcagaaggccttgaagtccatataatgggccccaaggtttggaggtagtggatgactaggacgaggttgaacccacctagttatataccgaagcagctgatggtgaactcctgacaattgcgcatggacacgttgcgtgccacgtcctcgtagggaatacaatcaccattgaccaccgtgacccgcatgttggtgttgtctgctatcactagtccaatgcagcgcatgaccccacattgatgttgtgggttgagctgttgtctaggagggtaaggagccggtgatcgttgatgtaggtgtgtaggtgcatggtgttcttagtacgtatgtcagtgatggcatggaggcagacgactggggcatcaggcccatcctcaaggactggctcgatatcctcgtcctggggtgcctcatcgagcaggtagttggcagcctcaagatagaacaaatgatggcgcactagtggccccacatgtttggctcgttgcagttgtaacacaacccctggcaatgacgctcgaccacttgtctgcataaggcggtggaactagggctagggagtaggcagggccacaactggaggtggcatgagcgacgtgggcgcaactgcgcctgcaaaagttgcacatagcagggcagacgacgccaatggtagaagctagggaggccgggtgatctgctgcatcgagattggcatggtggcactcgtgagcccgtgctaggtgcatggccatatgtaggtgcatgttccggaagatcctcggatgaagaggttggacttctggaccggcagaagatttgacatgtggtgcgttgaagcactcttaatagtcctagaccatgacgtggaatgggagcctcgtcagttcggcgagacaattgttgtggctggttgggccgaaccgcagatggcaaagatccttgaacgactcctacaatagcatgccctcatcttgctcgaaggcatagtactgtgtctcagccgtgcccatgaggtgtacaaggcgagccaaactcgatttgaggtaaacatacactgcccatggaagagctgctcgcaatggttgagccagttcaggggtcttccttgccacctaaggtggagaagtcgagcttgtcgaagcggggaacacccaaactagcgggtgctccgacaatgccgatagcggagggcgtcgaagcggacgagaaaggtggcccatgcagaaacacatgcagtgtggatggcgagggaagttgatctggtggatgagaaggggagcagatgggctgcgttggttgtggcggtgtgtaggacggtggcgggtggcgcagtggacaaggtggtggagggcgacatagcagtggcattggagaagtacagaaacactgtcacccgtaccctagcatcttgttggagaaaccctggtgcatggcgcccgcataggagtgctcctactggtgctcaagggatgtctactagggctttcgcagtggcgtcgatggctgacgctagtgggatcgataactgttttttggagtcatcgtcactcgacatctctggtaccaaattgatagaattcgggatcctacctcatctgcataggttgtatgggtaggtgatcgacggccggggcttgtacccttggtggcgcacaggagccatggtcgcacatagggatcgaacaagggagggagagtcttggggctaggcgagataattgccttgcttgttttatttaaaaactgtgtacatatatttatcctcttctaacaagagtcaatcatgatcctatttatattttaacaatgcaaaatatttaataaagaaaaaattgggccatttgcttgtcctactcatatccactagcccggcccgagcgcctataggtaacatcggtcataacagtagccaatcgtgtaacccttaatttagatggatggactgcctaggatcataagagccaaattgtgattttagccataagtaacttatactcctattccaaattttaaattataagatgttttgacttttctagatatattactttactatatactacataataaaagctatgtatctggaaaagctaaaaatttgaaatgtagtactaaatgacatcatcatgctagtttagtactctattaactgattgagcttagatatttttttcatgttcagcaagaccagctcttcatcccgtgcacacgttcaattcctgtctttatgtccaatcttgcacttcatatttgtgcttatgtggctgaatgaaatcgcattttgcattaccaaaaacctgttcaattgagcttgtgatagtcatctaatgttctgaatattctgtttctctatatggtctgcaggagaactttaaaagctcagcagaagaaag

SEQ ID NO: 1155 - DNA, 8738 bp, Zea mays
  Intron number 1 from transcript GRMZM2G145308_T01 (locus G RMZM2G145308) derived from phytozome v7.0 (chr-ID 1; pos 1 7326720 to 17335457 reverse strand)
gagcgctacgtttttaagcgacgcaccgacggtacgtgtcttcttcactcccgcatccctgcctccccccccttcgcatgcgaatcatgtagatgacagcaaggaggccgctggtgcccagtgttatagttccgggcgtgagtatcctgtgtgaatgggctatgaacttgtcccgtcgtatttgtagtgtgttctatgagctttagatggttcgcagtaatcatcagagagatgttcttagtaattcagctttcggaaggctagtgctatggcagcatgaggcttgtactgggaatctagtgattagttgtaaactgtggtgcagtgtagcagccaggggcggatctaggattttaggacgatggtgtcaccatctataattgcaattcttttttgacaaattaatagcaatggtagttcttaaagaaactctgagcaactaataatacataataaggtttaaatagatatatcattatatcaatgtatataaaaagtacctcaaaaatccaatcaatttagattaatttgtccatacatctagactccggtaataagtaccgtgtagataaattaccgtgactcaaaagctccagcttccaagcaaacatcaaaattaggatacaaaagcaacctgaaagatgaaatcaacgtgttataaaactatatttaaatatagatagcatgatataatttaattttttcttcacatgggaactgaaacatacctatcataatctcataaaaacattctacgattgcgatcattcatcttatgaaatcgatctatcaaaatattatttgatattgtagctaggaaggtaggctcgacaaagcaaatgatgcaatcattcataaaattgttaccaatacaattacaaattattgtcttcacaattttcattgctgaaaaacacctctccacggatgcagtagcaactggcagaacaagaactaactttaaaagtcgataaaccaaaccgaaagcaaggtgcttctttgtatcaaccatcagcttagcaagttcggttaaggtattcaggttggaaaatctgtcatcagcttgtacattatcaatgtagatctcaagatcatgagcaagatcctttagttcttctgaagtaaagtcatctggataaagcttagctaattccactaggctctccaacttaaaatcaccataagaattcttgggactaaaagcagccatgtaagtaataagattggaatttgtttcactgaaacaatcattaaactcaataagtagcaaatcaataacagggttaaaacagtcccatctatagtgctgataatttgtgcggtttgactttttccttggtttatgtcaatcaatatactctgcttccatatttaattgagggatattgtgttcttcacaaaaggaatatattttttgcaataaagaatcccatccatcatctctaagcttctgaattttttgcttcgttgactccacctctaacatggctgccaatatatcttggtctttcctttgtaaacaaagtgatagagcatttgcatttcccaatattatcaacatcaattgcagatgaaacacaaaatcaaaattctgaagataatctatgagctcgcgggcttgtctccttttcttatcatttggaccatctttttccacataatctagcacctcaataacagaaggaaatagactgtttagactcttaagagtcttataatgagaacaccaccgagtgtctccaggtctttgaagtgattgttcttggttcaatcctgtaccgctacaaatatgtccagtgcctattgcattttttactcttgttgactttctcgaatcatgtccttccgtttgcatgaagctccagctacattaagaaggagagatatcatgtcaaagaagtcactaatgtcatcattctttttagccacagccactatcactaattggagttggtgagcaaaacagtgaatataataataatatgctgatttactctctcaaaaccaaagctctcaagccattgaactcacctctcatgttgcttgctccatcataaccttgtcccctcacttgtttccaactcaatttgtacttggcaaataatttatcaatgttggttttgagacataaagatgttgtctcattgacatgaactacaccaattagtctttctttgagcactccacatttatcgacatatcgcaaaaccacagccatttgttccttgtctgaaacatcagcagattcatcaaccaataagaaaaacacatcacccccgatctctttgatgatagactcaactatgatcttcacaaatgtaaaaccattttttagttgatgcatcaatcaatatcacaaaaataaaaacaacatgcaacaatattacctctccaaagcattgatcaatgtccttttgaattgatggagccaccattttatggttttcaggagcatttcttagcacaaccttcatattttttcattttgctccgccaaaagctttatcaactctagaaaattcccccgattaatagatgtttctgattcatcatgaccccgaaatgctaatccttgatggagtaggaacctagttgcatttatggaggtacttagtcgaataaaataatcctcttttgcaacatctctctgcttattaaggccaacaataattgattggtctggctttagcaaattgttacaccttttcacagcagcattatgaaaaccatttaacttgcttgcatgaacatctaatctatctttcttgttccaggaagagaaaccttttgttacaaaagcatcatttccggcctgaccttcaatacaatctctaaacaagtagcagtaaagacaaaaagctctatccaccttctcactatattcaatccaactgtactcatcaaaccatgctgggttaaatcgacgtggcttgcccactatgatttttttgtggatacttaaaactaggttgtggtctgtgaggacctttaaccaagtaccttcttctaatctgatcttgcagcttaagcccaggataatctgtgattctcctcctatcggccggatcatatggaagttcatctaaattgacatcttttggtgacagcaccaaagaatgttgggcaggctgagaatggctactgacatttatgtttggtgcatcttgatttccttctgaagtccgttcatcattggttgatgacaattttcttttaaagaaccgctccattgtaggaatcatctggcgtctgcgatacaagaattaagaaatatatatatactaggtgagtgcccgtgcgttgcaacggaaacatataataccatagttaagtgctcataccctgtgacggcacataattgcaaatcgaggctttccgacgtacatgctgatactttcttcgttgtttgacaacaaatgttttagttttcggatcgcacaaccatggagaaaaaatagttcgctgttttggattatgctttttagactaccggtcatgacaggcatcttgtatgtgcttgtgagaagaagtgaaattggcataaaactgtcttaacaaataatttagtgcctgacaggagctagtttaatcaatatgaataatggaccaaactgcttgttagactaccagtcacgatagaaatgaaattggcataaagctggacgacagcctctattcactaatcagtgccttgctgctcctagatcctatcactcggtccagcttcccctggaccttgcagcagctacgcggagctcctgggcagcaagcagagctgtcgtccagcttcatgtccttatcaacataaaaatgaagacatccaaaagagtgtctcgcagttgatttatcttaagaaaaacaaaggacagtgtagaagtggataataagacataaaacatccattaaaaataagtaggagtacttctcgagagaaaaaaataagtaggagtacaataaagaccaaattgataatattcttctttcaatcgtccaatttgtactcctacttaataatgagatatagtaatagcaatgtgttcgcaaataactatcagctgctcatccgaaagacaaacgcatttggtcttgactcctgagttcgactaatttctctgatagacaccaaacccttagctacgctttgtgacacccacctaccagttggaggatgcaatgccatgctctatctttttatagtatgagccaaatgcatgatgcttgaacacaccagacctccgcttctccagctctgtccgtaatctctgtgcttctatttttatgttgataaaatcactctctatggcctgactctcctcaagaagctcaacttttgcacgtttctcatgctcgtatgccatcctagaaacgaattttagccatgtggagcattatcagtagtttaatacctacaaaccttggtacatttagaaagataaacaaagcagaaattattggtatttttaattctaaaaacatgcatgctttagtaatatatatggagacattttcaaaaaaaatgtaacgaaagcataacattatggagacattttccacatcaatgcaccatgcataagatcacaaaacacaaacctggccctcgaaatctcctcttgtatatcatgcaacccttctcttatagcaggtatctgcttgttctcggattggatctgctccagctccctgtacaatgactgaaccttcacaaatagctctttgcacaaagcttccaactccatcttttcagaacttaggaccaacacttcttccttgataagtttaagagcatgcatatgttcctctaacttcatgcctccctggataatatccctgtattccatttcattatcaacacgaagtctaggaatggtttgtttggcaagtatatggatctcgtcttcaatgacagctaattcttgcctaaggcccaaaatatcctctagcacaagagtattattagcagcaattctacaaatctcttaacaaccaactgcaagttcgtcctggaaagggagcagaggcatgggtccaggaactcctccatctaatgaatttgaaggggaatttctatgaccattattgctccaaggttgccgagccatgtggttttctgatggtgcctgcaatggtgtgaaagaagaggacccacagcatatgaatggatggatatgcttgaataacatgggataaaaaaataaaactatcttgaatagttgaaatgacataagtatgtgactgtggatctggatatgcaaaactgcgtatcatttccaaacaagcatgacttcatttcagtacacaaaacaacatgatatgacatggtacaaacacacctaaggtaaaaagaagttctggtatttcataaagcaataaattaaaggattagctcatttagctgtttgccaccataaaacaatctatgtaattttataacttcttcaccttttattaaatagctctactggttttttcttgtccaagaccagggctgcagcccccgcagcctaggtcctagatacgctactgctgggctgatgttctcattgttctcttattttgctctgggttgctttgtatccatccttgtgtaatcacatactgtaactactgccaacacattgtttagaggggcacaatgggcttgttctctctgcttccttctaaataaatcatgtgcccatgcacgttcttaaaaaaggtgcataattatatattggttgcacttgtaattcatgtggcttgttgactactaaatagaaattccacaatcattgaaagattacactaaaaaaacctactacatctcacaatctaaatcattaaaacctactgcagagtaaaagttccacaatctttaaaagattgtgcaaaaaaggttacaaaattagtgtgtgattatctaaatcacaaatcatgtggtttggaggttgcacagtagaaattgcacaaccgtaaaaatgtttgcacaaaaaagagaaagcaactacactttaaattaaatcagcagatgttatcagatatcaagctatccaatcatgatgtccaaatccaatagagtgaacaaaaaactttgtcttctcaaagcgagaaataatctctccagttaaaggagagcacaacttcatttctattccttcaaagaaattgtattgatgtgttttggaaagcaaacctgacccaagtctttggtgcactggaaaagtttttagcatttcaacaaaaactttgtcttctcaaagcgagaaataatctctccagcctaggaaatgttaataaaaatatgagagtgttaagctaatgatgaagaagagatatgtagggaatgttgttatcaacaattagtacaaaaagaatagaaatggcagtcattcgaagaaaaagaaatatatggttcaggcatcaactcattctagttgtaagctaaaatttaacagaataagctttgtgtagccacatgtagctttttaaagtgcggcaagagttgggtgctaaaaaaggcaatgagtggtattatctgcagaaatgatctagcttgccaatccaaatacccaagaagcattgaaaggtagaaaccaataaccatttgaatgaaatgatggtttgtacaaacaatatgcttgcatacatttagagcacaacttcatttctataatttgatccattggacaagctgtttgaccatacaaccatggctcaccaatacaatattacgataaaataatctcaaaagctatcaaattaatccaaaaaagaaattttggaattacaatgccaacaaaattccacctaagctgcacattacagtatcatccactggagtagcaattatttgtaagcaaattcacatatatagaaacaaacaaaccagaagtaattacattcatacttcaatatccttgagtataatattcactattcatatatggcaaggtaattctcattaaacaagaagccatacctaataaatcttgaatcagagctggattacattccgaaaccgcaagaataagatactgcaactggctccaaaatcatcaccaaatgaacaaaccaattaactgagtctaaaataggagccgactaaccgaactcaatcaaatccatgcgtaccagaacgaacaagccattgtacaacatgcgtgtgggcgccaaaaatcggaatctccttcttggcgaagagaggctgaaaagctttccgaacgcgagccccaacttccttcgcacccacttccttcaccacctgcagaatcgccaaccgttgatcattccgctcggagctcaccccaagtctaccatacgatggacgtgaatcatagcgcgtgatctgcccgatccacgcagccgttagagagaagatcgagggcaggaagatctgatagtgcaagggggctcattattggatccgccaaaagagaggggcggaagggggtggatcgattcaaaatccagaggtggtggaataggggatcgggggtgaggcggcgtcctgatgaggggaggggaggatagggagatatgtcggatcaggggatgggggctcaccttgacctggccggagcggcaccccggtcactttcctctctcaagtctcaagcatgttgtctctttgctctgctgctgctggtatagcctggtacagagttgcaaccagtcgagggggaggggtggtgcgcgcggtggcctggatgcaaggcacgacggggtcgggggaggtggcgaggggaggatgtcgccttccatggagagagccggggcgaggtttaggggaggatgtcgccttccatggagagttgcaaccatgcatctgactgctgaaatcgcggtaggaaggagctgatggcgggtcctagaatcacggcggcgggagtcacggctgagggcaagcatggccatcacgccggcgggaatcacggcgggcaacacgcgatgcgggggaggggaggatcgcggagcagaggggcagaaccgtgcaccacgggtgtggagtctacactactgtcttatagagtagtatatatatatatatatatatatatatatatatatatatatatatatattaagaacaaaattaataaagatcaaaaggcaaaagccattagcaccgcttgagaaaaaacgagttggggattctggtggggattagggaaaagaattttcacctgatcgttcgtcgcgatcctggtctcgcggaacgcggatcgctgttgttctctgctatttgcgctggatattggctgatggttgcagactgcagcggcgtgcggcgagcagggcttggcggctggcggcgagtggcggactgcagtctgcggtctgcggcggcgtgcggcgagtagggtagaccgtagacgcgtattcgaggccgagaggtcgtcaggtcgactggtcgagcaggccgctaggcgtgaaacggtgagagcctaggaagaaataaaaaaatatgctttgggctgcttgcgtgttgcgtccgcacgccacatccgaccacctgttgatgggccgaagggatggctaatggtgtcctaattttttttatggtgtccttcatagtcaaattttataatgtacacatgacttagaaaaattattggtgtcatgggacaccacaactaacactgtacatccgcccctggtagcagcttaatagcgcttcaaaatcaagatgaattgtttggtgtgatatgcattcattttactatttttttaccaggcatctacatcatcaaccttgggaagac

SEQ ID NO: 1156 - DNA, 1580 bp, Zea mays
  Intron number 1 from transcript GRMZM2G552289_T01 (locus G RMZM2G552289) derived from phytozome v7.0 (chr-ID 7; pos 1 20103011 to 120104590 reverse strand)
cggttatccaacataatcaacaaggtaaaaaaaatactttgctaaattttcaatttggcaagcacagggtcgcgcccccggcgacgcccggatccgcgttcctgatcaccaaggttgggttggagccagagtacattgctcacaggcctgctctgcttacatatagcttggaacgccgcctcatgccccgacactatgttgtgaattacctgacggggcgtttggattccttcaaatcaaaagaattagaattcactcaataaagtaacttatttagtttggaatttgacattccaccactttctaaagttcagatataagcctatctcaaattcatagggtggaggatgggaaatgattttatgcatgattagaatttgtttctaatctataacttatatgacactcttcgttctactcctctatagtaaaaatgtagcacataaatatttaggatatattgctaataatagtatacaaatatattttgtacaaaagtgaattatcttaattgatatatgtctaaattactattattagaatggaattcaattacagtgatccaaactaggcgtgaaggaaaatggattgttggagcaggaccggagctactatactgctgtccagatgagtgagagtgccttcatggataagttcatatgcccctacaaggaagctgcaccaagcctcgccctagattatgctgctgcttgcagaggagaggtgcccactaccttcttggcaaatatttaaccctttagtgtaaagcaatgttttgacacttagcagttagctggtaattttgtttctttccttgcctaactgctacatcccgcagctgtgtctttagaattggctcttgtacataagatgtgagccatggttattaccagggctagatttatctttgctctctgttattcaagctgatcaagtattccaatttcacctgtcactgtatggtatggatttagttggtgagtaccctgtatattgctctgcaacggttatcgatgcaatgtttctaaataaatatgcaggatgcggttccaaatatttttatcggaaggagagttgtgctttctttctttggcaaagcattaggtggggatggcttggtgattaatcatgctactggactagtttctaaactggcggttgtaaatatgatatgattttgtaggttgatgcatcatatgaccattcccatctccttggattttattcccctttttaccgtgtaggggaaaactggaagccattttgaaccaaagacgattcagaaataaggctgtctgggagattaacccacttaaactggacttcacaaaagcacttgttatcggaaaggtttaaagtcttgaaacatctcctacacaatacaattatttgataaagtattagcataatttactgattttctgtacttcacttttagttttgtattggattatcttaaagttggccaaacctgctacctacaacaaggctctttcggtaaaattctgaaagcaaattggcgaggaacacctattgttgtcaaacgcattcttccattcttatctgatgacaggctggtg

SEQ ID NO: 1157 - DNA, 1920 bp, Zea mays
  Intron number 3 from transcript GRMZM2G375984_T01 (locus G RMZM2G375984) derived from phytozome v7.0 (chr-ID 5; pos 1 9050150 to 19052069)
gggacaggggactcctctgaaggatataccaagtggtatgtgcctcatttcatactgtttactgtgtttctttctgtctcttaggcagcatagtcagccttctctttctgtcgagatttttttttgttttacacgtgatttgttatgttttactggttcttgaattcttgattgaaactattcttaaatttgattgatggtttctaggtttgagtggaactctttaattgtttttcgtgcattttcccatcttctgttttgattatgcaccatgacaaaagaacagaaccttgtgatctaactggagagaagaaaccttgtaatctgtcaatcgcttcaggaaacttttgcttgtttctcttgtatgatgtgcctgcctttaaatttatttgctattttaatttatattcactaagggcttctgttaatagagctgatttcgtatcaccttcatctcgtatggttctttattttgtgactaaataaatacccgtacttgcctttttttcttgaacaacgcaagatagctgcatgtcattttattaagaaaaaacatatagaggaagggcctctagcataatggttctatgaacaaagtaggtggtgtttatgtggtaggctgttattagcttttaaattgaaatggtggttataacatgttagatcccagcagaatccaatagcaagatatgcagaatctgcgaaagggcctctagcataatggttaaggcttctgagtagcaccttcaggtcccgagtgcgaccccctcaggggtgaatttcggtcttagttaaaaaaatcgcctcgctgtgccccgcccgctctcgggttacgtcttacacgccaccctccggttgggtcgttgtaaagtggacggtgacggcccgctagtgataaggggccagagttcgggaatttctcgaccgggaccatgtttcggtctcttcttaatatattaccgggagggcggtctttccctccctggccaagttttttaagatatgcagaatctaaaaaaaaaaaagagtatgctggggaactgtattactgtatatctcagttttagccttttaggggcacgagactagaaccctacctcaaccacaaaatgctccgctataagccatataggtgctccatatttagagagcacagaaccatcggtgaagctctaaataggtgctatatgcctatgctagtagcttatcttttttttgctctctggtgtctgctctaattgtatgtctagcagtagcaagaggaggctaaaaattttatggccctattaatttaggtgaatcacttagcaactttggtgttattttttttgtcagccaccatcttagacgagcaatagattcccttcgtgttttctgatcttttctgtcgaaatttaagtggaaaataacaattcagactatagtctgtacagtatcacatggctgatatcattgcatcttgttaagtggaatatttcattattttgtgtagatggaagtggtatgcaataagtaatattcactcaatttttatctgttgacgttggtacattcattttccactttctttacttaccttgttccctgttttatgattagtttatcttctagccttgctgtcttttctttatgatgatttgctgaattgccgttggtttatcaagagttgactatggtggttacaagccagttggctactttgatttcacttataatctcttgttatgcattgcttcttatattcacaatgtgttcttcattggaacaaagatatgtcattctctttttttagggtttccacctaatgcttaagtttgtgaaatttctttagttttataatgttctctttcactgatttgccttttcttttaaaatttatgaacagtggcacacagaatatcaaggaagaagccttctgat

SEQ ID NO: 1158 - DNA, 17730 bp, Zea mays
  Intron number 4 from transcript GRMZM2G153928_T01 (locus G RMZM2G153928) derived from phytozome v7.0 (chr-ID 1; pos 2 48429334 to 248447063 reverse strand)
attccaaggtgattatttctggaattttttgtttaaaatattgcaaatgggtgttcagtgctgttagtcagttttggtagctagaatcagggctagacatatgattaccttccccatgtactctagccagaataggtagggtatatgagttgattaggcaaggatcaatctgtgattgggtgtttatataaaccctgtgatccttgcctatatatgtgtaacccctctaccctggtatttaatcaatcaatactattctaactacattcctacatggtatctgcagtccaggttcctctcctgcccccctacggcgcgctgccaccagccgccgccgctccttccgctgctccggcgggctgccccccaggcgccgccactcctttccctactccggcacgctgccttcaggcgctgccactcccgtcgccccagccccgcgtcctgtggtcacagacctctttcgacgcgctgccttcagctaacatctttctatatggccacaaatctaacacaacatacacattttcacaacaattatctgctgaatatgtcgtctttctgtaggccaacattctgcaccgtacaacatagcaagtctaatcgtcgtcctataaaacttgccttttagcttttgtagtaccccctcttgtcatatagaacactagatgcttgacgtcactttatctaccctgctttgattctatagttaacatcttcatcaatatcaccgtctctctgtagcattaatcctatatacctaaagatgtccttcctaggcactacttgaccttccaaactaatatctccttccccatgtgtagtgtcgaaatcacatctcatatattctgttttagttctactgagtctaaaacctttggattctagagtctcctgccacaactctagaatcataaggtcatattttgctgttgtcagctatcccagtctatcttctcatagcaataaatattcccaaatgggtaatttaggctatcgacaagattagaaggggatttatttggaaaggtaggaaggaggtcaatggtgtcagctgtctggtttcttgcgacgtggttacaagacctattaatcttgggggtcttgggatccctaatttgcagttcaagagctgggctttgcaatcaaaatggttatggctggaaaaaactgatccaaactggccttcgcgaggtctgaaactccctattcagaagcatgtcagggagctgttcttagcttctgtggttactagaattgggaatggagccaacactcttttctggtctgataattggttgaatgggaccgggatcagggatattgcccctgaagtggttgccaaagttggtaaaagtttgattcactctagaaccgtggctcaagccctggaaaactgacagtgggtaagtgatattcgatcccctctgttactggctgggcttcaacagtacctactgttatgggacgccatgagtgaggttgaattatcccaagttcctgaccagcataggtggagacatgtggcttcaggggttttctcctcccaatcttgttacaaaattcttttcattggttcagccacttttgagccatggaaaaggctttggaagtcctgggctcctccaaactgtaagttttctttggttggctatgaagaataagtgatggaccgctgacatgcttgaaaagagagggttgccacatccagatacctgccctttatgtgatcaacagcaagaaacaattcagcatctcctaaacccatgtatctttacccgtcagttctggaacagtattttatcaccttttggcttgggtcacctcattctttccattgacgaaccctccttcgcggattggtggagacgtctggacaatagcatgcatagagacaagagaaagggtctcaatagtgccatcattctaggggcatggtgtttgtgctttgtggcttcatcgccagacgattttcaatggggaatcaccttctttagcaaggatgcagagatgcttcttagatgaactcatgtgagcgaaaaggcttctggccgagttggttaggtgggttgagtagcactcctcaggtcttgggtttgactctctgtgggagcgaatttcaggctgtggttaaaaaaatcccctcgtctgtccacgccaaagcacaggtctgaggcccggtcccggtcccgatcgcagtcgtttctcacatgggctacggtggcgctgtgtatgagtgggataggggttcgggtttttttcgatctgcgtgagaaggtcttctttttaatataatgcccgagggctgttttacccccctgcaggtcgagtttttttagatgaactcatgtgttgggttttagttggggctaaaaatattgggtccctatgtttagctagggccctgaatgtataagttttctttcctgttagactgtgtgtgtgtgagtgtgtgtgggctggcaccactattgggctgccggcccattaaggttagggttgagtctatatatattgtatcccatctattatcaatccactttcatattactacatggtatcaaaggattagggttagggcttcctcccatcccacagccgccacctcgtccctgcccaggtccagccgccactggcttcagcgccgccgccccgggagactcatccatccctcccggggcggcccttctccccagctggccgccgcaacccccagccggcggctcccttggccctcgccacctcccctccgatgggcacggccgtcccgagcgagcatcagcacgcagcccgtgtggccgccgtcgggaacaggcgtgcgggcgcgagctgccgcctcacagccgcggacgcgcaagcgcgcggacgtcgccgccaccctaggtgcccctccccgcggcggcgccctccctccccaactccggcgcgggctcgtggcctccgaccaagcgtggcccagcgcggccgcgtctaggcacggtgggcgcaagatccaacccgtcggcaccgcccagggcgcgagcgcgaaggccgggttgggcgcataggccgccgcagccgccgccatcagcgccgccgcgaccctgggcctcgccgccgccgccatggccgtggatctggccgctggatcccttccctaccccctctgcaggccgtcgtcacgcgcacaggcgcccgcccagctgccgggcacctccctctggccgccggtcctccttggcgctggcgcccttcacggctacgacgtgacagctccctctctgccggccaccctgccccctctccttccgttgtcgtactgccgcgtgggcgtgcaggccagacgccgctgcctcgcgggtgcacgtgcggtgcagatccggcccctctcacagcaggctacaccgccctgcagccaccgacgtgcgcgtccttcctggccttcctgtgcgccctgctcgccactgtccgccgccgcgctgggcctctctacccaccaccgtcggctccctctccgctgcgtcctccgccggcaccctcgcatgtgccgcctcccctcatcgcgctggccacctcctaactgctcgcgctgacgcgcagctgaaagtcgcctagaggggggtgaatagggcgaaactgaaattctcaaaaataatcacaactacaagccgggttagcgttagaaatataatagagtccgcgaaagagagggtgcaaaacaaatcgcaagcgaataatgaagtgagacacgcagatttgttttaccgaggttcggttctctcaaacctactccccgttgaggaggccacaaaggccgggtctctttcaacccttaccctctctcaaacggtccctcggaccgagtgagctttctcttctcaattacttggaacacaaagttcccacaaggaccaccacaagatcggtgtctcttgcctcaattacaagtgagtttgatcgcaagaagaaatcaagaaagaagaaagcaatccaagcgcaagagctcgaaagaacacaagcaaatctctctctctaatcactaaggcgttgtgtggaatttggagaggatttgatatctttggtgtgtctagaattgaatgctagagctcttgtaagtagttgagaagtggaaaacttggatgacttgaatgtggggtggttgggggtatttatagccccaaccaccaaactagccgtttggtggaggctgtctgtcgtatggtgcaccggacagtccggtgcgacagccacgtcaccaaagccgttgggttccgaccgttggagctctgacttctgggcccgcctggatgtccggtggtgcaccagacatgcactgtagattgtccggtgcgccagcatgggcgtgcctgacctctgcgcgcgcagctcgcgcatttaatgtatctcaggtagccgttggcgccgaaatagccgttgccccgctgtttacaccggacaagggacggtgtacaccggacagtccggtgaaattatagcggagcagttgaaaatgaattcccgaggctggcgagttcatgaggccgctcttcctttgagcaccggacatgtccggtgtacaccggacagtccggtgaattatagcggagttgcctctggaaattcccgaaggtgacgagtttgtagttggagtcctctggtgcaccggacatgtccggtggcacaccggacagtccggtgcgccagaccagaggtgccttcggttgtcccttgctcctttgtttgaacccaatacttggtctttttattggctaagtgtgaacctttggcacctgtataacttatacactagagcaaactagttagtccaattatttgtgttgggcaattcaaccaccaaaattatttaggaactaggtgtaagcctaattcccttttaatctccccctttttggtgattgatgccaacacaaaccaaagcaaatgtaaaagtgcataattgaactagtttgcataatgtaagtgcaaagattgcttggaattgagccaatataaatacttacaagatatgcatggattgtttctttatttttaacattttggaccacgcttgcaccacatgttttgtttttgtaaatccttttcaaagttcttttgcaaacagtcaaaggtaaatgaacaagattttgcgaagcattttcaagatttgaaattttctccccctgtttcaaatgcttttcctttgactaaacaaaactctccctcaataaattctcctcttagtgttcaagagggttttgagatatcaagttttgaaaatactacttgctccccctttagaacacaaagagatactaatttgaaatttatcaatttgaaaatcattttaaaattagggtggtggttcggtccttttgctttgggctcatactttctccccctttggcatgaatcgccaaaaacggatactatgagtgaaatataagccctttcctaactactttctcccctttggcaaataaaacatataagtgaagattataccaaagatggagagtgatgcggagcgacggcgaaagatgagtagtagagtggagtggaagcctttgtcttcgccgaagactccaattcccttttaatatacctatgacttggtttgaaatacacttaaaaacacgttagtcatagcatatatcaaagagacatgatcaaaggtatacttaagagctatgtgtgcaattttagcaaaagaaattcctagaatcaagaatattgagctcatgcctaagtttggtaaaagattgttcatcaagtggcttggtaaagatatcggctaattgatctttagtgttaatgtatgcaatctcgatatcccccttttgttggtgatctctaagaaaatgataccgaatggctatgtgtttagtgcggctatgctcaacgggattatccaccatgcggattgcactctcattatcacatagaagaggaactttggttagtttgtaaccgtagtcccgcagggtttgcctcatccaaagcaattgcgcgcaacaatggcctgcgacaatgtactcggcttcggcggtagaaagagcgactgaattttgcttctttgaagaccaagacaccaaggatcttcccaagaactggcaagtccccgatgtgctcttcctattaatcttacaccccgcccaatcggcatccgaataaccaatcaaatcaaatgtggatccccgagggtaccaaagcccaaacttaggtgtataagccaaatatctcaagattcgctttacggccgtaaggtgtgattccttagggtcggcttggaatcttgcacacatgcaaacggaaaacataatgtccggtcgagatgcacataaataaagcaatataaataaagcaatgaaccaatcatggaccggtataccttttgatcgacggatttacctcccgtgtcgaggtcgagatgcccattggttcccatgggtgtcttgatgggtttggcatccttcattccaaacttggttagaatgtcttgagtgtacttcgtttggctaatgaaggtgccctcttggagttgtttgacttggaatcctagaaaatacttcaactcccccatcatcgacatctcgaatttctgtgtcatgatcctactaaattcttcacatgtagattcgttagtagacccaaatatgatatcatcaacataaatttgacatacaaacaaatcattttcaagagttttagtgaataaagtaggatcggctttgccgactttgaagccattagcaataaggaaatctctaaggcattcatatcatgctcttggggcttgcttgagcccataaagcgccttagagagcctatagacatggttaggatactcactatcttcaaagccgggaggttgctcaacgtagacctcctccttgattggtccattgaggaaggcactcttcacgtccatttgataaagcttgaagccatagtaagtatcataggccaataatatgcgaattgactcaagcctagctacgggtgcatagttttcaccaaaatccaaaccttcgacttgtgaataccccttggccacgagtcgagctttgttccttgtcaccacaccatgctcgtcttgcttgttgcggaagacccacttggttcctacaacattttggttaggacgtggaactaaatgccatacctcgttcctagtgaagttgttgagctcctcttgcatcgccatcacccaatccgaatcttgaagtgcttcttctaccctgtgtggctcaatagaggagacaaaagaataatgctcacaaaaatgtgcaacccgagatcgagtggttacccccttatgaatgtcgccgaggatggtgtcgacgggtgatctcgttggattgcttggtggactcttgggtgtggcggccttggttgttcatcctccttgtcttgatcatttgcatctcccccttgatcattgccgtcattttgagatggctcatctctttgatcttctccttcatcaacttgagcctcgtcctcattttgggttggtggagatgcttgcgtggaggaggatcgttgatcttgtgcatgtggaggctcttcagattccttaggacacacatccccaatggacatgttccttagcgcattgcacggagcctgttcttcacctatctcatcaagatcaacttgctctacttgagagccgttagtctcatcaaacacaacgtcacaagaaacttcaacaagtcctgaggacttgttaaagactctatatgcccttgtgtttgagtcatatcctagtaaaaagccttctacagttttaggagcaaatttagattttctacttctcttaacaagaataaagcatttgctaccaaaaactctaaaatatgaaatattgggctttttaccagttaggagttcataggatgtcttcttgaggattcggtgtagatataaccggttgatggcgtagcaggcggtgttgaccgcctcggcccaaaaccgatccgatgtcttgtactcatcaagcatggttcttgccatgtccaatagagttcgattctttctctccactacaccattttgttttggggtgtagggagaagagaactcatgcttgatgccctcctcctcaaggaagccttctatttgtgagttcttgaactccgtcccattgtcgcttctaattttcttgatccttaagccgaactcattttgagcccgtctcaagaatccctttaaggtttcttgggtatgggatttttcctgcaaaaagaacacccaagtgaagcgagaataatcatccactattacaagacaatacttactcccgccgatgcttatgtaagcaatcgggccgaatagatccatgtggagtagctcaagtggcctgtcggtcgtcatgatgttcttgtgtggatgatgggacccaacttgctttcctgcttggcatgcgctacaagtcctgtctttctcaaaatgaacatttgttagtcccaaaatgtgctctccttttagaagcttatgaagattcttcatcccaacgtgggctagtcggcgatgccagagccaacccatgttagtcttagcaaataagcatgtgtcgagttcagctctatcaaaatctacccaagtatagctgaccctctaacacacccttaaatgctattgagtcatcacttcttctaaagacagtgacacctacatcagtaaagagacagttgtagcccatttgacataattgagatacataaagcaaattgtaatctaaagaatctacaagaaaaacattggagatagtatggtcaggtgatatagcaattttacccaatcctttgaccaaaccttgatttccatccccgaatgtgatagctcgttggggatcttggagaggagaacatcttcttctcccctgtcatgtggtttgtgcacccgctgtcgagtatccaacttgagcccccggatgcataaacttacaaaacaattttagttcttgattttaggtacccaaacggtcttgggtcctttggcattagaaacaagaactttgggtacccaaacacaagtcttagagcccttgtgtttgcccccaacaaacttggcaaccactttgccggatttgttagtcaaaacataagatgcatcaaaagtcttaaatgaaatgctatgattatttgatgcattaggagttttcttcttaggcaacttggcacgggttggttgcctagagctagatgtctcacccttatacataaaagcatgattagggccagagtgagacttcctagaatgagttctcctaatcttgttctcgggataaccggcagggtacaaaatgtaaccctcgttatcctgaggcatgggagccttgcccttaacaaagttcgacaaatttttaggaggggcattaagtttgacattgtctcccctttggtagccaatgccatccttgatgccagggcgtctcccattatagagcatacttctagcaaatttaaactttccattttctaagttatgctcagcaattttagcatctaatattgctatatgatcattttgttgtttaattaaagtcatgtgatcatgaatagcattgatatcaacatctctacatctagtacaaatagaagtgtactcaacgatagatgtagagggtttgcaagattttaattctacaaccttagcatggaacatatcattcttagttctaaggtcggaaatagtagtattgcaaacatcaaaatctttagccttagcaaataatttctcattcttatctctaagggtagcaagagaaatattcaactcatcaatcctagcaagtaaatcaacattatcatttctagaattggaagttgaatcaatacaaacatgagaatcaaccttagcaattaatctagcattttcatttctaaggttgtcaatagtctcatggcaagtgcttagctcactagacaatttctcacatttttctacctctagagcataagcattcttaaccttaacatgtttcttgttttctttaattagaaaatcctcttgggaatccaaaagatcatctttttcatgaatagcactaatcaattcatttaacttttccttttgttccatgttaaggttggcaaaaagggtacgcaagttatcctcctcatcactaacattatcatcactagaagactcatatttagtggaggatttggatttaaccttcttctttttgccgtcctttgccatgaggcatttgtggccgacgttgggaaagaggaggcccttggtgatggcgatgttggcggcgtcctcgtcggaggaggactcggtggagctctcatcggagtcccactcccggcaaacatgggcatcgccgcccttcttcttgtagtacttcttcttttctctcctctttcccttcttgtcgtcgcccctgtcactgtcactagatataggacattttgcaatgaaatgaccgggcttaccacacttgtagcaaaccttcttggaacgggatttgtaatccttccccttccgttgcttgaggatttggcgaaagcttttgatgattaaagccatctcctcattgtcgagcttggaggcgtcaattggttgtctactcggtgtaattcttctcctccgtcgccttaaatgccaccggttgcgcttcggacgtggagggttcatcaagctcgttgatcttctttgagcctttaatcatacatttaaagctcacaaaattcccgattacttcctcgggagtcattagtgtatatcttgggttaccacgaattaattgtacttgagtagggttaaggaaaataagtgatctcaaaataaccttaaccacctcgtggtcatcccatttcttgctcccgaggttgcgcacttggttcaccaaggttttgagccgattgtacatatcttgtggctcctccccttggcgaagacggaagcgaccgagctccccctcgatcgtttcccgcttggtgatcttggtgagttcatcaccctcgtgcgcggtcttgagaaggtcccaaatctcctttgcattcttcaacccttgcactttgttatatttctccttgcttagagaggcgaggagtatggtagtagcttgagagttgaagtgctcgatttgggccacttcgtccgtatcatagtcttcatcccctacggatggtacctgtgctccaaactcaacaacattccatatacttttgtggagtgaggttagatgaaatttcattaaatcactccacctagcataatcttcgccatcaaaggttggcggtttgcctaatggaacggaaagtaatggagtaggtctagatgtacgaggatagtgtaaggggatcttactaaacttcttgcgctcttggcgcttagaagttacggacggcgcatcggagtcggaggtcgatgttgatgaagtgtcggtctcgtagtagaccactttcctcatcctcttgtgcttgtcgcctttccgatgcgacttgtgggaagaagatttttccttcttctctttatggtgagaagaagaagatcttttctccttccgtttggaggagtccttcttctccttcctcttggtgcgggactcttccgatgaagtgctcccgtggctcgtagtgggcttgtcgccggtctccatctccctcttggtgtgatctcccgacattacttcgagcggttaggctctaatgaagcaccgggctccgataccaaatgaaagtcgcctagaggggggggggggtgaatagggcgaaactgaaattctcaaaaataatcacaactacaagccgggttagcgttagaaatataatagagtccgcgaaagagagggtgcaaaacaaatcgcaagcgaataatgaagtgagacacgcggatttgttttaccgaggtttggttctctcaaacctactccccgttgaggaggccagaaaggccgggtctctttcaacccttaccctctctcaaacggtccctcggaccgagtgagctttctcttctcaattacttggaacacaaagttcccacaaggaccaccacaagatcggtgtctcttgcctcaattacaagtgagtttgatcgcaagaagaaatcaagaaagaagaaagcaatccaagcgcaagagctcgaaagaacacaagcaaatctctctctctaatcactaaggcgttgtgtggaatttgggagaggatttgatatctttggtgtgtctagaattgaatgctagagctcttgtaagtagttgagaagtggaaaacttggattggagctctgacttctggggcccgcctggatgtccggtggcgcaccggacatgcactgtagattgtcctgtgcgccagcatgggcgtgcctgacctctgcgcgcgcagcgcgcgcatttaatgcgtcgcaggtagccgttggcgccgaaatagccgttgccccgctgttacaccggacagtccggtgtacaccggacagtcctttcttgaggccgctcttcctttgagcaccggacatgtccggtgtacaccggacagtccggtgaattatagcggagttgcctctggaaattcccgaaggtgacgagtttgtagttggagtcctctggtgcaccggacatgtccggtggcacaccggacagtccggtgcgccagaccagaggtgccttcggttgtcccttgctcctttgtttgaacccaatacttggtctttttattggctaaatgtgaacctttggcacctgtataacttatacactagagcaaactagttagtccaattatttgtgttgggcaattcaaccaccaaaattatttaggaactaggtataagcctaattccctttcagcagcatcgcctcacccttcgagcttctcccgtcaccgatgtcgtcaacaccccttgccaggtccggcgcaggcccctgcccggctggacccaccccgccgcccacccccttcattgccttcgctggatccgtcgctgccgcggccttcccgaccggatccacgttgttgcgacctttccggctcgatccgccgtccctttggctggatcgtgtcttcccggctggatccgtcgctgccgtggccttcccggccggatctgtcgtttccccttctattctgccgcgggcgcggacaccatgaccggcgcagacgcgtgtgctgctgtcggcctccttggcggggctccttgacgcccggacgatcgaagaagcaggaaggtcggcctgccggtgcccttttgttgtgtcgccctgccgatcgttgacgctcgaacgtcgacccctcccgaagatcaggcttctgtcgcgtgtctcctgaccgcgaccacatcgacttcagctacctcggcatttaggggctatcgtcttcttggagcacagaccggtctctactccagccgcaacattcgcaccatcacgacgctgcgactgcggggggatttcaacccgtcggctcctaccttcggcctctactccagtctcatcgtgtgtggtgcccccgttgcgactgcggggggatgttagactgttgggctgccggtccattagggttagggttgagtctatatatattgtatcccatctattatcaatccactttcatattcctacatttcctaccagttcttttagccccccctgtttaagcttctttttggcagcttctgctgctttgtaatcctctttattcttctctttgtttataagatgcacagttctcctgcgcgttcgataaaaatattttgctgttgggcacttttttgtctggtcttttccactttttagaagtgtcatgatctacggtaaaagaaatatccccctttggaacaaaggaaaaatggaggaattctagaggattgaaatcctatagaaaaatttcttgtgaacctatttgttacaaaaggattgggttcctacatattagagtggacacactaaccagttcaacccaaaagtttaagctattagaaggtaggcaatccacttgtgcacttcaacaccccacttttttctcgaatacgcaggagagctgtgtatcattatatcttcaacaccccacttacgcacagttagagagaaaggcgcaaacgtggaaataaagggacagaggcacagataaagcttctaccaggattccctaaccagttcaagccaaaagcttaagcaattaagagaaggtaggcaattcacttgtacacttcaacactacaaatgctatgaaattcctatgggatgacttgtttcataggaattatggagggatcttaacaagaggctcatcgaaattcttttttttcctgcactccaaccgaaagttcacaatcttgcagcttcctgtattttcttaacccataggattcaagatgtcagagcattgtattcctacatttttcctactcccgcgtttctagaagaatcatgcattccaaagaggccctaaaccagtttcctgtggtaaataacaactaaaaagccaaaggtaagttctatagcagttaccgatatatttaggtcaattttgccactgcaaaaccagggcgaaaactcatagttatctacactaaaaatacaaattattgcattcttagtacagtgaatccttgtagggttgtactcttcaattattactagctggatgcccgtgcgttgcaacgggaatatataataccagtatactacgataacttatatacaaaatctgtgttatattgttatgagaaaatgtttcataatcaatttgtgatcctagccatacataaattttgttattttaatctagttatttcaccactacattgcaaccatcagtatcatgcagacttcgatatatgccacgatttgtatggtctcatcattggagagcacaagcacgttccacacatgccggaaaaattcccccgtacatcattagtcatcagacacgcaccaccatatgctcttgcttaaacaaaaaggtaagtgtgtatgtgtttgcgaagagaattaaaggcatgccggcacaaaagctaccctgacggtggcgaggatgacgaactgatcactgttgtcgatcctcctctgtgtcacctccggcgccaagatgacgccacaatcctcaatatagtagtcgtcgaacgcacgcgacatgacgagtatcgatgactcttggttgggctgccaaacgaagtgcaccccaggctcatcagcgaggtagtacccctggccgttgcaccaccgaatgcgctattccactacatacatcatgttcgaggacactcacacaacgtcagcaacgtccatcgtcccagcgcacaagaattcatgtccggtcagtagcgacttacgtggcaggttgggcttcaggtggacgatgagctggacgacgtgatggtgtcgtcgtcggatgcagtgtccagaacaacccgagagtcgtcgacgttggcgacaaccatgaggcccccctgcttaacgatgcacagcgcggtgcagctgctctggaccgcgtccaagcggcggcttcgcgggagcttgtcgtacacagcggcgcatgcgactacgtaagactgcttttagaggtcgaactgacagtctccaagcttcttctcgttatcgatgagcgacgacaacgcgaatgcctcctgctcatggagtttgttcggggtttgaagtaggaaacatggattcatgcttgacgttggtttatgaaaatgactcacaagtctgatccatggaaaaaaatattacgaagacaaaatttcacacatgtaaaaaagggaatttaagtataatgcattattcaaacaaaagaaatagcatgcaaagctcttctttaaataatattacctccatccaaaaatataattcaagaatatcggtgatacttatctactactacgcattgtgcaatggtagcaagtgagcttggagagagatgtagtagatgtgtttcttgtcatagatgtagacataaacacatataggtgggtgcccgtgcgttgcaacggaaacatttaatatcatgataacttatgaacaaatgtgtgttatactgttatgtgaaaatgtttcgtaattaatttgtgatcctagccatacataaattttgttatttcaacctaactatttcatcactacattgcaaccaacagtaccgtgcagacttctatacatgatagctgaatgcccgtgcgttgcaacaggaatatataataccagtatactacgataacttatatacaaaatatgtgttataccgttatgagaaaatgttccataatcaatttatgattctggccatacataaattttgttatttataatctatctgtttcaccactacattgcaaccatcagtatcatgcagactttgatatatatcacgatttgtatgatctcattattggagagcacgtttcacacataccggaagaaattctctcgtacatcgttagtcattggacacgtaccaccatacgcttttgcttaaacaaaaaggtaagtgtgtgtttgcaagactaatggtcaaacatcgtataaccacaaagttagaatactatattaatatattaaataaattaatccaatagacatagattaaccaaattaacataggataaataaatatctaattataaaagtatgaaacatggtataatcaatgttgttactgcgtagtaaatattcatacgagactaacacaactggaacgattcaatttggaactaaaatggagaagttacgaatttccaaagtttctatgtatttgatataggattaattaggaaatcaattttattgttgttttcatgacaaaacagaggtattatgtgataaaaataatattatagaattatagaaattggaatgaactcatttggatttaatatgaaatttccatgaattaaatggatttttgcaattatttttaaactaaaaatcaatttctaaactccttttccctattttctttatttcctggactgcgtcccaaattctagaaagatcaggggccaagctataaatgtttttctagactcagttagcatacagagtggacggtgggttaaacacaaaagacgttttagttgaagttgtacacaattcaacatgagtcatgttggctagaggttggaagactaggcattctgcttaatagatccaaggttcgatccctaggcagccacgatttgatttttttttctgcgcgcggaaaactggtgtgcgggattggacggctgagattgtagaacggtagaatggacggctgagatcgcagaatggcagaacacaaaaaggcaggctactattgctaacttaataagtagtagagatatataattttcagacaaataccaatgcacataatcttgtttcagggtgtctcaaatgagaacaaaaactgaaaagggatttggtgaggactgttttgtacttttgtttctcaacttccaaagagctttgtgattgtttatcaacttttgtgctcttggtacttatgtggttgcattttattagaatttggaattactgtgggaataactcaagcagggttcataagccagaagtgaagcccagaaccagagatcagctgggatccagtgtcctgaatctatagagatgtatatataggcacacacacacacaagtcaaaacaaagatttttcatgttacaagctggttactttttccatgttacaagctagttactatttgtcgtttgcttagacagtctctcaattccttccgctactctgtttttcaccctttcaggaggaaatccagaagaaaacaggctatatagtaag

SEQ ID NO: 1159 - DNA, 547 bp, Zea mays
  Intron number 10 from transcript GRMZM2G005199_T01 (locus GRMZM2G005199) derived from phytozome v7.0 (chr-ID 5; pos 25479147 to 25479693)
ttgatattgcagcgaagcagttgctagggcaaggggtaattttctttttgtaaacttgcttttatgcattggtaactgctgaattatgttatatgtaatttatttcctttctaatacaccatgttctctttagtagttggtactgttgctaaggcttccactggaacatttgaagcatggattcttcaaaattgaagctgtacatataccaggcacacctcggccatttatatggaccgacacatataccatatatgcccgatatagcgcactgcaaatccattttaaaaataagtttggaaaggtctgcacaatttttttttgttgctaaattgactaagatatatgttttcttgatttaatcattgttgtaataataggtgtcacattcagagaacatgatttttcgaacacgtttttttgtcacttcttttcaatgttttccgcatttaaaacctcattttggaagcgataatcgctagtgaagcttgcagcttgaccatttgcccccttcaatttcaggagcaagactataattctgttcaag

SEQ ID NO: 1160 - DNA, 14877 bp, Zea mays
  Intron number 1 from transcript GRMZM2G110158_T01 (locus G RMZM2G110158) derived from phytozome v7.0 (chr-ID 9; pos 2 3342218 to 23357094 reverse strand)
ttgtagtgtacgctacagaccatcacctcataccggtacctgtggactagcgtcgtggccgggggtggatggcgatgaggagtcgatctcgtagtagaccacttccctcatcttcttcttcttatcaccgctccgacgcgacttgtgtgaaggggattccttttccttccccttccctttgttgtaggactctccggatggagccttctcgtggcttgtagcgggcttctcaccggtcaccatttccttcgtggcgtgatctcccgacatcacttcgagcggttaggctctaatgaagcaccgagctttgataccaattgaaagtcgcctagaggggggggtgaatagggcgaatctgaaatttacaaacttaatcacaactataagccgggttagcgttagaaataagaacgagtccgagagagggcgtaaaataaatcgtgaacaaataaagagtgagacacgatgatttgttttaccgaggttcggttcttgcaaacctactccccgttgaggtggtcacaaagaccgagtctctttcaacccttttcctctctcaaacggtccctcagaccgagtgagcttctcttctcaatcaaatgggaacaaacttccccgcaaggaacaccacacaattggtgtctcttgccttggttacaattgagttgttcgcaagaaagaatgaaagaaggaagcaatccaagcgcaagagctcaaaagaacacaacaaatcactctcactaatcactaaagctttatgtggagttgggagaggatttgatctctttggtgtgtcttgtattgaatgctagctcttgttagtagttggaaggtggaaaacttggatgacttgaatgtgggggtggttggggtatttatagccccgaccaccaaacttgaccgttggtggaggctgctgtcgacgggcgcaccggacagtccggtgcgccagccacatcaccaggccgttgggttccgaccattggagctctgacttgtgggcccgtctggctgtccggtggtgcaccggacaggccctgtaggctgtctggtgtgccacccgcgcgtgctctgctcctctgcgcgcgcaggcgcgcatttaatgctttgcagtcgactgttgcgcgcgaagtagctgttgctccgctgttacaccggacagtccggtgtgcaccggacactgtccggtgactcaccggacagtccgatgaattatagcggagcggatttccgaagctggcgagttcagagtcgctctcccttggggcaccggacactgtccggtggtgcaccggacagtccggtgaattatagcggagcgcctctgagaattcccgaaggtgttgagttcagcttggagttccctggtgcaccggacactgtccggtggcacaccggacagtccggcgcgccagaccagggcacacttcggttatcccttgctctcctcgttgaacccttttcttggtctttttattggctttttgtgaacctttggcacctgtagaacttatagactagagcaaactagttagtccaattatttgtgttgagcaattcaaccaccaaaatcaattaggaaataggtgtaagcctaattccctttcaacatcagaactggaggccataatacgaattggttttctggattgttgtaatattagagaaataagtgacatgctttcttcatatttaaataaattaaatattctaattccgaataaaacaagcatataactcagacaaatgccatatataattattgcagcaatgaacagtagcaattctagaacatgtaaacatgtaaaatagcatctcagatccattttataattaaacatggcttgcagatgaagaaggcagattaaacaaataaacatgattgtttatcttaaagtattgctctcaaaatagcgggttgctgtaataaacagccctccaatgctaataggtgatcagagatcctcgactaatgtaacacccggttttaaagaaccaagccgggtgcatctcatacatgcgccaaagaagacaacatatataataacagagtgtatagagataaatgtcataaaacatcagagtatttattacatagcggaagacttattacaaagtaaaataataaatataaaacgaactaaggatcgtcggcgccaatgtcgactgagaaacgccacctagatcagatcatactcctcgccttgtggctcctcctgaaccacctgttcttctcctgtggggggggtgtgagacagcaagagtgagctcacatacgttcatcgctcaacaagttgtggggaataatgtggcatgaactcaccaaaggtgggagttcatgaagtgtaaggctgaccaatgaaatagaggttgaagctgagcattgcttttataagttggtcaaaattttattagcaattactaagtgtaagtaagtaccaaaccttaataataataaagaacaataatagtaaaataatcccaaatgcgatgcaaatgtcaaattgaatttaagttccatagttaatcatgtgagggtccgagccgctcttgaccgtgagcacggctagtatactagttttacactctgcagaggttgcgcatctttacccacaagtcgtgtatcccatgtcgcctgggtttgcaaggcccttagacactaccgaggtgaatggctagggatccactacgaggcctttacaaagttccactagcttccgaaaacccgctacagtttatgggaagatccagtaaagggttcctggctgatagccatcgcagcaaaatcaaccagggacctccccgcactgacctctcccctactgcccttgcccctttcgggtaaggtagtcttccactagctttcctaattagtcagccaagggcgtcccattaaacccttgtggtagcactgttttcccgggtggtcgctccatgttcccattaatttaatgatcttaacatgaacaacaataataacaagataataacagagtaatcatgaataatgaatctccatacccaatccacataaagcaatagcaagtactacccaaaaaaaatattccaggggtgaacaaggtatagaggtaatcaaaactggggtacataaaggttcccatcaaaattaacctatgcagatcattaaaattaataagaacatggctgggagaagtaagtgatcaagggcacaacttgccttcaatgagctcctgctcagctacctctacttgttgaacctcaggatccacagtggcttgctcgtctactcgcatcaacacaatacatacatagtatagcataaattaacattacatcaaacatgtaaatgaaatatacagtaacaaactagacattaaaatatgatcacaggaactggaatcactaaatttggagttatagaattcaagttatgaatttcctaaggtttaatgtgattaaaataggattaaatgttaaataaattttctaacagagttcatgtcaaaacagagacactaaatggtaaagaatattattacaaaactttagaaattggaatggttcaatttggagttaaaatgaattagatatgaattttccaagttctagcaattgtttttgcattaaaaatacatttactaattaatttattcattttaaacaggttctggactgggcatcaattatcagaaagtccaggggcctcggtgctaagaaaacagagacacatggtacaggagtatggaccgcgggttgtttttaaataaacagaggggctctttagcaatatgggcacgacgaaagggtatcggtgaatctgagccgtccgatcgactgtgaacgaccacgattagatcaaaccataataaaccctcgctctcaccagacaccatcggattctgaatgtacggtccagatttaatgaagccagttctaacatgaaccgcaggatcgcggatccacggcgccagatcaatcgcgcgaacgggtactcgtttgtctaatcctggccgttgcgcagagaatcaatggtccacagcacaccggcgcacgcgccactccccaatgtcgcgcacacggtggcgcccgggttcctgcggcggcgccatggccggcactggccaaaattcgccatacacactcgaacttcgaattgaatgcgataatacatagtgaacaactacacgataacagggaaaggaagctcacatcgaatctagaagcgccccgctctgcccacgcgccgcgacgaaatcaacaatgtggtgaagaaattccggccacccaacggtcgacccctccttccccggccacgtaagtctaccaggaagcaccgcggagcccccaaaccaccgtggaaggtcccacaacagccaagaccaggaatcacgatggcggcgccccgtgctcccctctgctcacggtttcgactcaggacgggtgaaatagggaaatagaagagcagcggacgacagttatatgctagcagggcgacccggttggcagagacagcccccagcgagctcggcggaaacggttgagtcgcggcggctttcacgcggagaggtgggtgagcgatgcgataatcgcgcacagctaggtgatgacaacgtgggtcccacgtgtaggcgtcagtgcggtagcgagggcgcgattacgggccgcgcgaagaacgggtgacaggtgggccacagaatcggtgagtgcaacgacgactgacgtgcggctgcccggtaggccccacatgtcggcgccggttctgtagtttgggccgcgcgcgagtggagaggtggttggatgggccgaaatgggataagccggcccaggtagctttttattctttttcctttttttttctgatttccctttctttcttattttcaagttcaatttgaattcgaatttagtttcaaagcttgtgcaaatttgttatcaaatcatattatgaaatgaaaaatacaaattttagaaatatatttatattatttatatttttatatcatttctcttcttactttcaaaccctaattttcaatttagggtttaatccaacttctagtcatttttatattattattattattatttaatgcacaagcaaacaaaaatatccaacatgatgcatattattattattattattattattattatttgttttaattcatctctaaattttgtgtatgctctttttatgatgcaaatgaggcacaggaaattgaggttaactctctattattcttagtatacaacttggagtattacaaatcctaccccccttaaaaataatctcgtcctcgagatttaagaagatctagagaaaaggtggggataatctatgcgaagctcttcttctctttcccaagttgcttcatcttctccgtggtgactccattgaactttacacatctttataactttattcctcgtgactcgagtcaaagtatccaaaatcctgatggggtactcagcataagtcaaatcctcttgaacactaaggtcttccattggtaactgttcttcaggcaccctgagacatttcttcagctgagatacatgaaatacatcatgaacatccgcaagatgatccggtaactctaattggtatgcaacctctcccactcgctttaagattaagaagggtccaataaagcgaggggacaactttcctttgactttgaatctcctcatgccacgaagtggtgacaccttgaggtacacataatctccttcctcaaattccagtggtctccttctattatcagcatacctcttttgtctggtttgagccaccctcaaattctcccgaattatatggacttgctcttctgcttcttgaatcagttcaggcccaaagaattgtctttctccagtttgatcccaatacagaggagtcctgcacttcctcccatataaagcttcaaaaggtgacatcttcagactggcctgataactattattatatgagaactcagcatatggtagacttttatcccagcttcctccatgctgaagggcatatgctctcaacatatcttccaatacttgattagtcctttcagtctgtccatcagtctgagggtgataagctgtactgaaattcaactttgtactcatattctcatgaaagcttctccaaaatcttgaggtaaactgcgaacctcgatcagacacgatcttctttggtactccatgcaaacacacaatccgagccatatataactctgctagttgagaacctttataagtagtcttgacaggaataaagtgagccactttagtcaatctatccacaatcacccatatagcatcatatcctttctgggtgcgaggcaatccagtaataaaatccataccaatctcttcccatttccactcgggtatcttcagtggatgcagtagtccggctggcctctggtgttcagccttaactctttgacatacgtcgcacatagccacatgtgcagccacatctctctttaatccatacaaccaatatttatgcttcaaatcttgatacatcttggtactaccaggatgaatagaataatccgagtcatgggcctcctttaaaatagtctctcgaaggctttcaatctcaggaacacatatccgatccttgaaccatacggtgccttgctcatcctctgtgaatttcagacctcgaccttcagtaatcagatcattaatctcttgcattttagcatcatcaatttgtcctttgtggaattcttgctccaaaataggttccacatcaatagtaactccttcagtgtgagcaactatccccaggttaagtctcctaaaatcctcaacaatctcatcgggtagctgggcaacaacaactgaatgaacatgctcctttcgactcaaggcatctgcaaccaaatttgccttgcccgggtgatagtgaatctccaaatcataatccttaataagctccaaccaatggcgttgcctaaggttgagatccttctgagtgaatatatactttaaatacttatgatccgtatacacttgtcacttggttccaatattataatgtctccaaatcttaagcgcatgcacaacggttgccagttctaagtcatgagtggggtagttcaactcatgtttccgtaactgacgagacgagtaggcgatcacatgtccttcttgcatgagcacacatcccaatccttggccacatgcatcacaataaatgtcaaatcccttctgcagatctggcataattaatactggtggtgacatcaatctcttcttcaattaatcgaagctgtcttggcatttctcatcccactaattctcttcctttctccagaagcgaggtcataggctaggcaatcttagagaacccttcaataaatctccgataatatcctacaagtcccaagaaactccggacctcagtaactgtagtgggtatgctccacaccactatctccttgactttagcaggatccactaatattcctccattagaaatgatatgtccaagaaatggcaccttgtcaatccaaaactcgcacttgctgaacttagcataaagttgattatcccacttctgtagcaccaatctcaggtgttcctcacgatcactttcattcctagaatagatcagaatatcgtcgataaacaccacgacgaatctgtccaaatactccataaacactttgttcatcaaattcatgaaataagctggtgcattggttaatccaaatgacataacagtgaactcatataatccatatcgagtcgagaatgctgtcttagcaatatccgatggtctaatcttcatctgatggtatcccgatcggagatcaatcttcgagaatatcctagcacctctcctctgatcaaataaatcctcaacgcggtgcaacgaatacttgttcttcatgatataacctcattaagggacctatactccacacacatcctttgcgatccatccttcttttgtacaaacagtaccggtgctccccaaggtgaggaactcaaacgtaagtaaccagcctcttgtaattccgttaactgcttcttcagtccctttaactcttctacagacctcctgtatggccgtttgaaagtaggggcagtcccaggtaagagatcaatgacaaactcaactttcgtatctggtggcatcactggtaactcctcttgaaagacatccggaaaatccttaaccagacggatgttgtcaccaacaaacttcccatcgactaagaatgctgctagtttggtggcggtagttactgcaattccaacttcaaatctttctcctttggaactggtgagttctatggtttctttagcacagtgtataaactgcctttacctttcttaaccatgacataccaaggatcacgtctatagtgctctcttctaacactataggggtagtccatctgggttagaaacacagggaaagaaggaagatttttttttagacaaggcgagtaattacgagaaatgttactgcgggggatttattagctaagtagattagtgtgttatccactaaagctaatacattaccttatggtggtacatgctaagatgcccgtctatactatttcactcaatcaaagaagcaaatcaggcattgatcatcagaacaatcaaccaacatttttaaatatagaaaatagttataattttgtcttaggcctcctatctcttaaaaaggtcataaatgtaggattccaagatgtgaaatccatcttgtctcagagtagaaaaggtaagaatcatcagagtagaacagtagaaggtgagacaggatcaagataagtgtagaaagaatcagagtaaggtaagtatagaatgaatcagaatgagataagtaggtaagggttgtccatttctatctaggtttcgtcctacagtcaacatttgctttgataccacttctgtaacacccggttttaaagaaccaagccgggtgcatctcatacatgcgccaaagaagacaacatatataataacagagtgtatagagataaatgtcataaaacatcagagtatttattacatagcggaagacttattacaaagtaaaataataaatataaaacgaactaaggatcgtcggcgccaatgtcgactgagaaacgccacctagatcagatcatactcctcgccttgtggctcctcctgaaccacctgttcttctcctgtgggggggtgtgagacagcaagagtgagctcacatacgttcatcgctcaacaagttgtggggaataatgtggcatgaactcaccaaaggtgggagttcatgaagtgtaaggctgaccaatgaaatagaggttgaagctgagcattgcttttataagttggtcaaaattttattagcaattactaagtgtaagtaagtaccaaaccttaataataataaagaacaataatagtaaaataatcccaaatgcgatgcaaatgtcaaattgaatttaagttccatagttaatcatgtgagggtccgagccgctcttgaccgtgagcacggctagtatactagttttacactctgcagaggttgcgcatctttacccacaagtcgtgtatcccatgtcgcctgggtttgcaaggcccttagacactaccgaggtgaatggctagggatccactacgaggcctttacaaagttccactagcttccgaaaacccgctacagtttatgggaagatccagtaaagggttcctggctgatagccatcgcagcaaaatcaaccagggacctccccgcactgacctctcccctactgcccttgcccctttcgggtaaggtagtcttccactagctttcctaattagtcagccaagggcgtcccattaaacccttgtggtagcactgttttcccgggtggtcgctccatgttcccattaatttaatgatcttaacatgaacaacaataataacaagataataacagagtaatcatgaataatgaatctccatacccaatccacataaagcaatagcaagtactacccaaaaaaaatattccaggggtgaacaaggtatagaggtaatcaaaactggggtacataaaggttcccatcaaaattaacctatgcagatcattaaaattaataagaacatggctgggagaagtaagtgatcaagggcacaacttgccttcaatgagctcctgctcagctacctctacttgttgaacctcaggatccacagtggcttgctcgtctactcgcatcaacacaatacatacatagtatagcataaattaacattacatcaaacatgtaaatgaaatatacagtaacaaactagacattaaaatatgatcacaggaactggaatcactaaatttggagttatagaattcaagttatgaatttcctaaggtttaatgtgattaaaataggattaaatgttaaataaattttctaacagagttcatgtcaaaacagagacactaaatggtaaagaatattattacaaaactttagaaattggaatggttcaatttggagttaaaatgaattagatatgaattttccaagttctagcaattgtttttgcattaaaaatacatttactaattaatttattcattttaaacaggttctggactgggcatcaattatcagaaagtccaggggcctcggtgctaagaaaacagagacacatggtacaggagtatggaccgcgggttgtttttaaataaacagaggggctctttagcaatatgggcacgacgaaagggtatcggtgaatctgagccgtccgatcgactgtgaacgaccacgattagatcaaaccataataaaccctcgctctcaccagacaccatcggattctgaatgtacggtccagatttaatgaagccagttctaacatgaaccgcaggatcgcggatccacggcgccagatcaatcgcgcgaacgggtactcgtttgtctaatcctggccgttgcgcagagaatcaatggtccacagcacaccggcgcacgcgccactccccaatgtcgcgcacacggtggcgcccgggttcctgcggcggcgccatggccggcactggccaaaattcgccatacacactcgaacttcgaattgaatgcgataatacatagtgaacaactacacgataacagggaaaggaagctcacatcgaatctagaagcgccccgctctgcccacgcgccgcgacgaaatcaacaatgtggtgaagaaattccggccacccaacggtcgacccctccttccccggccacgtaagtctaccaggaagcaccgcggagcccccaaaccaccgtggaaggtcccacaacagccaagaccaggaatcacgatggcggcgccccgtgctcccctctgctcacggtttcgactcaggacgggtgaaatagggaaatagaagagcagcggacgacagttatatgctagcagggcgacccggttggcagagacagcccccagcgagctcggcggaaacggttgagtcgcggcggctttcacgcggagaggtgggtgagcgatgcgataatcgcgcacagctaggtgatgacagcgtgggtcccacgtgtaggcgtcagtgcggtagcgagggcgcgattacgggccgcgcgaagaacgggtgacaggtgggccacagaatcggtgagtgcacgacgactgacgtgcggctgcccggtaggccccacatgtcggcgccggttctgtagtttgggccgcgcgcgagtggagaggtggttggatgggccgaaatgggataagccggcccaggtagctttttattctttttcctttttttttctgatttccctttctttcttattttcaagttcaatttgaattcgaatttagtttcaaagcttgtgcaaatttgttatcaaatcatattatgaaatgaaaaatacaaattttagaaatatatttatattatttatatttttatatcatttctcttcttactttcaaaccctaattttcaatttagggtttaatccaacttctagtcatttttatattattattattattatttaatgcacaagcaaacaaaaatatccaacatgatgcatattattattattattattttcatttgttttaattcatctctaaattttgtgtatgctctttttatgatgcaaatgaggcacaggaaattgaggttaactctctattattcttagtatacaacttggagtattacaactaacgtgacatccctatcttaccaaatcagggttttagatcagatgtaataagcctaataatcaaatctaaatactaatagtaaggagctgtgtactaaataaaataacaaaatttaacacaggtaaacagcctcaacaaagagatatttaattaggcacaaataatatcaatgctgaaaatgataatacactaaaacccaaactgtcacgttgtctcactacaccgctatcatcatcgagcacataaatccgcccacaatagtgcaatcacacccaagtatttaatactagcagatagcgcaaaattaaacagtaaataaagtgagacaacgaataactcacaacacgtagattgtctacgtgggaaggccagctcagcgaacacaaggttatgtcccagaaaaccaattccgccgcccacgttcgggcctgcacggcgggaggttgacggagatactagagccgctgccggagccgagggagacatccacggcaccagcccgagaagacgaacaccgcgcagcagggagcccaggcaccaggccacggtggacaataatcagaacagacagagcaccacacaggtgcactggtgagacaacggagcgcaggagaacctcgctgcgcacgagcagtgccacctccaccttcttccaccagcaggattaacaccagaacaccaagaatcgaaggaatcgatccaaaccgtgactgaaaaccgagaggaggaacaggaacagagagctagcgattttatgcgaggtgctgagcagggagcaaatctccatggttatggagccgaactggaggaggttacgcagcgggcggcatggattttggtcagagctgaaccgctcagccctgagcgccgccaccagcccccgcgtggcctctgctcctcgctccaccaccctcgtgcggcaacagaagccctcaaaacctgctgctctggtgggctactcggccagtgggccttgaagcggcccacccgggtggctttattttttttaataaagtgaaaatccatagaatggacaacattttcatgggtaacacgcgggtctgtgcgttgacccatcgctgaatgaactggtcttacttcatcacaataccaaaacgcttaaacttaagcaaatagcatttccaagtctttttatgagttcccaatcgatgtaaccaccgtaaagtgtataccatgccgtcgaaaggctgcaagcatgggtgaaataggggaacttgaagtttgaggcataaagacctcttgtagctacatgtcttgccatgtattgtcacactatagttgactgggagacgatgacctatacctcttcgaactcatcatagcatcctttatgttcctcatcttgcagtaactgttcttgacctagtttaaatatagcaagagtgagctcacatacgttcatcgcttaaaagttgcctagaagcgggatgaatatgcaagcagaaaattttccaacaaaaactagaaacggaccgggtaaaaccggttcaaccggtgtcaaaaccagttcaaccggtttgcacaagtctaaataaacaatgagatataaaactgaaatgatctcgaaattcacccacttaactctgcaatggggtgtcctagacgatccacatggttcaaagtagtagatctgagaaggacacctctcaaaatccacacacaaaaagatataaataattattccaagtaatggtgagagaacgaagaacatgagcaaacacaatgagcaagaacacaagagacacaatatttatcccgaggtttggtcacaccacaaaaggtgtcctacttactcgttgagacgcccacaaagagccgagtctctttcaaccctaatcgtcactttgccgaccacaaaggtcaagctcacacactaatctttgctcaaacgagtggtaatacaaacttttttgtagccttccacaagatttggagattcacaagcgacacctagtcatctaggagctagaagctccaagagtaatgaatccacaaagaactcgatgtactaccaaaactcgaatcaagaagaagaaaaaaggatttggagatgaagcacaaaaaaccgtagctctcaatctcacttaaagatttatctacaaatattagaaatagaagagacaagagatgtgtgagagagagtggaagatgtttctgaggttagaaatggagtttggtgcatactcttgttgtggggagagagaggtaggagtgagtatatataggtgggggccaaaactagtcattaggctgaactttcctgcgcagggccgattgaaccgcctccagggccgattcaaccgtctggtggtcagactgacagtcaaactgacagactgtaggtcagactgatcaggtgactctaacaccggttgaacctccccaaggccagttcaactggttttgaccagagaggttcaggaaaaaccctcggttgaacctgctctgaacaccggttgaagttaagtttaatcgagctgaagttaaagctcaaccgagctgaaaaagcttaactcaaattaaaaaaaatttaactcagctgaaaaaaacccaacctacattaaaaaaaactctaactcagttgaaatcaactcagcagcgcgttgtcgccaagcggagcggactgcggacccgtagttgtcaacccagcagcgcgtccgtcgcatttaccgacccaccacgccacc

SEQ ID NO: 1161 - DNA, 9238 bp, Zea mays
  Intron number 5 from transcript GRMZM2G448258_T02 (locus G RMZM2G448258) derived from phytozome v7.0 (chr-ID 1; pos 2 08798894 to 208808131)
aagtattgcaccatagtgccccatcccaagtcaaggtactgaagtgttcttccatccataaattttgggcacatttctcttcacattttttctagcaatctaaggcatggtttgcttctgtatgcatgttttttgttgatttttttagtagtgcctctgttaactcaagtttgttgcatggcattatcaatgttggttgcggcgttagccactagtaatcacgtatgaatgtatgatgctgcttcatggtctatttccaggggttgaggccagtatttgggcatcacgcttatactgattttggccagaacatagataacaagcaaatgagctcatgtttttcacctgtacaatataaagagaaagttatctgtcctaatttgctcaaaaacatagcagaacataacaaaatagcatatgtcacattaggaccttcagcagcatgggagcttgaaatatgattttcagcagaagaggggcttgaaacaactggcttataaggttatctccagtagattacccattcctatacccatatttaaactccactctgcaaacagtgcagtctatagtgcaaaacaatgttttgggtgaccatatgggtgaactgctggacacggtctaactgtctaaagctacaaagtcttcaacctcctgttcatcttggctaaacaatgaatcaagtgatcaactaaagacaataaaaatatttctaaattaaagagaaacaagggagatgtatagtctctactatattaaagcaccagtttcaatggtcgtcccgcgtcatctttttacaaaaaaatcccttgtatttcttcaaaatcaacccacggtcccagatcatatcccatccctattctatttgtttgcacaacagcgttctcgcagctgtcgctctagcaacaaaccctgttcatttcgcaacaacctccgctcgcttcttccgccgttgcaccgccaccggcgaggaggattacggcgcttgcctccagataaggatgctcgctaggtgataaaacttgcatcgagtacacccaactctaaacctcctcgtcgcccctagggatcgggagcctgtctcctcgtcttccgctctggcgcgagctctgctccgctccttcaacatagggtgtagttcgtgcattccacacatcaccaaatgtggcgaggtcttatacaaatttctaaccatttaattgtggaacattgctagagcataactatgaaaaagttttgttcatgccgaattaatttcacattgaattttaagtgaaaccaactatgcaattggaaacgagtacacggctctataaaagcggaaaatgtttttattgtttgatagatactctaaagacaagagcaagtatgtatttcagtaagcatgttaagcattagaggataaacttgttgtatttggtatttcaggaatgatcttgttggcgtacttgcgcttttctatgtcttgctaaacttggagaaaattgttaatccatcaccataaatgaatttgcatgtgttacctatgaaaactcaatgatgattttggttagggcatcagatctacaccatcttctcgctcccaagtcccaagccaaaacattggctataatttaattcgagtataggggctcctttccaactcattttttggtcttttggctaagatcaagtgtaatatttgttttaccagttcaatatctggaatatgaacaatatgttcactttgacattaaattcatttattatgggtatttttatgtggagggtccattaagactctcaagtgtcgctacccaatcaatatcatcaaatatggttgggtaccgtcgcaactcacgggtattagactagtttagttaatgttagagtgtatatgtatccagtccttattgggccgtgcgggtccctttcggcttaggtttcctgttagatggcccattagggactcccctttatattgtacaactctctttggaatgcacttaggggttccaacatggtatcagagcctagggtttttctctcctgtaaatagcccccggtctcctctcctagacgtcggcgctctctcctttcccctgccatggccgaccgaccgccgccctcaggggccttccctccccgcacttcttcctctctggagcaggccctgcgtctctcgaccatgcgtcgtccttgggggccgccgggcttctccctcgtcgccactagtgctccgatcgcgggtgacatcgacgtcggcgcaaccgtccctggcgccaccgctctgccctcagcgcgagcggatccggcgcggcggcgcgggaggcctcggcgcaggcaccctcgccctcggtgcccacgaccttggcccggacggatcaatcgcgggaggcctcggcgcaggcgctcccacgctcggccatgccactaggatcctccctggcacgagctttttcagcctccccttctccgtggacagcaactcgcgcgtgctggccgctgctctttctggtgcgctcggcatacccctgtcctcctacggcgactctggcttcgtctccgacggcttcccccctccagcgtcgtccccatcaccgatgatgccgccttctgggccgccatgctcgcgtcgggcttcccatacaacgtcatgaccagcggggcccacgacttggttgtcggggatcacaccggcaccactgcctcgacgtactctgccccctgaccgcctcgcagcggccgcctaccgacgctgtcgctgccaccctggtcgccgcccaagccgctgctatggccgctcgttggcgtgcgcaggaccgcatgtgccttggagcaggagcaggcgactgccgatgccctcgagtgtcagttcgccgagacttaccgtcgtctcgcgggcaagggtgtccagggcagcactctccgacctctgccatgaccatccacagcacgctccacgcacaggccttaggtatccccagcattcgggcactcgtcaccgacgttctcggccccgactcccttcagtacgcccgatggcaccagcaggttttgcagatcttgtgtcgctacgccctcgaagcccacatcctcttcaacaccaccgagccgtccgagtcctggtttcggatggaccaggtggtgctcacctggatcttcggcaccatcactgctgagctgcaggatattgccggcgagctggacaacacagctcgtcgggtctgggtcgcgctcgagactcacttccgcggcaactaccaggcccggaagctatacctggaggttgccttccaccagcttgtttagggggacctatctgccactgagtactgccgtcagatgaagacgttggctgactctctccgtgtccttagggcttatctcatggatgagagtctcgtcctcaacatcttgcgtggcctgagccctcgctacgggcacctgaaggccatcctcaagcgccagaagccattccccacattcgagcatgtccgcaacgacctcctgctcgaggagctcgagtccaccgccgacactgccactgccacgaccctctacaacgccactcggaccgctccttcggactccggggggctcctcaccacccctctccgccttcgccagccttcggagtccctcgtcaggcttctagctccggaggtggtcgtggcagccgaggccgcaagggcggtggcaagggagttcgcggtggtggccgtgctccagcaggcaggggtggcgcttagtggccatccttctacaacccgtagaccgacggcatctctatgtggtcggggccgtccgcgggtacctctgcgccacgccctaccgacgatcttccttgtcgctccaccaccgacggcgcccctggctcctctacaccagtcggggctccttccgctttcgggccctccagctcagctcgagtggggtacttggggtggcgggtgggaccagcagtccttcagcacaatgacgctggccccgcccaccagtgtcattgactgggtggccaactttggcgcgtcgtaccacaccactccggacgtaggtatcctctcctccacctctccccctcacccctctctcccttctattgttgttggaaatgggtctgtccttcccgtcacctcagtaggcgacacagtccttttcggtccattccatttaaacaacgtccttgttgctcccaacatcattcaaaatcttctttctgtttgtcagttcactactgacaattcttgttctatggagtttgacccgtttggtttgcggtgaaggatctggctaccaggacccttctcgccagatgtgacagctctaggcccttatacaccctttgcctgcctgctacctcttctacgacccatgtgtcacacgccctcgttgctgctgctttgtccgtcacttggcaccgtcgacttggccaccccgggcgtgatgtgatgtccaagctgtgtagcagctccactgtgtcttgtagtcggggctcttttgagcatcattgtcatgcatgtcagctaggtcgccatgttcggcttcccttccttacctcctcttccagagcggcatgcatttttgatctgatacactatgatgtatggacctcatctgttatcagtatttctggttataagtactatttgatcattttggatgaattttcccattattcgtggatttttcccttgtgtttgaagttcgacacgtttctcatgctcttacttcttcgcttgggtttccactaagtttggtcgcaccattcggagtgttcagtgcaacaacgtgcgggagttcgataactccgtgtctcgtgacttcttcctctcccacgatgtccagttgaggatgtcttgcccctattcctcccctcagaacggcagggctgagcgcacaattcgtactacgaacaatgtcatgtgttccctgttgttctaggcctccctttccgctcgctactgggctgagggcttggtcactaccacctacctcctcaaccgcctccccaccaaggcggtttctcaccccactcctttttctgctctgtttggcacctccccctcttacgaccaccttcgagtttttgggtgtgcttgctaccctaacctctctgccactgccgcccataagctcgcccctcgttccgctcgggtgcgtttcttgggtactccccggatcacaaggggtaccagtgcctcgatctctcctcccataggatcatcatctcttgtcatgtcgtctttgacgagtctgacttccctttctctaccttctcttccgctgcctctcttacggagctcgactccctcctggacgacgattctgcggttccctccatcgttcctcccttccctgtttcgtccacgggtacacctcccgcgccgccacacgcggccccagtgtctttcgcaccgccacacgtggccccgatgtctcccatgcagtctcgcccggcctcggagtctctcgtgccgccagtcagccacacgcggccccgacgtctcctgcgcagccccggagtctcccgcgccgctacgcgcgacaccgacgccacccgcgcagccacacgcggcctcgtcgtctccgtcctttccacgcttcgtcgaccctgtccgtgtctaccagcgacgtggccagccttgtgcatcggcccgctcttgcacccagccaccggtgtaccatcccgtggccattcaccgagacctgggccacatccacccgatggttacccgacgggctgccggtgttctccagcccgtcgaccgccttgtcccctcggctttgtcctctccggcgctctcccccgtatccagctccgtccgtagagagctcgccgatccaaattggcggcatgctatggagtacgaggctctacaggccaaccacacctgggacccggtgccacgcccttccggcgccaacgtggtcacggggaagtggatcttcaagcagaagctgaaggctaacggatctttggacaggtacaaggctcggtgggtcctacggggcttcactcagcgtcccagggttgactacgacgagactttcaaccccatggtgaagcccgccaccgtttggaccgtcctgaccctggcgctctcccgggagtggctggtgcatcagcttgacgtcaagaaagccttccttcacagcaccctcacgaagatggtctattgcatccagccgactagctttgttgacccagctcatcctacctggtctacaagctcaaccggtccctctacggcctcaagcaggcgcccagagcatggtatagtcgcttcgccaccttcttactctcgcagggcttcgtcgaggccaagtcagacaccttcttgttcgtcttccgccgcggatcgtacacggcgtatctcctcctctacgccggcgacatcgtcctcatgtcctcctccgtcgaccttctgcgtcgcatcatctcctgcctctagtaggagtttgcgatgaaggacatgggtgagctgcaccacttcctagggtcaccgtcgagtgccgctctcccgggatgttcctccaccaacgccggtacaccatggacatcttggagcgcactagcatggctgactgcaagccgtgggcgactccggtcgacactcacatcaaggcctccttcgatgctggggttccggtggccgaccccactggctatcgtagcctgccggggctctccggtaactcatcttcacccgcccgacatcgcctacgtcgtccagctggtgtgcctccacacgcacaacccctgggagccgcacctcaccgatatgaagcggatcctgcggtatcttcggggtaccctcgacttcagccttcttcgtcggcccgcgatcaccgagctttgggtctacactgacgccgacagggcgggctgtcgagacacgcgtcgatccacttcaggctacgccgtgttcttgggagacaaccttgtctcctggtcgtcaaagctctagccggttgtctctcgttctagtgcagaggcagagtaccgcgccgtggccaacgacgtggctctgctagttgctaccggaactccacagtccgttgatgaggagcaccctggtctactgcgataacgttagcgctgtctacctttccaccaaccccgttcaacatcagcgcacaaagcatgtcgagattgacctccacttcatccgcgagcatgtcgccattggagatgttcgtgtccttcacgttccgaccacctcgcagttcaccaacgtcttcacgaaggggcttccgactatagtgtttgaggagttttggtccagtctcaacatctgtcgtggctagagtttcgccattagagtgtatctgtatccggtccttattgggtcgtgcgggtccctctgggcttaggtttcctgttagatggcccattagggactcccgtttatattgtacaactctctctttggaatgcagttagggtttacaacaattaaccctagccctacccaattaatctaatcataaatcatagttgcaattggaactaaattcatacaaagggagtgtgaagcttaccttctggggttttcgtacatgaattcacagccctattgctgcatccattgtgccctggcaactggagcatagacacgtgagcggggtgagtcgaagaaaggagagaagttgaagcgtcatagtcaaagtggtgtggaacagcacaaatagttctgcctggcttggctgggcttattctcaatcctccatggatgtgccacaaatgtcaagaaaacaataataacatcattggaaacaaaaattggcgtaccttttgcgattagatgtcatccctagtatccatggacatgggtgaaaaacaataagcaaccattggctttggtgagatgtcatcccagactccatgggatctgagatgactaagatgaagctctcatgagcgatggcgagatcatcactgattgcacggacagtggtgaaagctgtaaagctcatgggtttatgctgatgcaccactaccagtgacctatatttgttattttgttctcatacatgcataagctgattctctgtgggaagtggttatctgattgaaaataattctgtaggattaacactatgcgtacagtgtttctgtgtgtgaagtgaattaggagaagctacttctttaactccgagcctgctagtcgatttcagagaatcatttcacagaatcagcaaagaaccacctctcagtaaagaactgtttggcagagcttctcctggattcatcctggaagctgttctaggagctctatcaaactagccctaattttccattcaaattttcattatgtgcctgttgggatcacattttcgaaaaaaaaactgttggggcagggcatatcctagcttgagttactagatcccttgcagatgccttgacgtattgctatgtgcctgtgcactaaacatgcattcaagtggccataaattgattggcatgccatgaaataatgcattttacttaaggacttgacttgggaaaataagtcaataagtcatttttagtagatccttggctaaggtgctgaagagaaacagacccaagagtcacggtgacaggcctaaaacctccaacatgtcacaggaacacaatatcacacaagaacatagacgagcacaagtgttttggtggctgggatgacttggccttttgtggttctcttctactaatatagtcagtgtgagctacaaatcaggctgtgatagcccctaataaatgcagaaaattacccaactaaccagcctattagaacatctccaacagcatgacctataaaaatgctctataattttaaattgagtatattttgtaggaattagggcaccaacaaaatattctgctccaacagtaaagccctaaatgtagattataggacagcccactatggtgtagtatatttgaggcacttgagagggtgccctataattttttgatcaaattttaaaaaatgaggcaccgttggagtggtttttcctatatagagccgtatatttcaatttgaggcatcagtctgaggcattgttggagatgcttttacttcctattactctatatgctgaaatttagttaatgtaaatgctatgaaccaagacacatgattgtttccaacacacggagtgtgtacttactgaaaaaatatgaattaacaatgagatgtgtcattactcattagtgtgttccttaaaatgactaattattgactcaaatttttcattccttcaggtttat

SEQ ID NO: 1162 - DNA, 4994 bp, Zea mays
  Intron number 1 from transcript GRMZM2G348748_T01 (locus G RMZM2G348748) derived from phytozome v7.0 (chr-ID 4; pos 4 124435 to 4129428 reverse strand)
tcacgcccctggtaaatctactactactacttgtatggtttagtaagtcggttgaagaggaaggggattaaggaaggattactgttgggctggcccattagggttccaagccgtataatagatccaggcgattaggcccagattagcatctataaatacctgcaactgcttctggaagaggacgcaatttgaataaagaacacatcccaccaaaatctggaacttatctgagcgagtctgggaagtcttcttctccagttggtcgacttctcacgctgccgaagctcgccgtcagccacgggacgtcgatccttacacctggtatcaaagctctccttccttggtgtgggttggtgatcacaagggggctaggttggctgtaggaagaagaggaggtgatcaccacggcgccctctgtcaaaccttcggcgcagtccaggctggtgttggaagccatggcgacagaagctaaacaaggggaagcaaggtgggacaagatgatggtgatgatggagaggttgacagggaaagttgaggctatggagaaggtgcatcaccaactattgggacagtcagaattgactgccgacttggtgaaacagactgcagatgagaggacacttctatccaggctcgtggaggagaatgggaaggcgttggcaaggatgaggttggaagctatggcgagagagatggaggatgttggcacgagaccagagtcatcggatacaggaggtagaagaggagccataccgaaccaggatcagggaggaagggagttgcaacaacatgtacctaagatgcttttccccaagtttggaggcaatgaaccgacgatttggttgaatcgatgtgaggactacttcaacatgtatcaggtcccaggtgcaatgaaggtacctgcggcgtcgatgaacatggagggaaatgcagctagatggctgcagattctgaagttgaggggagacttgagagattggccaaatttctctagaatagtgttgcagaaattcggtgtggatgaatatccaaaggccatggaaagaatgttgcacctgcaacagaaagggggtgtcgaagagtatgtagaagaatttgaggagaccagatatgcaacagcagtacataatccagaactgggggaggtgttctttgttgctcagtttatggaaggcttaaagaatgagatacaaggtcctgtaaagtctcagattccttccactgttgatagggctattaggttggcgctggtgcagtaggagattttggtcaagaatagtggtcggaatagtaagataggccaaggaggtaggggagtgacaggagttaggactgaagggaaggtaggggatcaaggagtatggagtaaggagagacaagtgaaagaatacaggaggataaatggactctgctatacctgtggtgagaagtttgagctagggcaccaggctaaatgtccaagaagagcaatccctcaactcaatgtattgactactgaagatttggagatggtattgtctgaggagcagctggggcagatagaaaaggaggaggtacaagaagaggagaatcacagattgtctattcatgccctcagtggagctgatagttcacagtgtatcaggtttagagccttgattcagaatcagttgatgttgatgctggtagattctggtagttctaccagtttcatcagccaagctatggtggacaagttgaaactagccactgaaccctgttctcctgtctctgtcaaggtggccaatggagaggtgttgagaagtgacagaagggtgaaggatattagatggtggatagggggacacacttttgtatctaccatgagggtgttggagattggggtgtatgatgctatacttgggtttgattggttaagagctcatagtccaatggaatgtgactgggattagaaagtgttgtcattccatcatcaaggggaaaggatttggttgaagggagattcagttgcggtgacagaagtgccccaggtttccgccctgaaggttcaaaaatggttgaagggcaatgaggtgtgggtgtttgtcttgttggaaccggtggcagggaaggaggggtttccagagacaggcccattgggtgaattgttagatgagttcaaggacatctttgagtcacctaaggctttgccacctgtcaggccatatgaccatcatattcctcttatgccaggatcagtgccagtgaatgctcgaccctataggtactcacccttgcataaaacagagatagaaaggcaggtggtagaactattgaaagatggacgtatagtgccaagtgtgagtccttttgcatcacttgtgttgctggtacagaagaaggatggaacctggaggttctgtattgattacagaaagctcaatgaaatgacaatcaagaataggttcccaatgcctttagtagacgatatattggatgagttagtgggaactcaatatttttctagtttggatatgacagcaggataccatcagattaggatgggcttggaggatgagtacaaaacgactttcaaaatccaccatgggcactaccagttcagagtaatgccttttgggcttactaatgcccatgcaagttttcagtgtgctatgaactccattttggagccctatttgagaaagtttgtgatggtgtttatagatgatattctgatatacagtgcagatctgactcaacatttggaacacttaagattggtgttctctactttgagggctcatcagttttacctcaaaagaaagaagtgtgtctttgccaaatctgagttgcagtatttgggtcatattatatccaaggatggggtgtctactgacccagcaaagactcaggcgatggtggattggccagttccttcctcacttactgagttgagaggttttctagggttgacaggttactataggaaatttgtcaggcattatggtgctattgccaagcccttgactactcttcttcaagggaagaaaagatgggagtggacaaaagaagcacaacaagcttttgataagttgaagcaggctatgattcagaccccagtgttggccctaccagattttgagcttccttttgtggtggagactgatgcctgtgagaatgggattggggctgttttgatgcaacaaaatagacctgtggcttttttaagcaaggctttgggagttaagaatagtcagttgtccatatatgagaaggagttcttggctttaatgatggcagtggataggtggaggccatatcttcagagatctcagtttgtgataaagacggatcaccagtctttgacctttttgggtgaacaacaattgcagtctgaatgacaaaagaaggctatggctaagctgatgggtttgcaatttcagattgtctacaagaaagggaaagagaatgtggtggcagatgccttgtacagagtgggaatggcgatggctatatccacagttacagagttgcaacctgtttggatccaagaggttactaattcctatgtaacggattcacaggctcaacaattgctacaaaagctcgcggtgcatagccccgatgaggcaaggttctctttgcatcaaggagttattagaaagcagcaacaaatttggattgggcagaattcagctcttagaactaaagtcatttatgcttttcatgactcagtggttggtgggcattcgggtattaccgctacttatcaaagggttaaacgaatgttttggtggcaagggtatagccccgatgtggagagttttgtcaaacagtgttcggtgtgtcagcaggccaaaagtgaaaaacagctgcctactggtttgttacaacccttgctggtgccaacaggggcctggaaggatattaccatggatttcattgaaaaattgccaaagtcagaaggctatgatactatactggtggtggtggatagattttcaaaatatgcccattttttacctctgagacatccattctctgctcaaatggtggcacaggtgatattggacaatgtcgttaagctacatggggtccctaattcagtggtgtctgacagggataaagtgttcaccagtgcattttggagacatttgtttgatatgctgaagattaagctagctttgagcacagcttatcatccacaaactgatgggcagagtgagagggttaaccagtgccttgaaatgtacttaaggtgtgctgttcacgcaacgccccacaagtggaagtcttggttggctatggctgagttttggtataatactacctatcactcttcattgggatgttctctgttcaaggccctttatgggtatgaggcttatgtgcttgctgcaccagatttcctgggcacagaggatactgaagctgggcagtgggttaaccagcgagatgcttacaatgtgctgctcaaggaacaattgttgaaggctcagcatcgtgctaaacactttgctgacttgaaaagaaggcccggagagttccaagtaggggagcaggtgctacttaaactccaaccttatgctcaatattcggtggtaaatagagcttgtccaaaattgtcctttaaatattttggaccctatactgtgttggacaggataggggcggtggcttataagattcagttaccagaggaggcccaagttcatccagtttttcatgtctcccaattgaagccatttactccaaactatgttcctgtattctcagagctccctcacatagcagatctggaaaatgtgaatgtgcagcctatggagatattggacagacgtctggtgaagaagggtagctcagttgtgactcaagttctggttcggtggtctggaattccgaaggaggctgctacttgggaagatttcaatggggtgcgcacaaggttcctagattctcttgcttggggtcaagcaagtgttcaagggggggaaatgtcacggcccctggtaaatctgctactactactacttgta

SEQ ID NO: 1163 - DNA, 5576 bp, Zea mays
  Intron number 2 from transcript GRMZM2G066454_T01 (locus G RMZM2G066454) derived from phytozome v7.0 (chr-ID 10; pos 98690398 to 98695973)
aaaggattccaataaaaaagaaggtgcatattattacaattgaacaccaaatttggcacctggatggtcggacgatccaaccttatggcttggacggtccgcgggagtagcccggacgacccgcgattagattagttcagtcaggagtccttatcccgtgtgtggttatgccaacaaactcacgagaaactgttgaatcttacctaggaacgggtccagacctccccctatatatatgaagggatacgccgattgagaacacgcaattcaaacgaaccaatctatttacattatcatgccttaagagtagatatagcgtagctctagttgtagttttccaaatctcaattttcacctctcttcggctatacatcatctagaggcgctttgagcgacctgccaatccagaagcaaccttacgatctctcttccccgacgggatccctccctggaggcaagatctagattatacacaaagccctcttggtggacagtccatcgcctccacacggacggtccgcgtacccacagagaagagtatagttatctactcgacgatgacctacacacgaatggtctggtgacctatcgcggaccgttcgacacctagtagagaggtcccaaggtctcgactctcctgtcatcgggatctagagatcattggtgtttggcccaaaaagacgccaacacactttttggagactccgctggggacaatagtgccttgatctactaaaattggcttccaatggccgattccaaggatcacgtcgatgtctccaccggcaacattatcaagccgactcaatgggtacgtgcacgggtataaaattttacccgtgggcgtggtcgcggtcgggtataagtaatcccgcgggtatggtcgcgggcgggtatttactatacccgatccgaacccgacccgttgccatcctttagaagaggacgcactgcgacaatatgcccaaaggcgtgagatggccaaggagaaatacttatcacactttacggtggatcgtcaccagaaaatcgttcgacaaggagagattgaaatggtatctctcttgactttgcctcaggtccccactgtgagtaattccaatactaatccatctattaaatcttatatagattagtgaggagacaaattaaagcaacacacagatgaatctcttaaaatgttaacacgttcgtatgagaatatgttgttccaagtttcccttcatatgaacctaacacaaccacccgtgcccggcacatcggctataaatgggtcctcaccaacccaaccattgtatgttatgctgatgagcacatacacggggcaaccacaaccgccgccgccaacacttagcgcacaaccggctctaggcacgaccagacattccgagcaccatcgtggaccgtttgacaccattcgccggactgtctggaccaataccaaaccctagaccgctcaacacagttgcagaccatctggtggcctatgccagattgttcaaggtccagccagaacgtccgacgaccctgggcggtctgtctggctatgtgtacacaacacggaactacacattatgcacaatttccacacccatctcagcagcactactctatcccacctgtgacacaccatagccatgccataccacctcctgttcatagggctgaatacttttcggcctctagggagccagaaagattcaacacgcactataggacggtgggaggaggcactagtgcaccacgagatcgtgcaccaatcacacactttgatcgtccctgggcagagagccgacatagcgatgcccgaccacttgaatcccacatccccaggctcaggggatggtcaccggacgtagtggataaacttagagaagaggtggccgagttattcagggacaaacttggcgttagcgtgtctggcatgggacagtcatatcggaagccttatgaccacaaatttggcactgtgctatacctacaagggactaggataccagacttctccaaattttctggtgaatgttgagaaaagcacacacgagcatatgggctagttcctagcacaactaggggaattggccggtagggaggcttcccgcattcttttgttctcattatcccttactggcactgcattcacttggtatgctgccttgcctcctaactcgattagcccctagccccctaggatgatctagagcataagtttcatgaacactttttctctggggattacgagttagatttagttgatctgacatctctccaacaaggggacgatgaatcggttaatgattatctttgaaggttcagggatactagaaaccatgttttcagatccatatcacaaaaaaacagctaataggattgacagttaatgggttgcattcatacttgaaagaaaaaccagatggcacccaattcttttcgctaactcagttgcatcagcgagacttggcttgcgaaagccgaagcaaagaactgtatcgtcatgatgagcatcgtgacaacagtagcttagatgacgagccaaaagagttgtatgtcgctgagcttgtttggcctgctaaggccaaactctccgcttgctcttccctggattcgtttcaaaataatcgacaaggagaagttaagttcacatttaatgttgctaagtgtggcaagatatttgatgaattacttaagagcggcaacattaaactatatcatacaattccgctgacagatgaactgaaaaggcctggttattgtaaatggcataactccttttctcatgccaccaataattgcaatgctttccgtcgacagatacaatcaactataaatgaagaccggttggttttccatggatagatagtcgttccgcatcaatacacttgagatgaacaacaaggtcttcgaccagagatggccgataaaggcaagggcaagagtgtagtcatcggtgatcctcgtatgtcgaatccatcatgaggagtggctactcgtaaagctccggagaagaaaggaattgtaaggaccactaataagactagaggcatcggtgggtaagataaaataagacaccgacagagttctcctagctagtgtacctcggacaattcggtggctatcgccaaatagtccagttcttcagacagttcgatacttagaatcagacaatctaatattgttagaaacagatcgacaacccgcgcgacgaaggtaaacaagatcgagaagcaggatgaagccaagagatttgggtaagtctggtaaatctggtcctacgttcgaccaacttctctctaaatatatgaataaaagggtcgttccgaacaatcaactagcataacaatcaaggtcgtccacgggaaggaaacgacctatgcagaggcgaaggccatttaaaccggcctgaaaggtggcacgatgaatgtctcctgctcatccgcctctagttaggtcatggtattttccacccttatactcatcgtcgatgtgttgtcctgctcaagtgtgggatagtatgacgatgaatccgtattacatgcccaatctgttttcttattcgggccgagcgcactacaattttataccttttgacatattgatcagacaaccatggccgaaaagatgcaatcctaaacgacctttatgaattagagttctaaatgggctgtttggttgaaagagccggtgacttgcatcagactagagtttttatttcgggagcaaggctattggttcgtgacctccaccaaaaagatgcaatcttttctttctcgaaagacactagtagtacaagtgcttttggttcgtgacctccaccaaaaggcaggggtcatgtgaatttggcacctggacggtcgaactgtccgaccttgtggctcggatgatctccgtgccagacggtccgcgagagtagcccggacggtccgtgattagattagttcaggtgggagtgcttatcccgtgtgtggttatcctaacaaactcgcgagaaactgttggatctcgtctagaacgggtccagacctcccccttatatttatatgaaaaggtacgatcaatgaagaacacacaatccaatcgaacaaatctatttacattatcgtgccttagaagtagatatagcatagctctagtttttgtttcccaatctcaatcttcacctctctttggttctacgtcgtttagaggcgctttgggtggccagccgatctcgaagcaaccctacaatctctcctcccatacggggttcctccctggaggcgagatctaggttctacacgaagccctttgtgccatcgcggacggtccgccgcctccacgcggacagtccgcgtacccgcagagaagagcatagttttctgctcgacggtgacctatcgtggaccgtccgacatccgcagagaggtccccaaggtcttaacttaccgtgagcgggatctagggatcattagcgtttggtccaaaaaggcactaacaattacactcatatttatctattttctttttagaagcttagaggcctgtttgggacagtttttttcaagcgcgcaggagagctgcgcatcattaagaagagagaataaaggtccgtagaaggacagatacaacaaaacttaaactggccctaacaccctaaggtggccaaaaaagcaacaaacatgaaaaagggtgcctaaaaaggctccagccaacaaaaatggactaaatccctggaattggggccagtagaaggcccaagctcgtctctggctagctcccatatttccttttcttctccagcccttctgatagctgcatccatgcttggagcaagcccgtcaaacacacaaccgtttcagtggttccaaatggtacaaagcccaagaatatttgagttaaaccctttcttggcaattccttgcagctgttcgctgcagcttttcaaccactgcatggtgttcctttctcctatttgaggagtgagtcccacaagattaacctacccgatcagcctgaaccaaaaactcctagcgaagatagcctacaaaggtggtctatggttctggttcttctaagctgttaaccatagaaaaatttacatttagagggtgcccaggaatgccaaattctacccaatgctcaaattgggtggatccaataaagaggcctttataagcagctttgccctaatactttacatcaggtgcaatactaaagatgtgtttgtcatcacgttccggaagaagattgactgtaatcaggctatctgaaaggtggacattttttttgagaatttggattcttggataatctaactgtttcgagaatctggatattgcggtgcttgcgtgcagaggaagatgaaggtgttctgcacgatttagggtttagaaagcggcggattcctcccgtcttgacgacttggcggattctgcattcacgttgatttggacgatttcacagaaacgattctcatagaagcagactaagaagcaaagcgtttggcggccagaagccgattctggcagccagaagctaaaacaaacaagccctagttccttttgttttagcttgtcggcatctgaagtacatatttgttt

SEQ ID NO: 1164 - DNA, 21610 bp, Zea mays
  Intron number 2 from transcript GRMZM2G024070_T01 (locus G RMZM2G024070) derived from phytozome v7.0 (chr-ID 1; pos 1 82050441 to 182072050)
acgagagcccctcaggttcgaatgatattagttatttaaattttgttagtatgtactatagtctcatccttgttaggtgccttttgtgtctgtgaaagggaattaggcttacacctagttcctaattgattttggtggttgaattgcccaacacaaataattggactaactagtttgctctagtgtataagttatacaggtgtcaaaggttcacacttagctaataaaaagaccaagaatttggttcaacaaagagagcaagggataaccgaaggcacctctggtctggcgcaccggactgtccagtgtgccaccggacagtgtccggtgcaccagaggactccaagccaaactcatcaccttcgggaaaatctagaggcgcttcactataattcaccggactgtccggtgtacatcggacagtgtctggtgccccaaggaagagcggctctggaactcgccagcctcaggaattcgctccgctataattcaccggactgtccggtgtacaccggactgtccggtgagccagcggagcaacggctacttcgcgccaatggtcacctgcaggggcatttaatgcgcgccagaagcgcgcagaagtcaggcacgcgcgagacagtgcaccggacaatctacagtacttgtccggtgtacaccggacagccaggcgggcccagaagtcagaagctccaacggtcgaatcccaacggcctggtgacgtggctggcgcaccggacatgtccggtgtacaccggactgtccggtgcaccatacgatagtcagccaccaccaaacgactagtttggtggttggggctataaataccaccaaccaccccacattcaagtcatccaagttttcccacttcaactacttacaagagctctagcattcaattctagacacacccaagtgatcaaatcctctccaaactccacacaacgccctagtgattagtgagagagatttgcttgtgttctttcgagctcttgcgcttggattgctttcttctttctttgattcttcattgcgatcaaactcacttgtaattgaggcaagagacaccaatcttgtggtggtccttgtgggaactttgtgttccaagtgattgagaagaaaagctcactcggtccgagggaccgtttgagagagggaaagggttgaaagagacccggtctttgtgaccacctcaacggggagtaggtttgcgagaaccgaacctcggtaaaacaaatccacatgtcacactccttattcgcttgtgatttgttttgcaccctctctcgcggacttgattatatttctaacgctaacccggcttgtagttgtgattatttttgagaatttcagtttcgccctattcacccccctctaggcgactttcaattggtatcagagcccggtgcttcattagagcctaaccgctcgaagtgatgtcgggagatcacgccaagaaggagatggagaccggcgaaaagcccactacaagcaacgagaaagctctatcgggagagtcccgcaacaaggagaagaagaaggagaggaagaaggaaaagaagacttcttcccacaagtcgcatcggagtggcgacaagataaagaagatgaggaaggtggtctactacgagaccgacacctcatcgccatctacctctggctccgacgcgccctccataacttctaagcgccatgagtgcaagaagtttagtaagatccccttacattatcctcgtacttctagacatactccattactttccgttccattaggcaaaccgccaacctttgacggtgaagattatgctaggtggagtgatttaatgaaatttcatctaacctcactccacaaaagtatatggaatgttgttgagtttggagcacaggtaccatccgtaggggatgagttatgatgaggacgaggtggcccaaatcgagcacttcaactcccaagccacaaccatactcctcgcctctctaagtagggaggagtacaacaaggtgcaaggactaaaaagcgccaaggaagtttgggacgtgctcaagacggcgcacgagggtgatgaactcaccaagatcaccaagcgggaaacaatcgagggggagctcggtcgcttccgtcttcgccaagaggaggagccacaagatatgtacaaccggctcaagaccttggtaaatcaagtgcgcaacctcgggagcaagaaatgggatgaccacgaggtggttaaggttattttaagatcacttatattccttaaccctactcaagtacaattaattcgtggtaatccaagatatacactaatgactcccgaggaagtaatcgggaattttgtgagctttgaatttatgatcaagggctcacggaagatcaacgagcttgacggtccctccacgtccgaagcgcaaccggttgcattcaaggcgacggaggagaagaaggaggaatctacaccaagtagacaaccaatcgacgcctccaagctcgacaatgaggaaatgacgctcgtcatcaagagctttcgccaaatcctcaaacaaaggagggggaaagattacaagccccgctccaagaaggtttgctacaaatgtggtaagcccggtcattttattgcaaaatgtcctatatctagtgacaagggcgacgacaagaaggggagaagaaaggagaagaagagatactacaagaagaagggcgatgatgcccatgtttgtcgggagtgggactccgacgaaagctctagcgactcctccgacgacgaggatgccgccaacattgccgtcaccaagggacttctcttccccaacgtcggccacaagtgcctcatggcaaaggatggcaaaaagaagaaggttaaatctaaatcctccactagatatgaatcctctagtgatgaaaatgctagtgatgaggaagataacttgcgcactctttttgccaacttaaacatgcaacaaaaggagaaattaaatgaattaattagtgccatccatgagaaggatgatctcttggactcccaagaggacttcctaatcaaggaaaacaaaaagcatgttaaagttaaaaatgcttatgccctagaagttgaaaaatgtgaaaaattatctagtgagctaagcacttgccatgagacaatcgacaaccttagaaatgaaaatgctaatttattagctaaggttgattcaaatgtttgtgatatttcaattcccaatcttaagaatgataatgatgatttgcttgctaagattgaagaattgaacatatctcttgctagccttaggattgagaatgaaaaattgcttgctaaagctaaagattttgatgtttgcaatgctactatttccgaccttagaactaaaaatgatatattgcatgctaaggttgtagaattaaaatcttgcaaaccctctacatctaccgttgagcacacttctatttgtactagatgtagagatgttgatattaatgctattcatgatcacatggctttaattaaacaacaaaatgatcatatagcaaaactagatgctaagattgctgagcatgacttagaaaatgaaaattttaaatttgctagaagcatgctctatagaaggagacgccctggcattaaggatgacattggcttccaacagggaggcaatgtcaaaattaatgcccctcctaagaagttatctaattttgttaagggcaaggctcccatgcctcaggataacgagggttacattttgtaccctgtcggctaccctgagagcaaaattaggagaattcattctaggaagtctcactctggtcctaaccatgctttcatgtataagagtgagacatctagctctaggcaaccaacccatgctaagttgcctaagaagaaaactcctagtgcatcaaatgaacataacttttcatttacatcttttgatgcatcttatgttttaactaacaaatccggcaaagtagttgccaaatatgttgggggcaagcacaaggggtcaaagacttgtgtttgggtacccaaagttcttgtgtctaatgccaaaggacccaaaaccatttgggtacctaaagtcaagaactaaacttgttttgtaggtttatgcatccgggggctcaagttggattatcgacagcgggtgcacaaaccacatgacaggggagaagaagatgttctcctcctacgagaaaaaccaagatccccaacaagctatcacattcggggatggaaatcaaggtttggtcaaaggattgggtaaaattgctatatcccctgaccattctatttccaatgtttttcttgtagattcattaaattacaatttgctttccatttctcaattatgcaaaatgggctacaactgtttattcactgatgtaggtgtcactatctttagaagaagtgatgattcaatagcatttaagggagtgttagagggtcagctatacttagtgaattttgatagagctgaactcgacacttgcttaattgctaagactaacatgggctggctctggcatcgccgactagcacatgttgggatgaagaatcttcatcagcttctaaagggagagcacattttaggactaaccaatgttcattttgagaaagacagggtttgtagcgcatgccaagcaggaaagcaagttggtgcccatcatccacacaagaacatcatgacgaccgacaggccattggagctcctacacatggacctattcggcctgattgcttacataagcatcagcgggagtaagtactgtctagttattgtggatgattattctcgcttcacttgggtattctttttgcaggaaaaatctcacacccaagagactttaaagggattcttgagacgggctcaaaatgaattcggcttgaggattaagaaaattagaagcgacaacgggacgaagttcaagaactctcaaattgaaagcttccttgaggaggagggcatcaagcatgagttctcttctccctacacgccacaacaaaatggtgtagtagagaggaagaatcaaactctattagacatggctagaaccatgcttgatgagtacaagacttcggatcggttttgggccgaggaggtcaacaccgcctgctacgccatcaaccggttatatctacaccgaatcctcaagaagacatcttatgaactcctaaccggtaaaaagcccaatatttcatattttagagtctttggtagcaaatgctttattcttgttaaaagaggtagaaaatctaaatttgctcctaagactgtagaaggctttttgctaggatatgattcaaacacaagggcatatagagtctttaacaagtcctctggacaagttgaagtttcttgtgacgttgtgtttgatgagactaacggctctcaagtagagcaagttgatcttgatgagataggtattgaagaggcaccgtgcatcgcgctaaggaacatgtccattggggatgtgtgtcctaaggaatccgaagagcctccaaatgcacaagatcaaccatcctcctccatgcaagcatccccaccgactcaaaatgaggatgaagctcaagttgatgaaatagaagatcaagcaaatgagccacctcaagatgacggcaatgatcaagggggagatgcaaatggtcaagacaaggaggatgaagagcaaaggccgccacatccaagagtccaccaagcaatccaacgagatcaccctgtcgacaccatcctcggcgacattcataagggggtaaccactagatctcgtgttgcacatttttgtgagcattactcttttgtttcctctattgagccacacaggatagaggaagcacttcaagattcagattgggtggtggcgatgcaagaggagctcaacaacttcactaggaatgaggtatggcatttagttccacgtcctaatcaaaatgttgtaggaaccaaatgggtcttccacaacaagcaagatgagcatgatgtggtgacaaggaacaaagctcgacttgtggccaagggatactcccaagtcgaatgtttggatttcggtgaaacctatgcacccgtagctaggcttgagtcaatttgtatattattggcctatgctacttaccattgcttcaagctttaccaaatggacgtgaaaagtgccttcctcaatggaccaatcaaggaagaggtctatgttgagcaacctcccggctttgaagatggtgagtaccctaactgttggggacttgttctcaaatgctatgaattaagaacaaggcaacataaaatgttaaatatcaatgcccttcgtccgccgaagcattatttccacgaggatttaatgaacttcggacgaaggtcacgggcataatgctacgaaggttttcaccttcgtaagtgagcttataaaaataatacaaagaaaagtaaaacatgaaatattaaagttaaatacattgaaaataaatgacatcatttatttatcttattaaatgaatttataatatccgaacacaatgtttaggtacatttatacctttgtctttgacaaacaataatttccgagtggtgcgttagcaattacaggaatgcgtgaacagtaaagaaatattgttcactatttataggcacagaacacagcctgtgaggaattacaatcatgcccctcataaaagtttaccacaatgactcagacccctatgggctaaaaggtcattctatctttaagtcggttcgacccttcatcttcggatatgttatagcaccgaagcttcatgaatgatgccttcggcgtcacgtacgagcagcttcagccgaagctgtttctttttacaggaccttcggcgacgaagcatggtcccaacagtagccccttcgcggtgctagatcgtttttcgtaatgagcttgatccgtgaaaaaaaagtctcttaggcttcgggaagccgaaggtccgaaaaacaccttccctgagctcgttgccgagaaacgatacagctttcgagcgcgtagcggtcccaccatgcaggttcactattctggtttttgcggcccaccgttcagtgggtgcgagcaactgtttgcctggtgtaaaaatcctgacgattcaccttcttacctgcagcactatataaacagacgggtaggtgtgaagttaccacagcattcattgctattgcactgttttgctgccaaaatttttaaccatagccgaagcttgactttcgcattctaacgaagctccagtttagtgtctgcttcgttagaagaagagcttcggaagaaaaggttattaatttccaaggaatttttcaagaaattcaaaattaaatggccagggtgcgctctactgctagagttgagcgcgagggagacgaagccgaaggtgcggaaactgttcctatctctgaagcaatgaagcgatctggattgatgacatcggaagacacccccgctgctgaagcaaaacaagcagatatttgaggaggctgattctgacggtgattacaatatcgcagtaccgagcaagcctagtcatctggacttcgggaagtcgaccatctcgaaggctgatttcccaaagatggtgaagtcgggctactttagcgaagataagaaaaagatgattcgctttggtgaagaagaaattaccccgaagccacagaaagatgagatagtgattttcaagagtttcctcaaaactggtttgagatttcctttgaataagatgattgctgatgtgctaaaaaagtttgggatctattttcatcaactgactcctaacgctattgttaggctcagtgtttatatttgggctctccgaagccagggggtggagccatttgccgaaggtttctgccgagtacacgagctacactaccaaactaaggccagaaaggatgggctacatgaaaattttggttgttacaattttgcctatcggaaaactacaaaatttcctgtgatcagctaccgaagcaagtggccggcaggctggaaatcagaatggttctatatcaaagttgatgatgacaaggagaagcttgtacagagtccgcttgaactaatctttggagaaacccgaccccaatgcaatatgacaccagaaggtccaacccaaacgacgttggctgaatttagaattattgcagagcacattggcaccagggatttggtgcaggagtttctggctttcaaagtatttccaactatgaaggaatggtctatgccgaagcttaaaggagagaagaaagagggggaactcgtccgactaccctatcactataaattcaagaaatattttaaggcaccctgccaagaatggctcgaaacaatcgaaataatgagtactgaaattcttggaaattactctaaaaaagaggaccaattgatgacagcagccttcggcacccggccgaaacgaaggctaaacagagtgcttgatgctataggctttgaatatcctgattatgggcgattgggcggagatgctggaggccctaagagaaaaagaattgccagcgccattgacgaagaaagcaccaaagtgaccaaaaagaagaaggagatttctgaaaagctgagccctgagccgaaggtggctgctgcaagaaaaaggaaaactgcatctccagaaccaaaaacgttggttcaagaagaagaaactcctgcgacaccttctgctgccgaagtagaagagattctgaaggtaatgactgaacccttgcctgtcaagctaagtccgctggcgccggaactgacgaagttttttcagaaggacaaagaagcttcggcggcagaaagtcctgtgctgccgaaaaaacgaagaattattcagatagcaaatgtgattcaccagacgccgccaccggcaatagtgtcaaaagttgtttctgccgagactactgaagccgaaggtgccccagccgaagccaccagagtggaaaccaccaaagctgaaaccggcgaagccgaagctaccggggccgaagccgggaccacggaaggttcaaatctggaaaccactcttgaagttattgacaatatactcctgaaaatgaccgaagaagaagctgttgtggctgcggtaagcacgacaactgaaaagggaaaagagcagatcgacgacattttagaagaagaaacttttaactttcaagatttgcttggagaagagctaagaggcgccgaaaaagaagagttgaaaaaatatgtcatatcttgcgggtataagccaggggctacgctatttggtggggtcaacgaagggaagctaagatgccttcagaaccgcaccgaggccaaagttgttagaactctctccaaaagcgttggcctgccgaaactagaagcggacctctgcaggtaccagcgacaccatatcgccggaagcctactctatgctaattttaaggtaacaaattttattattattattatatatatttttattttttaggtcgttttttgacgaagattgttttggcagagtatactattaagtaaggttctaaaaatgcaacaagatctcgaagaggagaagaataaaactatcataaaaaatttggaagaaaaagttgaaaattacgaagctgttctgaaaaagaaggacttcaccatccaggaccttgaaatcatggctaaagaacacgaaggtgcattagaaaagaaagactttgttattcagtctatggaaggttccttggctgaggtccaagtcgagaatgacagtttaaagaatgaattgctcaaacaatcagaaaaatctgagcaggaaaagaaactccttgaagcaagtcttaaaactgagatggaaaagaattcaaatttgcaaacatccttgaaggaacttcaagagaaatgcctaagcttcggcagccgatgcgtgcagcggctgaaggatgtgtttcattctatcagagccagctctgaaaaatttacaccttcagctgaaaacctgcccagcacattagaatatattgaaggcgaggttgatgctcttgacgaagttattggtggccatgccgacttctgcgccctggtagcttctcggggcacagctaccgcttttctgaaggctggttgtacgcatggaaaaattgtgaatagaccaaacttcagcttatcatcatcagatctgatagatattccaagcttagcccgaagcatcggaaatagatttatgacccagatttgggtaaacggcgggcggaaaatggcgggtgacgaagctcgaagtcatcttaagccggtaagaaacttatatttattacttttaccttctccttgaaatttgcacctttcttattctgctctttaatatacgtaggatgacgaagctaaagtatgacgaagctcgaagtatgacgacctgaagcttgatagttgctacaatattctttcctgcaaaaattctggagagacttttgtaatatcattatggaaaaaacttatgtaaatttgtacataccttgtaatatattttgtttccgctatctgtgtacaatctgctttgctatggacgaaacttcttttttgagccgaaggcgaaaaacaccttcccttcttttcgtacacaacgaagcataaattttttttcctttttcgaagtctttcctcattgccgaagcacctatcttttttgtgtggtatgatgatgattctatatatgtctaaatgaatgtttatgaatgcaaatgagatgatgaaatgtattgtgcaaatgaatattgagacacatgttcataaaccataatcatagcccttcgtccccttgggaatgattcaaatcatttttgccgtttacttttcggcttcaccgtttacttttcggtgtatcagcgttgacttttcgctgcaagcctcccttaggagcttcttcgccttttactttcaacggaatcagcgttgacttttcgctgtaagcctcccttaggagcttcttcgccttttactttcagcggaatcagcgtttatttttcgctgtaagctctgcattcccttaggaacgacttttgagcttctccctgctttcttttcttttcccttgcatttacatttacatttttgggggatatcacttttatagaattgaaataaggaaaagaaagattacatgttgtggccccattaaaaacctttctccccctttggaaaggaaaagggtgccacaaaaaggaatagaaaaaattacatcaaactaaacataatatcgccgaagctcatccgcattccatgatctaggaatgtcgttgccgtccatatccttcaatctgtaggaactgggtcttgacgaagatactaccaaaaaaggtccttcccacttcagctgtaatttgcctactgtctcagggttggctactcttcgaagcaccagatgtcctggttcaattttcttcagcttaaccttcctgtcacgccattttattgtttcggcttgatatttattgatgttttccacggcttgaagtctgatcccttctatagcatctttttccacagagcaatcagcttcgtcttcagcttctgctgaagctaccgttcttattgatcctgctttggcctcttccggggttattgcttcatccccaaacaatagtttgaatggcgtaaagcctgttgatcttgacatggttgtgttatggctccagaccactttgactaactcgtctggccactttcccctgggctgattgaagattgacttcattattccagtcattatgatcccgttagctctttcgacaagtctgtttgactccggatgtcgaactgatgcaaaatggatcttcgtgccaatttgatcacagaattctctgaaagcttcggaatcaaactgtgtcccattatccacagtaatggccttcgacactccgaagcgacaaacaatattttgccagaaaaacttttgaatagtaaccgaagttattgtggctagaggctttgcctcaatccacttagaaaaatattccactgccaccacaacatatcttaagtttccctgtgctggtggtaatggacctagcaaatcaaggccccacctttgcaatggccaagtgggttgtattaattgagttaaagacgaaggttgtttttgatctcttgcacatttctgacaaccttcgcacttttggactaaatccgctgcatccgaagctgcctttggccaataaaatccttaacgaaaaactttcccgagcaaaggcctagatccaatgtgagatccacacaggcctgcgtgtatttccttcattaattctataccttcggatctggataaacacttgagcaacggggaacagaccccacgcttgtatagctccccttctattatgacatatggtcgagctcttgcttctatcctcctgttataagcttcgtcgtctgaaagaaaatttccctgaaggaaagagatgatttcagttctccaatcttcactatagacaggggatatgttgaggaccgctctttcaagaagctcgaccgaaggtgcttttattgtttcaaaaaatacttccgaaggtaaaggcagcccctgtgctgctgacttggccaatagatcagcatattcattttctccacgaggaatatttttaacagagaatccttcaaaggaagcctcaatccttcggactgtatctagatatttttcaagcttcggatctcttgctttatagctcttgtcaatatgaccagaaataacttgggaatcagttttaagaatggcccttctgatccccattgcctttaacttccaaagacccaagagcagagcttcgtattcagcaatattgtttgtacaactgaaatcaagtcttgccgcataacaagttttaactttggaaggtgaaaccaacacaacagctactcctgctccgaaggttccccaagacccatcgcaaaacattgtccatgcttcggcatctttattcgtttcttcctcctgagcccctggcgtccagtcagcaatgaagtctgccaacgcttgggactaaatcgaagatctatggacataatcgatacaaaattcattgagctctgcagcccattttccaatccttccagtagcttctcgatttctcataatatccttcaacggttgtgaagaaggaacaattatgttataagcttgaaaataatgccgaagcttcctggaggccatcaaaacagcatatagtactttctccaattctgtataatttttctttgataaactaagaacttcagatacaaaatatattggggcctgcttcttgacttgaccttcaagcttctcctggacaagtgctgcacttaccgctgagtgcgaagctgccacatataataacaaaggagcccctggcgttggtggagttagtgttgttagatctatcaaatattgcttcagttcttcgaaggctctctgctggactggtccccattgaaaaacttcggctgacttcagcacttcgaaaaatggtaaatttctctctgctgatctagatatgaatctgttgagagatgccagccttcctgtcaatctttgagcccccttctttgtacttggtggttccattcgaagtatagcttcgattttgcttggattagcctcaattccctttgttgaaactaggcaaccaagaaatttccccttcttcactccgaagacacatttttctggattcagctttaaaccagcctgtctaaaattagcgaaggtctcctgcagatcagcaatgtgattatcttgcttcgtgctttttacaatgatatcatcaacataagttagcacattcctgcctatctgagaatgaagaaccttcgctgtcattctgctgaagcttcctccagcattcttaagcccctcaggcatccgaaggtaacaatatgttccactaggggttatgaagctggttttcggttcatcctccttcatccagatttggtgatagcctgaatagcaatccagcagactcataagctctgatgaagctgctgcatcgactaaggaatctatccttggcaatggaaactcgtccttcggacaggccttattgagatcagtaaaatcgatacacattctccatttaccattggccttcttcaccatgacagtgttagccaaccattctgggtattttacctctctgataactccggcactgaggagtcttttcacttcattccgagcaccttcggccttgtcatcagacatcttctgaagcctctgctttctgggtctgaaggatggatcaacattgagcaagtgctcaataacatccctgttaactccgcaaagatcattagctgaccaagcaaaaacatctttattattgaacaaaaaccttgtcaaggttttctcctgttcttcggacagttgagatcgcaatagcaccttctgctctgctatgtcctcacataagagcatgggcttcggctgatcagccgaagcagctttttcccttctgaacttgtattgctcacaagcttcagctccatctatattatggattgcttttgagtctgtccaatttccttcggcccttctggcagcttcctgacttccatgaatagcaatgggcccttggtccgaaggtatcttcatgcaaagataagctggatgaagaattgcttcgaaggcattgagagtaccacgaccaatgattgcattgtaagggtattccatgtcaacaatatcaaacacaacttgttcagtccttgtgttgttgataaatccgaaggtcactggcattgtgattttaccgagtgctacaatctgccttcctccgaagccgcaaaggggatgtgtggcgtcatgaattttgtcttcgggctcttgcatctgtctgaaggccttagcaaatatgatatcagttgcgctgcctgtatcaaccaaaacattatggaccagaaatcctttgatcacacaagagataaccatagcatcgttgtgtggttaatccttgagttgaagatcctcttgagagaaggtaattggaatgtgagaccatcttgacttgatgaagggtccttgcaccccgacatgctgtacccttctctgtgcctccttcttttgcttcttgttggctggctctgagcatgaaccgcctgatatcgggagtaccaacttcggagccgaagcagctccagcttgaatgttgaacgaagccatcagctcaaaaaagtggaagtgagttcaccggaggtgggcgccaatgttggggacttgttctcaaatgctatgaattaagaacaaggcaacataaaatgttaaatatcaatgcccttcgtccgccgaagcattatttccacgaggatttaatgaacttcggacgaaggtcacgggcataatgctacgaaggttttcaccttcgtaagtgagcttataaaaataatacaaagaaaagtaaaacatgaaatattaaagttaaatacattgaaaataaatggcatcatttatttatcttattaaatgaatttataatatccgaacacaatgtttaggtacatttatacctttgcctttgacaaacaataattcccgagtggtgcgttagcaattacaggaatgcgtgaacagtaaaggaatattgttcactatttataggcacagaacacagcctgtgaggaattacaatcatgcccctcataaaagtttaccacaatgactcagacccctatgggctaaaaggtcattctatctttaagtcggttcgacccttcatcttcggatatgttatagcaccgaagcttcatgaatgatgccttcggcgtcacgtacgagcagcttcagccgaagctgtttctttttacaggaccttcggtgacgaagcatggtcccaacactaaccatgtgtataaaatctctaaggcgctttatgggctcaagcaagccccaagagcatggtatgaatgccttagagatttccttatcactaatggcttcaaagtcggaaaggccgatcctacactctttaccaaaacacttgaaaatgatttgtttgtatgccaaatttatgttgatgataattatatttgggtctattaaagagtatacatgtgaagagtttagtaggatcatgacacagaaattcgagatgtctatgatgggggagttgaagtacttcttaggatttcaagtaaagcaactccaagagggcaccttcattagccaaacgaagtatactcaagatattctaaccaagtttgggatgaaggatgccaaacccatcaagacacccatgggaaccaatgggcatcttgacctcgacgagggaggtaaatccgtcgatcaaaaggtataccggtcgatgataggctctttgctatatttatgtgcatctcgaccggatattatgctttccgtatgcatgtgtgcaagattccaagccgaccctaaggaagctcaccttacggccgtaaaacgaatcttgagatatttggcttatactcctaagtttgggctttggtatcctaggggatccacttttgatttacttggttattccaatgccgattgggcgggttgtaaaattaatagaaagagcacatcagggacttgccagttcttgggaagatccttggtgtcttgggcttcaaagaagcaaaattccgtagctctttcaaccgccgaagccgagtacattgccgcaagacattgttgcgcgcaactactttggatgaggcaaacccttagggactatggttacaaattaaccaaagttcctcttctatgtgataatgagagtgcaatcaaaatggcggataatcccgtcgagcatagccgcactaaacacatagccattcggtatcattttcttagggatcaccaataaaagggagatatcgagatttcatacattaatactaaagatcaattagccgatatctttaccaagcctcttgatgaacaaacttttaacaaatttaggcatgagctaaatattcttgattctaggaacttcttttgttgatttgcacacatagctcatttatatacctttgatcatgtctctttcttatgctatgactaatgtgttttcaagtctatttcaaaccaagtcataggtctattgaaagggaattggagtcttcggcgaagacaaaggcttccactccgtaactcatccttcgccgtcgctccgagcaactctccatctttgggggagagatcactcttctaacttggtatattcttcactcatttatttatgaccaaagcaggagaaagaaattcaaagggctctaatgactccgtttttggtgattcatgccaaagggggagaaagtattagcccaaagcaaaaggaccgcaccaccacctaattttaaaaagagtttttcaattgatatgattctcaattaataaatttaaaattggtatcttattgtgttcaaaagggggagaaagtagcatttcaaaattgatatatcaaaaccctcttgaacactaagaggaggatttcatttagggggagttttgtttagtcaaaggaaaagcatttgaaacagggggagaaaatttcaaatctagtgaatgcttctcaaaattcttattcatttacctttgactatttgaaaaagactttgaaaagaatttccaaaaacatttgcaaaaacaaaacatgtggtgcaagcgtggtccaaaatgttaaaaacaaagaaacaatccatgcatatctcataagtagttatattggctcaattccaagcaacctttgcacttaaattatgcaagctagttcaattatgtacttctatacttgctttggtttgtgttggcatcaatcaccaaaaagggggagattgaaagggaattaggcttacacctagttcctaattgattttggtggttgaattgcccaacacaaataattggactaactagtttgctctagtgtataagttatacaggtgtcaaaggttcacacttagccaataaaaagaccaagaatttggttcaacaaagagagcaagggataaccgaaggtacctctggtctggcgcaccggactgtccggtgtgccaccggacagtgtccggtgcaccagaggactccaagccaaactcatcaccttcgggaaaatccagaggcgcttcactataattcaccgaactgtccggtgccccaaggaagagcggctctggaactcgccagcctcgggaattcgctccgctataattcaccggactgtccggtgtacaccggactgtccggtgagccagcggagcaacggctacttcgcgccaacggtcacctgcaggggcatttaatgcgcgccagaagcgcgcagaagtcaggcacgcgcgagacagtgcaccggacaatctacagtacttgtccggtgtacaccgggcagccagacgggcccagaagtcagaagctccaacggtcgaatcccaacggcctggtgacgtggctggcgcaccagacatgtccggtgtacaccggactgtccggtgcaccatacgacagtcagccaccaccaaacggctagtttggtggttggggctataaatacccccaaccaccccacattcaagtcatccaagttttcccacttcaactacttacaagagctctagcattcaattctagacacacccaagtgatcaaatcctctccaaactccacacaacgccctagtgattagtgagagagatttgcttgtgttctttcgagctcttgcgcttggattgctttcttctttatttgattcttcattgcgatcaaactcacttgtaattgaggcaagagacaccaatcttgtggtggtccttgtgggaactttgtgttccaagtgattgagaagaaaagctcactcggtccgagggaccgtttgagagagggaaagggttgaaagagacccggtctttgtgaccacctcaacggggagtaggtttccgagaatcgaacctcggtaaaacaaatccacgtgtcacactccttattcgcttgtgatttgttttgcaccctctctcgcggacttgattatatttctaacgctaaccggcttgtagttgtgattatttttgagaatttcagtttcgccctattcacccccctctaggcgagttttcagtctgcatctgggttttttattgcgacactaaacaataaaccaaatgcattcatttgtttcttctctaatgtgtctgcaattctgcatctatggttttagtcactgccatagactgtagtgaatgttctagatcgcctaaagccccagatgatttttaactccaaatgaatgtttgtcgttttgtctaagcacttgtcccagttcgccaaagccccagatgacttttaaatctagatgatttgttgttattttgtctcatctctagatctacagtctattatgcaaaaaagatgaatctacgtacaagctagaagaggtaataatacagcaacaccctcagttcatctcacataccaaccaaaagaattttggtaagcccaactaacgtgaaaaaatggcttcacaacttcatcgtgaacatgcatttttcttgacaagaatttatgttttgccaaatgctaccagctcggatggtattcttgtttactcctaacacactttattcttcatgattttttggtgctatattatatatgaaatcagaactttttaaattcaaagcagtttgtgtggttgttagtgttgcaagtattttgttattcctgttttggaccatttttctaccatcttgcctgtaagttgtaactcctgtgaacacagaaatactcaagaatttgtgatgttttcactgccccttttgataatcaagtcatggattagtttagcacatcacttattttttctgctttgtttgaaattgtttgggttcctcctccccaactttcagaattacctatttctattgtatgtttgataatttgcacttccactccatccacaattttggttaattcagttaatatgagtttataactgggaatgtcattcagtagtataatttacaaaatgaagaactatttatcaagatgagcggtaacatgtgtaattgaaggtcaaatgctctgcaacacaaatgcctggggagctgctggttggttccagggcacaataaatgtagttagaaaatttatctaggtacttgaggtaacaatcatgtgtagtggctgatggtacctggtgtctaacttatttccatccctagaacaatgcatcttgtgttgtgcatacttctttaagactattacaagcataaagctatagaacactttttgattttgtgaggagatcagctctgaattttattccttgctactattcggcagtaaaaacggaagattttacgacttgtaactgttgtttcattacatgcatctgaagtgcctgttaattacccacagggaaatggaccacaaaagcttctttgcattgtacatgcccactccttgtacatctgcaattcctttattttcctgattttgtttatatacaagactgggagtgccatgatcttcgttgctactttgactgctctgagtaaaaaaggttactgaaagcatgtgtctggcagggaactcagcaagaattattgtatagttcattttagttcctgtaaccatacaatgcagttgctttctcaacgtattttgttcaactatttgaagtgtacattcttgcttcaaagttcaaacaaggattaggctgtcagttacacggcaaaatttgggccactgaaaccttgtttactgtgtagacggtcagttcacaaatctttgtttttttattatatatatagaactatgggaacactattctcattgttaggttggagtggaaagaaattactatggacacagccttgtatggttacactggtgttacctgaagttttttttgaattggtcattctttgaggcagttatgttattgacaattttaaatcgaacatttctgaaactcacattactgctactctgtttaacagcttctgcatgagatgcttaagacatgctgcaaccaagtgtgagaaacggtgtccaactggacatctgctttgagccgaccactacgccttgtggacacaggtaatttattgtttccttttttaaaaaatgtggttgctcgaattgtgcatgcaaaaataagagataaaaaaatttccttggttgattctgtttgcgcccgtgtgcaaccgtaggattccagttgctttccgtgagtggcacaattcattttgtatgctgattggatgtcgaaagtgatttcttgtgttgtcgaaagtgcagtttaatgagtgttcctagaatttggtaaaattttgttggttagtgcctgttaattacccacgggaaaatggaccacaaaagcttctttgcattgtacatgtgctgagggaaattgcccctttcacctttcatgtcgctatcgttgttatgtgatcgatggtcatatgctgcagtgcctgtttgctattgtacgtgtgctgattcaatgtcgtctaatttgagttttggtctagcgtcattaactattttttatagctgatgtttccttggtctttgtgcaagtatgcttggactaatattctgtttcttgagtagactataagctattatcttctctagaaacattcttagcattttactgctatttttaaacatttcagtgcttcgtgtgtggg

SEQ ID NO: 1165 - DNA, 18723 bp, Zea mays
  Intron number 2 from transcript GRMZM2G042164_T03 (locus G RMZM2G042164) derived from phytozome v7.0 (chr-ID 10; pos 91480658 to 91499380)
gccctgtaagttattcatgttgttattggacacaactgcgttattggcctaggataaattgcttgtgaattgcaaaatggaagtcctgactgtgtagctgtgttacgcataaaagccagttgcttacttcacctggttaccgaagtgatagttttagtcctttattcctagtgatgtttttaatcatgatgaatgcatcttcatcttgaattggcaccttggtcactggaggatctaattgtatgctttgcaaatccaagccattgacatgctatttcattgctcatatttgtatccccctatttttgttgtgctatgcaaatttgtgtaagggttggggaactcatggctcatggtggtatttgagccaactttggtgctttaatggcatgcccaccattagacttgtgtcactgtcatcattgatgaactacaactgatgcagctttaaacttgttaagaagttcaaagtaccaatttcattctttgtttggtggataaaaactagcttgaagccttaaatatctcactcctgttcattttctctggtggtattgtcctcaagatttaataagacatggtatcttacaagccttttattctaattctaagagcaactccaaaagaaaccttaaactaaccccaaaatcaatattagggaaacaatcacttttttgtagctctaacaggtcccttttccttcccccaaaagcttcgcgtccctcatttgtggcctcccttccctcatatttgcgcgtcattattccttccccaatctagacgcacatggacctggaccactgtttactatcccacaccggaatcaccgaatctcggtaatttttcccgtttccgctactaaccgaaaaacgaattttggtctgaatttagatggatttcggttcaaaatataaaaacacaaaagtcaaaatttagtcaataaaacaaaattcggatggttcaaaacgaaattgttacacctaacatagactggacgggtgtgctggagcggctgtgggaccagaggcgaagccagctgcccaactgaagaaaccaacggtgttagttctactagacactgatgtcagctctatagatgattagtacatatcaaagattttccattgattttttaaaaagtcaccggtgtcagctgacaccggcaaactggcctagctccgtccctgtgtgggaccacctccgcacacggctcatcatcgccaacatcaaggccatcgcgacggactatggtcggagctgcgccgacttcctcctcagctcagttgtgccttagtgcactagctgccgccgccgtaccaccgaccccacctcttatgttagctttctccaaatgactttagcattagatacggttgcatgcatgcgtagaaactatcagtttgatagattgttctttcatcctgctacatgttttgtttagaatcgtagatgtcattttagtttgttcagaatgctcgaggcaggggttgttccaaattttttagagagcagttattagcagtctggtgtggattaagatttttttgggataattattttaacaatagcccccaataagaggttttggggaagaattttttagtactctattggagtttgtcaaggacctcccgacctagtgaaggatctaggacaccggctagagggggggtgaatagacggttttgactaaaatcaacaatactaaataaatttaatcaatacaacaaaaggaataaattatctagtgtcaataagtaaacaatgtatgaaaaacaactacggagattgaatacttgaagaacaataagcaaatcactaatcaattgcaaagcaataagtaatgctaaaaggaatagacaccgaaatttatcccgtggtatcggtgatttgccgatcacccctaatccacgttgaggtggacttcaagctctcacttgctcctctatcaagacacgacttgatctttgagccaagtggacaagaaatcactcaatacctcgattccactaatgtcacctttgccgctccggcgaggtaggcgcgaacccctcacaatccacaccgcggcttctccacaatcttcttggagagctcgacggagacaatcacccgagccgtctaggaggcggcaacctccaagagtaacaagccaacgacgcttgctcggtgtaccacctagtgcctcaagaatcaccaaatgatgcaaatgcactaggaaccctcaatctctcactagaatgcaatctcaagcaaagagtgtgagagagtgagttggaggatcacaaatgagctcaatgtgtgcaaggaatggccaagagcactctctcacacgagctacccttctatttatagccccccatctaaaaccaaccgttatgtgcaaaagggggcaattctgcgcacacgcggaccgtccgcgccctagggccggacggtccgccgtacatcataacggctataatgaccgttgaaccatgtcagagctgactcaaaaggtgggtccggacagtccgcccttcaaggccggaccgtccgcgacctggcaaattcaaacacccgagcctcggatcaaacagagttaacacacgcggaccgtccggctataaatcccggacggtccgtgacctgagactgtactgtccggactggtcccccggacagtccgtagtacaaatctataaaaacacacagtccctgtccaaaaacgattttgacacttgcggaccgtccgcccctcacaggcggaccgtccgcctataattcagggactggcccgaagccacccttctctggtcatgactgcggacggtccggccctaaggcccggacggtccgcagtgccatagaacacaatgtcaatataaatggtcagacttcggacccctctggtggaccgcggacggtccgcccctaaggcccggacagtccgcgcgtccatgacttcgcaatttttcaaacatgcttttgaaggaacttttgactcgcgaaatgaagcgctgttagtcctcatgcaaatgcaactacttgatgctctatgaggcactaagttttacacagatcgaagtcattgacccctcttaatagtacggctatctagcctactaatccggtcaggtatcttctctaaactcctcaagaccggcaaaagtaaaacatatattatacctttccgttcatctgatccacaactaatgcggatgattcttcaacatttcctgttctatgtggtccaaccctgcattcttatttcttcaagaatcgttagtccacaaacagttgtcattaattaccaaaacattaccaaaggggcctagatgattcacaatctccccctttttggtaattgatgacaacaacacatagtatattaaagagaagtttagtttctccaaatctctctcatacctaaggataagatagatcttggagataagtttcataggacttatcttgatttgaaattctgtccgagagatagataaatcccaataagaaactcagtatgtaagaaaggctccccctaagtgtgtgcaggattgtttgaagttgaagatataacacacataatatattggagcttgatggagactttcctacaatcatggttatcgaggcatacaagatatgatccgtagagtgagcgcagcaattataatcacacctcgattaaccacacacagagtaatttgaactaaaacatagttcatcccacagaatattacagataatagtccacagacatacgacatagagttaatagatcaaaccagttccaagtgcgtaagacataaactaatgcaagcggcatgaaaaaaggtaaaatgcatatgcatggtcttaatgtccacatagaaccaccaactccccctgaaggagacgccagacaacttctcttccacttctctccccctttggcatcaattgccagaaaggagaggcctcactgatcactcggcggaggatgcatgttgtagtaatgagtgctgaaggtgtcaaacagggaggagaactggccaaagtcctgctggagctgctgctgcctctgacttatatcatgcatgttgtcatttgtagaaagattgtcaaattgactggagagagcaccatgttatcttgaaaactttgttgcatattattcagccttgacatgatgggatcagtgacattagtgtgatttgatcacgaaactcagaaaattcagagttgagtgcatcccagttactgtcaaagcgagactgcatgtcatcgaggcggagatccacatgtgacatcaacccctcaaagcgagtatcaatatgagtctccagcccttgctgcatattgtgaaaataaggatcaaaatatcctggagcaggctcccaatagtgctgaggctgaggaggaggtggaggaggaggcatctgctgtccctcaacattaggagctgctccaccctcatagccagggtcttcctcatcatctgggaagggagtgagtggcctggtgagaaaccctatctcattcttaaaaggcctgaatggggtgtgaacaatctcgcaagggccctcaaatcttgtcttggatttgatgagtgccataatgtaaggagcatatgccagattttgattcttgtccattttcaaatcattaagccgcctcatcatgaaaagaacaatattcatgacttcaccattcatgatgtgctggatgatattccagaacttatcccgtattttactcttatcaccactcttgggaagaatggtgactctggcaatcttgttgatgacagcaggatgatgtctgagtcctactgtctctccaaacctcctgggtataccaagcctgtctggctcataaaactgcacaaaatcctcaaaattatcttcagtataaagatccagcccagcagaaatggtaccatagtccagactgttggcagcggcaaagtcagcaaaagaagcagagtagcgcttgaagccagtcatccaggtgatagattcttcttcaatatctatctctgaggtagccaggaattgcttaacagccatttcattgaaatctgtgcgttgtcccataaactgatataatccacatgtttcaaacttagggatgagaccctccatgactgattgactgagcaagaaggaccaatcaatcacctgatgcttatgaaaattagtatccaccagggtgccccaaaagacatcaaactgcagctgagtgtgaaaaaactggatatttgtatcagatggcagagtatactggttcacagtccgtttagagcagtactcagccatggaaaatctccgctttggataagtccatcattgggtatcaatgggataatcaggatgaacatgaggaaaatcttcagcatccatggattcagtgcccccagctgaggattgggcctctgaatcagtggttggtgtatagtcattatcatttccacgagggcgcttggatttaaagcgacctgcaagtttcttacggagaccaccaaaaccactgcaacaatgtgacagacatccatggataaataattgataccaatcaccactataaagaggaatggaactgtaatgctctgccagggtccggacggtccgctctaggggggccggactgtccgcgccagaggcccggacagtccgcgtccaccaggcggacggtccgcgaccgaccaggggcgactccaaagaaccctagccgccacaaaagtttaatttgatgattttgcagagaatacccatccaaacaagttcaaaattttgcatagcattgacattgaggagaactatcaatcccaccaatcagattttgaaacccactgctcaatttcagatcagagaggaaacccaaataatctcaaaatggaagaaatttgatgaaattcacaagattgaagataccgtgatgaagacatgttgatgaaatgttgccacaagctgtcggactgtccgcacgcaacttcacttcaccgtccgcgcacactcaacacaagagagtatttggcgagtggagagcaagagaggaagagcgagtgagcacaaatgacaagtctgcggccactggtcgactttactgccctgtcgcggacggtccgcgctggggcggcggacggtccgcgccctgatgtgtgcagacggtctgcgaggctgaacggactgtccatttcctgatgctgcggacggtccgcggtccatgggcggacggtccgcggcctgatactcatttttccaattgctgtccactttctgattttgaatttcgaatcagaattggtgctcatatatggacattttgaccaatccaagagttggtatgcatgcatatacatatgatgtaattgagtaatgcaaaatttttgaattaaactatctagagcaattagaaatgaaaaatccacaaataataccaaataaatagcataaagagcatacttagacccgagatgcaagacgacacatgtgtgatcaacttcaagccacatttgagatatcgatcacattcatttcacttcttagagaacaaaatcttgtttcatccaaaggttttgtaaaaatatctgctaattgatcatcggtgccaatggaataaatagagatatctcccttgccaacatgatcccttaagaagtgatgccgtatatcaatatgcttggttcttgagtgttggaccggattggtagccaattttaccgcactctcattatcacacatgagaggcacattcttgaaaataattccatagtccaataaggtttgtttcatccataatagttgagcacaacaatttccggccgatatatattccgcctcggcggtagatagagcaaccgaattttgtttcttagaagaccatgaaacaagagatctaccaataaattgacaacaaccggaggtgctttttctatcaactttgcaccccgcatagtccgaatccgaatatccaattaattcaaattgagcacctttaggataccatagaccaatattgggagtatacttcaaatatcttagaattcttttagcggccttcaagtgaatctctctaggagaagcttgaaatcgagcacacatgcatacactaaacataacatcgggcctagatgcggtaatataaagcaaaataccaattattgaacgataaagtttttgatcaaccatagtacctccttcatctaagtctagatgaccatttgttgccattggagtcttgataggcttagcattttctaaaccaaacttcttgagcatgtccttcaaatattttgattgacttataaaaattccatctttcaattgtttgatttgaaggccaagaaagaagctcaattctcctatcatagacatttcaaactcttttgacatcatttttccgaactcctcacaaaataattcattagtagatccaaaaataatatcatcaacgtagatttgacaaacaaataaatctttgccaattcttttagtgaatagagtagtgtcaaccttcccaattttgaagtctttggaaagcaagaaatccctaagcctttcataccaagcgcgtggagcttgcttaagcccatagagagctttagaaagcttgaacacatggttaggtcttttggggtcctcaaaaccgggaggttgttcaacatacactagttcactaatcttaccatttaggaaggcactctttacatccatttggtagagcttgatattatgtgcacaagcataagcaagtagaatccggattgcttctaatcttgctacgggagcgaatgtctccccaaaatccaaaccttcaatttgagtatatccttgtgcaactaatcttgccttgtttcttactaccacaccatcttcattgtgcttgttgcgaaacacccattttgtaccaataacattgtggttctttggtctctcaacaagctcccaaacttcatttcgagcgaagttatttaattcttcatgcattgcattcacccaatcaacatcaagtagagcttcatctacacggttaggttccatacaagatacaaaagagaaatgttcacaaaacgaagctatgcgagagcgagtttgaacacccttactaatatcacccacaatttgatcaaccgggtgatccttcacaatggaatgatgaattcttgataccgtttgataattgcttgttgaagcattaggaggaattgaaggtcttgaagtaccttgatcatgagtatccatggtttcattgagttgttggctttggtgatcttcctcatttatagttgaggatgagggaatgacaaccacactattttcatcatcatcttcctttggttttatttcaccaatgaccattgttttcattgcatttatcaattgagttcccccaacatcatcgagattatcactctcatcttgagacccatttgtttcatcgaattcaacatcatatgcttcctcaataataccatgagttttgttgaagactctataagccttactatttgatgaatatccaagaagaaaaccctcatcacatttcttctcaaatttagaaagccggcttccctttctcaaaatataacatttgcaaccgaataccctaaaatatgagatatttggctttctaccaatgagcaattcatatgaagttttcttcaagagcttgtgacaatatagtctatttgatgaatgacaagcggtatttattgcctcggcccaataagaatccgatatattatattccgctaacatagaccttgccatatcaataagagttctattctttctttcaacaataccgtttggttccgggttatatttggaagagaattcatgtttgataccctgtcatcacaatattgatcaattcttgcatttttgaattccgacccattatcacttctaacctttttgatgtcaaaatcaaattgattttgagccaatatagcaaatgacttgaatgtttcaaacacattggatttgtctcgtagaaaataaacccaagtaaatcttgaatagtcatccacaatcacaagacaataagaattaccaccaatacttacaaaagatgtgggcccaaataaatccatgtgaagtaattccaaaggtcgatgagtggacatttgacttttatttggatgagtgtttgccacttgcttaccggcttgacaagagctacacaatttgttcttttcaaacttcacatcttttaagcatcgaactaagtcatgcttgattagccgattgagttgcttcatcccaacatgaccaagtcttttatgccataaccaacctagtgaagcttttgaaaataagcaagttgtgagctttgcctcattagatgagaaatcaacaagataaagattttcatgtctaaaacctttaaacttaagattgctaccatcaacactagagataataacatcttcaaccgtgaaattgcaacaaaatcctaaatcacataattgagctacggaaagtaaattaaaattcaaagactcaaccaatagcacatttgatatagaatgatcatttgagatagcaattttacccaaacctttaacctttcctttacgattatctccaaatgtgatactatcataatttgagcaatcttcctcactcatttgggtaaacattttcatatccccggtcatgtgttgagtacatccactatccaacacccaatgattccctcccgccttgtagtttacctacaaaaggaaatcaatctcttttaggtacccaaacttgcttgggtccttggatgttagtgaccaaggtcttcggtacccaaatagctttctttttgtttccaacaattgaagtaccaacaaatttagcatgaacaccttttgcattatgagaaagaacataacaatgctcaaaacaagtggaggatacatttttgaacttgggacaatttttcttaatatgtccctttttgtgacacttgtgacacactttgtcacattctttcacaaacaatgtcttttgctttacaaaagcattctttcctttcttgggaacatattcaagaccttcactgttaagagagcatcgttgacttcccaatatgaaatccaatttagtcttaccaccatatgccttttctaagtcatgagttagagtatttattctatctactaacacttcattctcaacaataatttttgattcatcaagagcaatgttatcattgagagaaattttgcatttatcacaaatagagttagtaggtagtggttcacttgtaagactatcaagtaagtcacaagtgactccaacatccttagtgaccacctcaacttcatgcacaatagataatttttgagcatccgcaagcttctcacaattttctttgaggtcattgtgagaggtcttgagctcctcaaaagacacttggaggtttttatacaattccttcaaggtcttaaatttttctttttctttgtgcatgtagtcatcggcctcacctaacattctaacaagatcatcatatgaatagccatcatcatcaacatcatcaatatcatcatcatcttttatatcatttaaatcggtgatgatttttaccttagcatctccctttgccatgagacaatgggggggatgagaagagtgaaggagcttcctagatggcaattccggcattaagcgtgaatgagggtcatcagtatcatcatccgagcggtggtccgagtgccattcaactaagcaggcgttgccatctttcttcttgttatagtatttctttttcttttgtcactttcatctttgcccttcttcttcttgcttgggcaattcatggcaatgtgaccgggttccccacactcaaaacattttctatcattgaaagcatttcttctagatgtttgacctcttctaggttgacctcttttcatcttcatgaatttattgaatttccttacaaataaagccatgtcaccatcactctcactttcattttcttcatcattgctatcttctttttcaattgcctttgaggccttggctttgagagcaatagattcatttttcaccttctttgccaaacttaaagcatcggcttgtgacttcttaaatatatcttgagtgagaatttctcccaatacttcggttggagaagttgtagatagatcactccttactagcattgtcacaatagtctcatatttctccggaagtgatctaaggaacttgtgtgtgaaatccacatccggtacattaaaaccaagtcctttgagttcatttactatctcattcaaccgattgaacatatcggatacactctcatcttctttcataataaattgctcaaacttcccttttcacacatatagtttggcactcttcacaattgtagttccttcatgaatttccattagttttatccaaatctcatgagcggttgtgagatttttgatacgattgaactcatttatatcaagagcatcataaaagacattcatggcttgatcatttgtgaggatattctcattatcactaacggatggttcatcttccttcaatacaacaaatccatccctaacaattggccaaatttttccacccatttctctaagatgcattgacattcttattttccaataatcataattgtttccatcaaagtgcggtggcttcccaatatgcacattgttgttactagccattatgtcccactccgggatgattagatccacaaataatggagtcctcggctctgataccacttgaaggatctaggacactggctagagggggggtgaatagacggttttgactaaaatcaacaatactaaataaatttaatcaatacaacaagaggaataaattatctagtgtcaataagtaaacaatgtatgaaaaacaactacggagattgaatacttgaagaacaataagcaaatcactaatcaattgcaaagcaataagtaatgctaaaaggaatagacaccgaaatttatcccgtggtatcggtgatttgccgatcacccctaatccacgttgaggtggacttcaagctctcacttgctcctctatcaagacacgacttgatctttgagccaagtggacaagaaatcactcaatacctcgattccactaatgtcacctttgccgctccggcgaggtaggcgcgaacccctcacaatccacaccgcggcttctccacaatcttcttggagagctcgacggagacaatcacccgagccgtctaggaggcggcaacctccaagagtaacaagccaacgacgcttgctcggtgtaccacctagtgcctcaagaatcaccaaatgatgcaaatgcactaggaaccctcaatctctcactagaatgcaatctcaagcaaagagtgtgagagagtgagttggaggatcacaaatgagctcaatgtgtgcaaggaatggccaagagcactctctcacacgagctacccttctatttatagccccccccatctaaaaccaaccgttatgtgcaaaagggggcaattctgcgcacacgcggaccgtccgcgccctagggccggacggtccgccgtacatcataacggctataatgaccgttgaaccatgtcagagctgactcaaaaggtgggtccggacagtccgcccttcaaggccggaccgtccgcgacctggcaaattcaaacacccgagcctcggatcaaacggagttaacacacgcggaccgtccggctataaatcccggacggtccgtgacctgagactgtaatgtccggactggtcccccggacagtccgtagtacaaatctataaaaacacacagtccctgtccaaaaacgattttgacacttgcggaccgtccgcccctcacaggcggaccgtccgcctataattcagggactggcccgaagccacccttctctggtcatgactgcggacggtccacagtgccatagaacacaatgtcaatacaaatggtcagacttcggacccctctggtggaccgcggacggtccgcccctaaggcccggacagtccgcgcgtccatgacttcgcaatttttcaaacatgcttttgaaggaacttttgactcgcgaaatgaagcgctgttagtcctcatgcaaatgcaactacttgatgctctatgaggcactaagttttacacagatcgaagtcattgacccctcttaatagtacggctatctagcctactaatccggtcaggtatcttctctaaactcctcaagaccggcaaaagtaaaacctatattatacctttccgttcatctgatccacaactaatgcggatgattcttcaacatttcctgttctatgtggtccaaccctgcattcttatttcttcaagaatcgttagtccacaaacagttgtcattaattaccaaaacactaccaaaggggcctagatgattcacacctagggtagctggcccctgactacggagttcgtagccacggtccgtcgtcgccggtgaggtttttcccctcaaccgtcggcttgtttagagagagattaggaaataataatcttgcttgctttattccctgctgccatgtggcttataaatagccctatggctaaccaacttctcctatagactctcaactaactcctattttcttggacttatctgctgccaactaactctccacaattctctcatctcaatcttattctctaaccttatctttatttctaaatctatccactggttgtggcctcctcctgtgcgcgttcagcgcgctctgcagcgcggcgtgcgtcacgacgtcgcctatatgtgcgcccgcacatgacatctctccccccctcgagacccagctcgtcctcgagctgaaagtctgggtacttgctgcggaattcgtcgaggtcttcccaggaagcagactcggccggttcgcccctccagtggacgagaacttgacgcacgcctcgcgccaagcgtgcctgagtaacctgcagcggctcagggaccacgacgccgttgtggatgattggtaaggcaggcggggatgctggtggaacgccgacaaacttcttgaggacacccacgtggaacacatcatggaggcgcgcccctggcggcaaggccaggcgaacggcgacgtcgttgatgagctcgacgacgcggtagggccccacaaagcgaggcttgagcttgcccgtggtggtcctgggcattgaagaagctgcccgctgccgaagacgaaggagggcccaatcccctggctggtaggagacttgacggtggtgccgatcgtagtaaagcttctgggtcgcctgggcctgctctaggcggtaccggacctcctccaggaaggcctcccgagcctccatgtcccgggcgacggctgccaccctcgtctcccccggctcataagagcggatggaaggtggctctcggccatacaccacccgaaacggtgtgtcccgaagcgaagtctggtacgcggtgttgtaggtgtactgagcccacggcaaccagcgcagccattggcgggggcgatctacagtgaagcagcgcaggtacatcactatgactcggttggcggcttccgtctggccgtccgactggggatgaaaagcggacgtcatgtgaagcttagtacccataagcctcatgagctcctgccagaacgtcgaggtgaacacggggtcgcggtcggagacgatggactgcggaacaccgtggaggcgcacaatgtcggtgaagaatgcctgtgccaccgtctctgccgtgtacgggtgcacgagtggaatgaagtggcagtacttgctgaagcggtcaaccacggacaggatcaccgtcttcccattcacgcggggtagcgcctccacaaagtccagcgcgatgtcggcccagaccgtcgagggcgcgggtagaggcaagagcaaccctgctggatggagatgctcggacttgtaccgctgacaagtggagcacgcccgcacaaattccagcaccaaacgtcgcatgttggggaaatggaaatcacggcggagccggtgcagtgtacggtggacgccctcatgcccgtcgccgtggacggactccaaaatttcttgcagtagtggagaggcggggggaatgtataggcgcctctcgtaggcgaccatgtcgtcgacgaccgaccagggcgcggtgcgggtgcctcggcgcacctcgtcgtggatggccaccagtgccggatcgatagcctgggcgtgacgcaggcggccgatgaagtcaaagcgcggcgcagaaatggccaacacggcgccctcctcagcgtcgcggcgggagagggcgtcggccaccgtgttcgtggagcctgaccggtactcgacggagaagtcgaaccccagcaacttgccgacccaatggtgctgcggaatcgtggcgaggcgctggtcgagcaagtacttgagactatagtggtccgtcttgatggtgaaacgccgcccccaaaggtatgggccgccagtggcgaacggcctggaccagggccgatgagctcccgctcataaagctgcgagggagcggtgacgtggagccactggctgactgaagaaaagcaatggggtggccctcctggacgagcaccgcgccgaagccgtacgtcgaagcgtcgcactctacgacgaactgcttggtgaagtcagggagcgacagtacgggtgcggatgtcacggcctccttgatagtactgaaggcccccgctgcgtcgtcgttccatcggaacccctcctttttaaggagagcggtgaggggggctgcgatgatgccgtagttgtggacgaatttcctgtagtagcctgcgagctcgaggaatccacgcaccgccttggccgagcgcggttgcggccaatcacggatggcctgcaccttggtcggatccatggccacgcccgacgccgagatggtgtggccgaggtaggcgacggtgtccacgccaaaagcgcacttggaacgcttaacgaagagacggtgctgtcggagcaccgagaggacgacgcggaggtggcgcaggtggtccgcccaggatgagctgtagatcagaatgtcgtcaaagaagacaagcacaaaccggcggaggtaagcgcgcaacacgtcgttcatgagagcttggaaggtggctggcgcgttgcagagtccgaacggcatgaccaaaaattcgaagaaggcgtcatgcgtccgaaatgctgtcttgtcgatgtcagtcggtctcatgcggacttggtggtatccggatcggaggtcgagcttggtgaagaagctggcgccatggagctcgtccagcagctcgtcgacgaccgggatggggaacgcatccttgatggttatggcgttcagcgcgcggtagtcgacgcagaaccgccacgagccgtccggtttcttgaccaagagcaccggggacgaaaacgcggagctgctgcgccgaatgagcccctggtccagcatagctgtgcactgacgctccagttcatccttgtgcagggcagggtagcgatacgggcgtactgccactggcggcgcccccggcaccagggtgatgctgtggtcccgactgcgtgggggaggtaggccgcgaggctcgctgaaaacgtcgtcgaagtccgccaagagctcgtcgaggagcgtactggtggcggtggttgtgctgacagcagccggtcggcaggccgcgagcccctgccagcagaacgccctgccctggaaggtgaaggagatcgcgtggttgctgaaatcccacatgatcggtcccagcgctgccagccatcgggtgcccaggaccacgtcgtagcccgccaaaggcatgacgtataggtccgcagggaagcagtggccgccgatgtccagtggtgcgttgcggatgacgcccacacacgcgacgcgctccccattcgcgaccatggccgtgaggcgtggccggtgttcgaggggcaggcccgtgcgtgcagccgcgacttctgatatgaagttgtgggtgctgcccgaatccagcatggcgacgagggaggtggtccccagcgtgacctgcagctgcatcgtgtcggtgagcgccacgcccgcaagagcttggagggagaataccggggtctcctcagtcccggcatcctcgacagcctcatcttcctcctcaaggccctccagtaagaacaaccgcttacagatgcgattgtggccccttgtgaatttgtcgtcacaattgtagcagaggccaaggcggcggcgctcttcttgttctgcctgcgagaggcgcttgatggtgcggccttcgacagtaatggtccccggcgcgaccggtttggctcctggcggcgcgggtagggccagccgggcggcaggggccggcagtagaggacgcccaggagcgcgcgcggccggggcgacgaattgctcgcgcaactcgaattggcgcgccagactcatggcggcggccagcgtctgaggattctggatcctgacgtcgatgctgagtggcggctgcagtccgccgacgaagagctgtacccgctgtgcctcctggagtggtcccgcgcgaggaagcagggcctggaaccggtcctggtactcggcaaccgtaccggtacacttcgctagtttgaccaacggtgcggaacgcaggggcggcccgtaccgaaggtgcagcagctccgtgaagcggcgccaggatggcgtgccctcgtcctcctggaccataaggtaccaacacctgtgcgccctcctcaaggttgtaggagaccatccataccttctcctcctccacgatgcgctgctgatggaaatacgattcgcacctgctggtgaaaatcagtggatcagatttcccatcatagcgggggaaatccatcttttgaaagcgaggcggtcgatcattgtggtgctgcccatcattggtcccatggccgcccgacgaggaggtctttcccctctggagctcggcgacagaggattggagggcggcgaccgttgatgtcagggtctcggttatcttggccaaatcagaggtggttggctcggccatggtagaggtggtgtcggcgtaaggcggcgaggttggtgggcttggctgggattgcggctgggtggaagaagaagtcgaggaacgactggatcgcgataccaggttgtcaaggacctcccgacctagggtagctggcccctgactacggagttcgtagccacggtccgtcgtcgccggtgaggttttttccctcaactgtcggcttgtttagagagagagagagattaggaaataataatcttgcttgctttattccctgctgccatgtggcttataaatagccctatggctaaccaacttctcctatagactctcaactaactcctattttcttggacttatctgctgccaactaactctccacaattctctcatctcaatcttattctctagccttatctttatttctaaatctatccactggttgtggcctcctcctgtgcgcgttcagcgcgctctgcagcgcggcgtgcgtcacggcggcgcctatatgtgcgcccgcacatgacagagttgctctaatagcataggagggcaagtataaaagagtaggccagtgcctcgttgagcttcttttttttctgttctgactatgttcatatctctctgtcctttaaaagacaaacaaatggctcccaggctccagcagcactcattatgaagtacttgtttacacagtgtagcagattgagtttctaggcatttgtgagcttttgttactaaacgtctgaaacactttatacctgcaggttcct

SEQ ID NO: 1166 - DNA, 4558 bp, Zea mays
  Intron number 1 from transcript GRMZM2G181542_T01 (locus G RMZM2G181542) derived from phytozome v7.0 (chr-ID 9; pos 1 48206583 to 148211140 reverse strand)
acccctccaaggtataaacattgctgtcacactctccctaccgttggctagctgggacaagaggtgtttgatgagatcaaaccgacaatcgaatggaatccatgcaatagcttctctccgagaaacaaatgttgtatataaacctagacggagctgattgttggatctattagcagtgtgcaataatgataacttgataaacatttctatgtgttcgattaaatttcgaagagtggtttcagtgtggcaaaacgtgtgcaagttgtgctgttgttactagtgttacttcaacttgagtttgttcattagtgtgctatgcagtacggatacagatagacgtatcagtatcggaaggatacacatatgtggatatggcatttattcagaaaaatgatgcacctatacattttatttttttaataaataaataagaatgcaaattaaaattgtaaaagtcaaattggagggtccatctatttgatgcacttgcgccgcactacccaaatttggagatgccatctattcaatgcaagcaatcaagcatgggaaacactaatcatgaaggctgaaggagatgtgaggaacacacaaagtcaagcaagcagaactgcagaagttgagtagatcaaatatgaaaaagtgatgtgctcatggaagatcgtcgacagcttgctttgctgctgaatcgtcctcttccatgcacccacccctgcatcgtgggaaactggaaacttgccgctgccatggcagactagtgggtgctccccatcacggtgctcctggcgcaacggttcagagagaagttgattgatggagcagagggggcaagagcttctctctagaggccggcgagccgtgccgcacctcctgtgcagcgcacgtgtgcgcagcaggcggcgtgagagggtgggggctcgtcgccagctggcggcggcggtagctggtaagtggtgacacatctctagagctggaagcaagcgcgtgtatgcgcaggaggcgggcactgtgcaaccatgccaggccttggggttaggtatgggagataagggagtacttgttgggctaggctgtattccataggctgatacatatcaggtcacatactctatatttcctaatctaaacaaaactcgggtactcgcaggatatgtatacaacccgtatcggtggtgtatgcgtatcaaatacgtatctgatacgcgatacaacaccttcctgacgtatctgtgctacagagttagcatggatagttcatcgttggtacactttagccaatagcctaatacttagggcaattgcctaatttgttaagaaatgttttattttcttactcaaatgaaatttagaaatgactactaatggaatggcatgtttttcttgtgaaaacatgcattaatgtaacattgggagttttctatatagtttttgtttaagtttatttgtttatttgggattttttacggtcaagattttcatgggtaaatcaagcggaacactactaggtgctgatttgttcagtgtaaacagttgcttggatagtttcaagagatcaaggccctgttcggcatccagaagcgttttggattcttgcgagaatcggtagaatcactgccaaacaggtttgatgagaaacatttcactcgagaatcactagaaacatttctcatttttatgcctagcaaggagaaacacctgctagctggtttcgcgtgattctgattattggccccccttctgtataagcaaccacaattttttagttagttctttttaagtgaaataagttaaaataggctgtatttaggttattcacccataaaaagttctgtttttaagaacatttttatttacatgttttttttataaatatatattttttgaatcagaatctagtctaccagccaaacggttttacgaagtgattctgattcatcaccaataaacatttcttgagacaatctggatctgaaatgtttctgtgagagtttgaatccctaccaaacgcaccctaaattgattaggaattagcatagctatattgagattcagcatcaagaaaccaaatgaagaaatcactaaacaaacacaagtgtctacaagtgaaaccagttagcaggcttaaacttacatagactaacataagagcatctccaagagcctctcttaaacttattctctaaatcatcatttggagagccatttgaataaaaaccacgctctatatcttttcactctctaacaactttgctatatctcttgcacactctagagagccaaccccgctgtccatcattggctggcaagaaatttggaatagagaatgtccgtatttggatatctaatttaagaagttggagttttttttcaccaaaatatctattcctatgaattaggaaggatataaataggttcttggagttgctctaaagtctgactaaccttagtggctatggattaggcagttggttcagttatggacagtattctcttatacttctgaacaagcacttgagctgaggacttacaaatttaaggggattgaaattaaaactagattttttttactataattaggatgaagctagctaccgcatgagagcttctcttctttgttttcaaatctcactattctctgcttgcctactggcagggtagcacttgtgagaacatgagaaatcaagcatttaaattaactcaggctgtcaggctttcaagttgctgagcatatcgatattctcaatatttgtaggtgctctagctacttagctagtgtgaagacatgaacgccagcacttaatattaatagtttcatcatgatatgagcatatcgatattctcaatatactgtatttttagccttttttcatacaatgtagaagatattatacaaataagaagcattcatttacatgcatataaaatagcacatagtacaatgtagtaaggagtgacaacctttcgttctttatttctttttaaagaacctcagtcgaattattccaggttacagcaatacccgtggtgtctatttaatagttctacattagctatttgttacagaagtgtctaatcaccatcttatgcctgcattggtgtagttcatgcataacatcatcaatatatccattcatgtagttggccaagctcatcagggaaatcatgagatgcagcatttgttaccttcgtcttgtgttcctgtcttcctgatgctcatttgttgcgatcaatgcattgccatggatatgaagtttctgctgttgcttttgttggcattgttgcctactcagttttgcacaactggtccttggagtttcagtctgcccattcatttggttatatgcctctgcacgtggcaagaaaaccacatttcctcttttgctctgttttcctggtcgcaaaacagttagttgctgctttgccagagcaaatcttggcagattaatggctcctttcattactctgtcgttgcacagaagtatccatgttttcattatcttggtgttgtcactgccgttagcgatgtgaatttattttcgcagcctatagagtatagacttgtcgcttggggggggggggggggggggttgctgtctgtactccattgtgacgttgaggattcttgcaagatgcgaggcaagttagattctaccataatctaacttatatataatttaggagataatgatgcgaggcaagttccattgtgtgttccttaattcttagctgattatgtagtgatagtaagtagggtctaaactagttttttctgagattatctctgttctcataaatttatttgtactgcaattcaaaactcatatttttcttgtttccgtcttcctgaaaaaatatttttgcaacattggattgcaaaattattgaaaattaattttaggctattactgatctatagtatgttttcaggatttattccatactttgaagtaaattgacgagcacaactatatgaatttcaggattttaaaaatttaaaaataacgaatctttatgggcttcaaagtttttgtctgggtcatgtagttgatccacatgaacagttactgaattatctaggtcgtgtagctataacacagcactgtaattccatagataggttaatgttatcagtgagggtaagctttagacagacactactccagaaattggtggtcttagtttagaagttggtgctccatgcatggtaactacggaaaatcagcaagaataagttagaactgagaattgtttataacagccctaactcatttctgtcagcaatctagtttgctgcctgttattgtacttatgcgtgacactgacagaacaagaaaacctgtgcacggaaaaaaaactgctcaggttttgagctgctagcaggtttccatcttgcttcagtcatattactcctgttacctttttcttttctctaatccgtaaatttctaatgagtaaatgctgttgagacatgagtgtttggttacatttttacctgcaagcttaaacgtttgatgacaaatcatcagtcagtttgttcccattggcctgtaggtgacaccag

SEQ ID NO: 1167 - DNA, 7174 bp, Zea mays
  Intron number 1 from transcript GRMZM2G146472_T01 (locus G RMZM2G146472) derived from phytozome v7.0 (chr-ID 2; pos 1 37979443 to 137986616 reverse strand)
cggcagctgcagcggccgagggcggagcacgcgaggtgagattcttttctccatcccctaccctccctcccttcctcctccgctccgtctcgattctacgcggcttcatggattcgggggccggccggcgcggcggcggtcctctcgctgggtggaggctctgaggtcgggggaggcgcggggttgaccgggctgttgggcgcggcgtggggacacgggtggtcgtcgcctccagtcccattcgcggcgtcgttgtcacaggcgcggttggggctcagggcgatgcggttttctaccccttttcccgaagggatttgggggggctttaggggccgcggccggcagcgtttctggctctgctgtgatgggcgcgtcgcggcagagttcgatttcgtgttattcaaatcgtgtgtttacaactgtgatttattacctgcccatttttttgggtggggtggcgtgaggggtaggatacaattggaaatttgtcagggtcgaggttcatttcactctgttttacaccgtcagtcactgcaccgtttgatactgtgatgacccttggcctgggcggcgattcgccgagacgtgagactctccagggatcgccgacgagacacagataagtttgttcaggagtctgttttcctattcatttcatatctccctctgaacaactcattacagtatttatagatgctcaacctcacctgctaaaccggctaatactctggctaatccacttattacagcccagtatggcgacaatacggccttataatagcccaagcaactattacaggctcaatcacttagaacatcacagattacagactaatacctcatacctgctacgaggatcctccatactcgctctaggcatcatcttgggccatcacataatcacatctcccccggggccaaaagacgcttgtccccaagtgtttgctgctggaaaccttgcggtcttgccttcaccactgcatagtcctcccaaatagcagcttcagatggcagtcccgtccattccaccagcacctggacaatagcatgattgcctttacgcaccatccgccgattcagtatctgttcaggttcaatgccctcttgagacatgtcaactagcttaggtagttcagtgaaaaccggagaatagcatggatgaagcggcttcaactgagacacgtgaaacaccggatgacttgagcatcagcaggtaactccaatttatttgcaactgccccaattttagctgcaaccttgaaaggcccaaagaatttgaatgccaacttgggacaaggccgattcaccactgtcttctgtgcatatggttgcagttttagcaaaacaaaaccacccacttgaaactccctaggagttctgcctttgttagcgtattgcttcatacacaactatgcccgagccaactgttccttcagcattacagaaaaagtatttctttctgtgacccaatcagtgacatcctgatcctcaatggcaatgagccttggaagtgccagcataggggcatcatatccatataacactctgaatggtgtacaccccaatacaccatgataagtagtgttataccagtactctgccagagccaaccaactcttccacttgctgggctgagagttcacagcacacccgagatacatttccagacattggttcacacgttcactttgtccatcagtctggggatgataagctgtagacaacaacaacttgacctccatgggctgaaacagattcttccaaaaactgctagtaaacaccttgtccctgtcagatactagagacttgggcaccccatgcaacttaaccacattatccagaaatacttgagcaacacccctatcagtaaaagaatgtttcaatgttaagaaatgactatatttcgaaaatctgtcaaccaccaccaaattgtatcaaaaccttctgatttaggcaagccttctatgaaatccatagtcacatcttcccacacaccttgaggcacaggcaggggttgcaataaccctgctggatgagttctctcacacttagccttttgacaagtaacacactgatgtacaaactgaatcacatcagcttttaaccctttccaatagaacactttattcacacgctgatatgtggcttgtattccagagtgtccacctattgcactatcatgcaaagctgcaatcagcttagttcttaaagctgagttagcaccaatccaaatacgacccacctttcgaataataccctgatgcaatgaaaacccatgttcatcaggacttcgaaccagcaactgagctatcatctgttgggcctctttaacataagaatttaacacctcctgcacccaaactggctgcacttctgagatagcagctaactccaacattgaatccctccttgacagagcatcagcaactacattctctgaccccttcttatacacaatttaaaattgtaaccccattaacttggccatggctttcttttgaagatctgattgtagctgctggtctcccaaaaatgtaaaagacttgtgatctgtcttaatcacgaaagcacctctctgcaaatactgcctccttatctactgccataatcaaggccaggaactcctcataatagaaaggtgtttgttcttctctcccagagccttgctgatgaaagctagtggcctgccttgctgcatcaacatggcccccaaccccacatctgatgcatttgtttcaactgtgaaaggcaaatcaaacctgggaagagcaagaactggagtagaagccatagcctgcttcagtttttggaaggcaacctgggcctcttcagaccactgaaacacttgctgtttctgcaacagagtctagtaaggggtctggccaaggttccataaccactcacaaatttcctataatagcctgttagatcaaggaaccccctcagctctgtcacattcttaggtcgtggccaggtaaacttggcttcagttttattaggatctgttgccactccatctctagaaatcacatggcccaaatacttcagttcgtgcttcactaaagagcatttcttcaactttagaaagaattgatgctatctaagcttggttaacaccatcctgatgtgctggtaatgaacctccagactgggactatagatgagaatgtcctccaggaaaaccatgacaaatctcctgagaaagctctccaaaactgagttcatagcacactagaaactagctggagcatttgagtccaaaaggcattaccctgaatggtagtggccatgatgtgtcttaaaagcagtcttatacagttatactcatcctccactcccattcttatttgatgatagcctactgtcatatctagactagtaaaatactgagcaccagctaactcatccaaaatttcatccaccagaggcatagggaatctattcttaatagtcatcccattcaacttcttgtagtctatacagaacctccaactaccatccttcttctgcacaagcaacactggtgaagcaaatggactgacgcgagggactatcaagccttgctactagcagctcagaaacttgcttctcaaactcagtcttgtgagctggtgaatatctctgtaaggccttgaattcactggaatagaccctggtaataaaggaatatggtggtcatatggtttgatagggggcaaaccagtaggcactgcaaacacatcttcaaactccttcagaatcctctacagaacttcatcaacttcaccagcttccttttctgaaacctcctccagcatcacaaaaacccaaacttcatctcccttcacccattttccaactgcatgtctgcatcacagacacctgttgtacctcctgcatctgcctggcatctccttgcaacctcacctttcttctctgatcaataaaggttaacaccttattgatccagtcacattgcataggactatgctcctttaaccagtcatatcataagatcacatcatatacctccaggtccaacactctcatagcagtgttgtacacacatgcccaccagatctccatatcacttcctttactcttttgtcactaatcatgatttctccattagccaccttgagtctcacagctgagcaatcttcagtaaccaaccccatctttactatcctctgactaataaaagtagttgaactgcctaagtcaatcagcatcatcaacatctgatcctggatcaaggcttggaccctcatacaaccatcacattctgtaccattaatggcattccaggacagttggcacaactcctgtacacacttctcctcatgctccaacttttgcaacacctcatcagtcaacaccaaccccatatcttctaccgtcagattatgcagttgggttaccactctctttggacacttcactatcaggctggttcaaatttgtctccacaaataaaacacaacccattcacccttctataatctcttaactgtctttccttactcaactcaagatacaaggctccagttctactgtcacccctgcctcccatgatctgagtcttgttccccttctgattcttcatcttgttactctcagctatctcctgatacaacttggctaacctcataagccttagccacagtcttaggcatctgggccataacttgagtttggatttcagacttcaaccccgtcacatagtgtgtcacaaaggtatccaactctgaattatgcagggtcgttgcatacctgatatcatcaaaggcttgagaatattcttccactccatgctgctgcttcatactaaccaacgtccccatggcttgaggatattcttctacaccaaacttctctctcacaacacgaataaactgaccccaatcaggcaatcacctaatccatagttcttatacacttgtagccacttagaagcatttccttccatgtgcatggacgcagtgtgcgcccaaatccatttgggtacctgatacaccgtgaaataatccaaacacttgtcgaaccaaatactcggatcattgccctgaaacgtggggaaagaccacttgggcagtgaatttgatctgcactcccttccaccaccccacggctccctccgatctcttccccgttctcctccaatatctctaccctgatcatcccaccgaggaactcgacactcaagctcgggatgattgtcgttaccttctagctccttcgtctgcaacttcagcctcagtcgagccaccgtcttctcggtctcgtccatctgtcgaaccatcatggctcgatcttcatccgccttcttctgaccgacctccatggcttcaagcttgtcagtcagtcactccaccaccatcatcatccgtgcccaacgctcctcccccttctgctccgctcctgccatcgcttctagaagaatctgggtttgcaccgatagcttcatggtcggcgctgttgtgcaccccctccaaggatcgacgactttgataccacctgtgatggcccttggcctcgacggcgattcgccgagacgtgagactctccagggatcgctgatgagacacagataagtttgttcaggattctgttttcctattcatttcatatctccctctgaacaactcattacagtacttatagatgctcaacctcacctgctaagccggctaatactctggctaatccacttattacaacccagtatggcgacaatacgaccctataatagctcaagcaactattacagactcaatcacttagaacatcacagattacagactaatacctcatacctgctactaaaaactcggccggggagggaaataccgccctcccggtattccgtataagaagagaccgaaacaatggtcccgcccgagaaaatccccgaaccctggccccccatcactaacgggccggcgtcaactgtgcactctgcaacggcccaaccggagggtggcgcacaggacatcgcagcccgagagcggatggggcacttcgaggggtttttttaaccaagcctgaaaattcgctcccgataggaatcgaacccagccacccaggacttggaggtggtactcggaagtccttcaccgctagtctagaggccctttcgctcatacctgctactaggatcctccatacttgctctaggcatcatcttgggccatcacagatacatgcgtgttgtaagctgtgtacttggtgcttcagacatggcgaaaatggatccttgtctctctctctctatacacacacttcatatatatgtttcctggatccattgcccattggtgcgaggttctggatacttgtacctgtttcataagggctttgcatcttatctgatgtggtgctcaacctgtcctttgttgttctagcatttcaatttcggtcggacatatatgttgctctcagtactgttagtctggaacatcaaagtagactactgtttcaggttattatattacatcaaaatcaaggctttatctaccaaagaaaggaacaatgaaatttgaaccttgagatagtgtattgtctgtattctcttatcttgtcaattatggatgtgggttttttttcgagtcgatgctgaattgctgattcatacttttcctgttgaatgatttaatcacaccagcatgatttgcttctgctaatatatgtggcttattgcttatttagatttaccttcacctatttaggttcaagattatccggtttaaagacatcagaagaggctgcggtagtgccaatatgtacttttagtattttaaacttgatttactcgtttccttcgatacatcatcctactaagtgcaaccagctcttagtgattctgtccttgtttagatatttattatggtttccaggaaaattctaaatctcggttgactcattcctacatacaatgtgccgaattttgtaactttcttctcttcactctttgttcatcaaagagacatgcatgttgttttgagcagtgtctgtacctttcatctttaacttggttgtaggtacggcttgatttcatggccttttaagttttaacttgttttcgatatgagttcttccatgtattatttctgcttgctctagggctctcttcaaaaatttacccgttaatggtccatttaatatattgtattgagattttcaacgacttttaggc

SEQ ID NO: 1168 - DNA, 2404 bp, Zea mays
  Intron number 3 from transcript GRMZM2G092607_T02 (locus G RMZM2G092607) derived from phytozome v7.0 (chr-ID 10; pos 147903875 to 147906278)
gggtatgtttgattttacttttggctttgctttttaccctctaaaaatcaaaagtcaaacctctaaaaatcaaaagtcaaatcaaatggctgcattcagaaatcatctttttctaaaagcacatttggacatgcttttagtggcttttaaatggaacatgtgaaaatatatatcgaaaaacttttaacgacttttagtagttttcaccgaacgatttttagctttttaacagctcgcagcccataacagttttttttcatagtcacagcccaaccaaacagacctatagtgctgctgagctgaatttatattgcatttttttcataccgcttactaccttttcttctcgatggagattattgtcacctgctggacatcaggggcgtccttaatgactgtctcacatagctagatgacgtggaacaaaaaaaataaaaatagtaatttatctcaccatcagtatttagtcttagctcgtcactagttagggggtgtttggttacaccccgctaaaatttagcctctgtcctatcgaatgtttaaacctccgttccgagtattaaatgtagtcggattataaaactaatttatcagccgaagattaaaagacgagacgaatctagttcagttggttgggtctatatttcatactcctatttaaaagtcaaacgcttgatgtgacccggactaaactttagcagtagcaaccaaacaccccgttattctcgttccaccggtacttggtcttagctcgtcactagttattctcgtttttcatatattttctatccagttaaaaaatagaatgtatagatagtaaaatagctagcaatagggattccctgacaatgcactgcggtccggggaggcgagtgggcagtgcaggtgagctacatgacctagccagtagccaggcgagcgagtttatacggatcacatgatccgcaatgatgggcggagcggagggaggccagttgacccacactgccactgggctgtgctgtgcagatccagagccggggcggggcggggaccaaccagatctcccacggggcatacgagatataccctatcctgcccgcgcacacgagcctgctagctttagcgcagcctagctagctcctccagactactactgtcctcttccagctctactcgacttgacggtgatagaatatatctcaattttgccaatattttatgtggcttaaaataaaatactcgagtatacaatacatcctgaaatcaatgcctatctatgataaaagatatcagctttttttttatctcacaccatatccaaccggcccagacacactcccgctccctctcccaccatcaaatccacaactcaaatccgactcatatccaaccgagcagaagactatgctctctttctctgtagcctgatgcaacaggtaatgcaatataacaatgccgacatcgatgaggacaaaaacatcgagaagtcactccacatttttccaaagaaacacatgaaggccatcttggtgatgcagatgctactagagatggcaacagatataatacccatcggattgtattattcgatatacatacccatcaaaaaaaatctaaccattggcaagtctctctaattggtctctttgacagaaatgttggagcagtaaagctcggggtggataataagtatgtcttggtcttgggaagaaccacatattccatgagaacaggtctaggtcaaatgttacttcactacgagctgcttcaacaactacctcaacacttagaaccaactgctctctaagtcacttgggagggtcaagtttgaggagcttggtgctagactcggaatggtttaaattcctcggaagacatcatagacttgatataatgattgaagacttgatgtcaacattttatcttcattattagcatctaatttagcagttctaatacattataactttctttgttccaaatctgttacctcgatcttaccatggtttagttggattcaaatgaaaaaaaatccaaaaaactatgtgaaccgtgctactaccataccagggatccaatccatcgatgcatgcagtgcaatacaagcactgaataagttctcctaggtacaggttacaggctacagaagaggaagggggaagatctcagctcagaagcccagtcagagctggctagctagctgctcttgcttcatttcaccgccccaaattcagcatcgctcgtacttgctgctactttaatggtagtgtttggttgaggaggcaagtagaacggagccgttccatccctgattctaggaacggagtcgctctattctatgtttggtaatctggaacggagaggttctgttttttgtttggttgcagagtgaacggaacggagcgtcactgtgggagcggga

SEQ ID NO: 1169 - DNA, 11861 bp, Zea mays
  Intron number 1 from transcript GRMZM2G427444_T05 (locus G RMZM2G427444) derived from phytozome v7.0 (chr-ID 5; pos 2 09947952 to 209959812)
tttaaggattggtagtgggtggatttcttgtaaatttatttcaaacctaaattcgggttttatgctatagaaaatagaaatacttcatgatgatgaatcatcaggttaagatcgatctaaaccaatccattttatatatacatacgacatgccaacggttaaacaacttattagaaatgcaagacaaccaatacgaaatgctagaaaatcggccgcgcttaagggatgtcctcagcgtcgaggaacatgtgctagggtgtatgtgcgactcgttcagatcatgagttcaaacaaataataaaatttttgaagtatccatgatcggtaccaatgaataggatagagaagctctatcctagatttctatggtatatggaatttatggtttcctttggtgcaaatccaatcatctagattggaagaagcaattcccccattggtaacaaatggttatccattaagcggaggaaatagtaataaaaagaaaaaggcttatgctcctttatcttaaaagaacggactaaagggtcagctacttagccaactttcataattaaataccgtcactgtatgaataactcttattgtgaaaagagttatttactctataatggataggtagagccaaagaatgtgaactatacaagttcacaataccttttgatgaaagaaagggctccggtgtatagagagggcctcgccgtttaaaagggaaccataaaaacgatggaacccactatttttttagtatcgttagaatttgttatttctatgcgaaataactaaatagaataaaaaatcgtggttgggaaggttatagtagcaaaagccattggaattaatattttatatatcggaataatccgtttagttattaatgggaaaaaagagggttaaaagaagagaaatcattagttattcattaaggttaatttgattcaatgaccagagttccgcgaggatatatagctcggagacgacgaacaaaaatgcgttcatttgcctcaaactttaggggggctcatttaagacttaatcgagtgattactcaacaagtaagaagagcttttgtttcttctcatcgagatagaggcaggcaaaagagggattttcgtcgtttgtggatcactcggataaacgcagcaacacgggtatataacgtattcaatagttatagtaaattaatacacaatctgtccaagaaggaattgattcttaatcgtaaaatgcttgcacaagtagctgtatcaaatccaaataatctttacacgatttccaataaaataaggatcatcaattaaaggataaaaaagtaatatacaggaataattaaaaccgaattcccggagagggaactccgggaagatacaataaattaagattaagtggtaggaatcgacgagcatgttgcaataaataaaaaaactatttattttttcccatttttctttcttataacaaacacaagaatccaaattggattactttactttatatatgagtctgagtctttcgaataaaacatcaacaatcggaacttaagtttcgattgttgtttcttaaattctggttggagtttcttaagtttcgattggaattgaacttttgtgttaattgaggaatatgtctattttttctgtgtctaggaccagtaattattgaaattgcctgggcttgaaattgcttctcattctcatagttacgaaatggtaagaaagataaaatacgagcctgttttatagcaagagtaattaatcgttgttgtttcaaggttaatctatttattcgtctagataatatttttccttgttcactaataaatcgattaattaaactcatgtttctataatcaattcgatcccccgggcctattcgagaacgcctacgaaaaggttgtttggatttacgaaaaggttgcttagatttacgaaaaggttgtttgaatttacgaaaaggttgcttagatttatgaaaagtttgtttggatttacgaaagggttgcttagatttacgaaaaggttgtttagatatatacatgatttattccttattttaaaatttgaaaaaaaatggatttctttcttttattaatttttgatccagaaccagaagaagtagtctttctttggtccatatattatttgattaaatcaaaatatactatataaattgattaaatcaaaatatactatataaaaatataaaaaatccaaatatataaaaataaaaaccctctatacatatgaaataatatctacctaaaatcagatgagttgatttgtatttagtattctatctatgttctatatatttaataagaagttcttactctttctgttctttggaaaaatcgaacacacgatgctcctatttctttatttcattatgagtggtatgcttgcgacaataacgacaaaattttcttaattctaattgtccgggcgtattgtggcgattcttttgagtactatatctagaaatccccgtcgattccttattggtaccctttcgaacacaactaatacattccaaaataactcggattctaacatctttgcccttggccatgaacctcctttcctttttggatcgacttaacttaattcttatacctattcttttattcttctattttggatccaaagaaaagaagaagaataaaatccatagaagttcctaactaaaaatgtgatttctaaagattttgttgtaattcttcgaattctcgaacaaatccaatccaatagaatacaaaatttttgaaattcgtaaattaagtaataaaacatagagaaataattaaagaatacaatccttatccatcttttctttctttttgcttcatatactaaaaaagaattcaaaaaggggaaattttcgtcatgtcacgaagaattctatctctcgcataggaataactagaataaaaaaaaagggaatgacaaagcatctgggaataaacgattgatttctatcaataaacctgctaaagccccaaaccatagagtacttagcacgggtgctacagagagatatgtttttatatcccgcattgaaaatcctccttccgtattggaatacatatatgatcagatactcttgcccaagatcctttgtatttcttttgtttaggcgaaattcctaactaaaaaaacaaaataaatattatatatatatagaatgaaccgtatagacgagattttcctatccctaaaaaagatgaccccttcttcctatacattactaaggaatagtagtctttcttttataggtgaaatttgactggattttagtttataccccttccttgattatatgagaccaaaaacaagaaatgacaagaaagttctatatggataaagaaatagaagaaaattacgatgtggaaaacaagaaaggaattgtgtacaatggcattgtacaacaatttggaaaagggatgtagcgcagcttggtagcgcgtttgttttgggtacaaaatgtcacaggttcaaatcctgtcatccctacctattaattctctcttcgttatgggcagtagtggggagatcgattaaagtgggtataacttgaatttgtggatactatacggacgtgagacacgttaggaatagaaaaggattttcttttttttttgttttgaaagcgctcttagttcagtttggtagaacgcgggtctccaaaacccgatgtcgtaggttcaaatcctatagagcgtgattccatatatcttatgtcgaaactaaaataacttaaaaaaaaacaaagtagaattgcaactccaatttgacctcctccagaccagagaggaggtcaatcaaaaaagaaatattactcaatcaaagatccaactgatccccacgcctgtattgcaaatacgcagtcacgaataatcccgctaaagtaataggaattaggcctaagacgattccaaatagaaaaacttcaatcatttcgatttgttcgaggggataaaaaaagaggtacgatctatctctaaataatagtctaaactacccacgaatctcaatgaccaagaaaagaattggtaattagtgtggaaaagagtctagaataccaagaatccaaaagaaagattcttctattcaattcatttcaaataagacgtatcttgttcaagctaataaatagagctggggttatagttaaagcagccagtagaaaaccgaaataactagttatagtaagcatgaaggggttcaattccattttttttactacactacatatgttggtaaagcacttacctaagtttaagttatggaaaattcataattcatcggttattttagataatactaaaaaacaagatagagtgagatacagaagtgtaaaaaaaagagaaaatcgattcatcagacggaacatgagtccctaattccgaatcaagagatttgttgtggaatctgtcagttaagtaaactaataatattaagaactagatcatctaaccccattgaaaaatgaaattggattttcgggagaattttggaataaaagataaataaagaattgaatttgaaaaaaaaaattctttctatttcggattcggattatttcttttttaataggatggatttcatcctctttttggagcaaattttaactcattgtattccatatggaataagaggagaagaaaagcattccacgacccccgaggggccccctcaaaaagggaactattccttaaatttacttttttttatttatttttattcgttttttgaaccccaacaaaagtggattcaaagttacttcaattatccttttcttttaagttcttcttgtaaagttccatgcttgctgtttggtcaagaaaattagacctaatccaacaaacaagacaaggattgattacgaatcttgattcttcaaagaatgtattccgtttctttcataacggattatccgctattcgattttctatttattagatattattttatgctaaccaattaaattcctttaactaaaaaaggatcgattttgcatatacttatctttgtattgcgtcaatatgagaatatccttcctaaattctttatcttattaatcattaacttagattttcccaagatcttggccgctattccaaattaaattattctactattccgaagacaatgaaaataagtaggacccaaaaaattgtggggttctattgatgccttgaataacatgtaattttcctatagacaaggaacaaaaaagagaaaaaaggaattctgtttcgggaccaagcaaaactggattgctgtgccataggaaggatagctatactaattcggtatactcaaaatacacctttggtacaaaattgacaatctcacaaggatgaaatatcagtaattttctatttactggtggatcccatcttttacggaatcaattccttttttgaataaaaattttgggagctcagcatgtctggaagcacgggagaacgttcttttgctgatattattaccagtattcgatactgggttattcatagcattactataccttccctattcattgcgggttggttatttgtcagtacgggtttagcttatgacgtgtttggaagtcctcgaccaaacgagtatttcacggaaagccgacaaggaattccattaataaccgaccgttttgattctttagaacaactagatgaatttagtagatccttttaggaggcccccaatgaccatagatcgaacctatcctatttttacagtgcgatggctggctgttcacggattagctgtacccacggtttttttcttgggatcaatatcagcaatgcagttcatccaacgataaaccaaattccaactatagaactatgacacaatcaaacccgaatgaacaaaatgttgaattgaatcgtaccagtctatactggggtttattactcatttttgtacttgctgttttattttccaattacttcttcaattgagagaaagaaagagagtagtaagaattctcttatcccatttggaaggataccatctttataactatccatgactgtttttgtctctagcatgaccacttgagaaaatgtggaggaaagtaggggaaatggccgatactactggaagaattcctctttggctgataggtactgtaactggtattcttgtgattggtttaataggtgttttcttttacggttcgtattctggattgggttcatctctatagtaatcggaggatccagattgtaaacatgaaaaagtaggaacttagcgggtccttactcccctttatctgattagagcggaaagggcccgcggaattcttattgttataacgcggttttgttccataatctagaaattggttacctatttctatttgtaaaaataacaaagagaaaacctttgctctgatggttggaatccctccatttattcttttgtttgttaatgatgttagtgagtgaagcaatccatcggtcgatttaaagcccccgcctttcgcccataaaatggattcactcttatgaagcaacaagaaagaggggagaggatccagtattttattccatgaaggaagtatcctgcaaatcgttgatttagtttagagtaataaactaataaaaccttaatcaaaactactcaactagcctaaaaatcaaaaccacccttccatgggagggtatagattttttttacaaaatttctgtaagttcaaagttgaacttaattcaaaaagtaaagcaattctatttgctcacaagaaatgtgtcccccgccataccttctttccctctgtttgtccactaccgcgcccgaacctaagcaaaggaagtccaaaagacagacccgaataaagaataaatagtaatctttgacaaaacaaataagaagaaaaatgattcttacttcgatacaagaagaatcgacacaagaaaaaggcaaaaaagcctttttcttgtgcccaatagaggattaagaagacccacaattcctcctaaaaggacttgttccttttattgttctcgtctttgccttggatcctcttcttttgcatgagatagaaataaggaattccagaaatcgaggcttttttctcacttgatggtaagaaatcccaggatctagaaattcatttcgtacaattgaaccttttcaaactgtttctttttgagaaccaaaaaaacttgtgccaaaataacagatgcgaagaaaaacaaaaggccttggacgcgcaatggatcctgaagcactatttctgcatccccctgaccaaaccctcctacattaggattgcttgttaatggttgatcaagcttgattgattccccctctgaaacaagaagttctggcccgggaggtataatatcaatcacttggcgtccatccgatgcatccactatggatatttcatatccccccttttctttacgtagtattttttttactatacctgttgacgtagcattatagaccgtattgttactcttgctaccgtcaggatagatctgtccccttcctcggtttccccctacatatatgggatattttaagaaatgaacgtctttttttgtagcgggatcgggggaaagaatgggaaagacaatttcactatatttcttaccgggaacagggcctatcacaagaatatttttttattgggacgataactctgaaaagagagatttcctatcttttctttcaactcaggagaaatacggtcgggcggcgctaattcgaatccctcgggcaaaataagaacagcacccacattcaaccctccctttttaccattagcaagaacttgtttcagctgcatatcataaggaattcgaagaactgcttcaaatacagtatcaggaagcactgcttggggaacttcaatatccacaggcttattagctaaatggcaattggcacatacaattcgtccagttgcttcccgcgggttttcataaccctgctgcgcaaaaatgggatatgcgtttgaaatagatgtgcgagttattacgtatatcatgatcgatacagaaatcgatcgaatcatctgttcctttaaccaagaaaaagtttttctattttccatgtccaatcgcggatcccggaatttctaaaataaattagataggtagctaagctaatctagttccctatacacgagtctgttgtcattctactgcaatagttgtactagaatgatgaataccttgagcaggtagaaatagaaagaattttgttaaaaaggaaaagggctttctttccatttctaaaggaagaaaagaaatatgctaatttgattaatattaggaaatgaaatgagtgagtttatgcttcactaattgaatgataaatgactacaagtgaaggagatagacggtttaaacaaaaaaagacccaaaatttcaaacacgtgtctagaatcacaggaaaactacaaacaaaaatagtgaaaattagctcgttaggagcccatccaagattgttgtagacccaacgaattagtagttcccaaccgcaggtagagtgaaatccaacaaaaaaatcagtaactaaaagaataaaaaaagcttttattgaatcatttaagttatagaaaaattcctgaacccaagaattcaaaatgacaagttcttctttacccagaaaaaaagaaccacttagaatagccaaacagattatatttgttgagaaatgcaaaatgatatggagatgatcctcattatctattttggccaattgtattatttccttgtgtattcctataggaagtttttgtacatgtgtcttcggtttctcttttatcatttcgtccaagagaaaaagttcctctaattctatgaatccttctagaatccttttctcttgaatatcacttaagaaagtttcggattgcctggtattccaccaattcttaatccaaagttccagacatttgttaaaagagaaagagactccccagggcaaaagtacgataaatacaagatataagaaagaaggcaatgctttcttttttttcatttttgatctgtaagctgaatatatatgatatttcttttctttgaagcaaaaattctataacaaggtttgagaccttgtgtttgtatctatttctctttttgtatactagtggaatttcattgtattgggttctttcttagatctaaatggagtggaatagagaaataaaaaaaggcctttcgtataaaaatggaagaatagtatgccatatatctcacttggacaaaacaaattcgaagcaattttctcttatcctcgtttgttccttcctttactttagataaatactcgaaaatccccttacaattgcaaaaaattgcaattggtactcaaaatacttcaattggtacacgcaagaaataggccaattcggcagctttttgttcaatttctcgtggagtaaaaaacttctcatcagtacgagtcaagggaatgaccccctggccccggatttccatataaaggatacgacgaggataaagaccctctttaacctgaattctaattgattggatatcccgcacaaggaattgaaggaagatgcgacgttttattccagggaatccccaacgaaaaatgcacactattccctcttttctatcgaatcggtcataaccactgcctacattccataaaatagtgcaccacaaataggagctaatgaataggcctgcgattccgtagaaagacatcacgaccccctgtggaaaaaaaagaatttgttgagatggaagtacagatatcatattcttaccaagataactggaagccccaatcgctaagaatcctaatgaacctagaaaaagaatacaggcccagaaaaaattacctctttttcgagaaccttttagaagttctatccatatgtgttctgatcgccaattcatattagatatactaaatccagtagcggtcaattgaaattgagagaataagctaaatgatttttactttactttttttgattctgaaatagccttcagtagctagtactcctgtgaaataattggttagatacattgactttctattcaaaaaaaattagtggatccacttaaaaaaaaactcgctatagtcggctacgcatatgcatgcatttatgctcgtagcttatatctgcatccatagacgtttttcatttgtgtgtagaaagagctacataccctatcatattatagtacttacacaaaaaatatctgtattatgatcctggaaatacattgagaaaatttggccccgtcgtttctagacaatcttatttttctgcacataaagaaataaggaagtcattgcaattgccggaaatactaagcctactaaaggtacgaaaatagagggtaagttaaaatctgtcatagaatatgtgtctcaattcaaatttactatttctatctattcaaaatatatcttaagattcttatgatataattaagtatatctattataaggaatattgactattgtattttttagtttacaaaataaagattttttatagatatagaataaaaaagtattctataaaataaatgaatggaattgataataagaaaattgcaaaaaagggaagaaaaaggataatggtagcccccccattaactaatttatgaatttcatagtaatagaaatccatgtcctaccgagacagaatttcgaacttgctatcctcttgcctaataggcaaagattgacctctgtagaaagactgattcattcggatcgatatgaggacccaactccgttgcattgccagaatccatgttccatatttgaagcgggttgacctctgtgcttctctcatggtacaatcctcttcctgctgagccccctttctcctcggtccacagagaaaaaatgtaggactggtgccgacagttcatcacggaagaaagaactcacagagccgggatcgctaactaatagaatagtactactaactaatactaatatatagataactaatactaatatatagatattaatactaatatatagatatatagaaatagatatctagaaatagaaacgaactaatatatagataatcgaaatcgaaaagaactgtcttttctgtatactttccccgttctattgctaccgcgggtcttatgcaatcgatcggatcatatagatatcccttcaacacaacataggtcatcgaaaggatctcggacgactcaccaaagcacgaaagccagttagaaaatggattcctatttgaagagtgcctaaccgcatggataagctcacattaacccgtcaattttggatccaattcgggatttttcttgggaagtttcgggaagaaattggaataatatcgattcatacagaggaaaaagttctctattgatgcaaacgctgtacctagaggatagggatagaggaagagggaaaaatcgaaatgaaataaataaagaataaagccaaaaaaataagtcgaagatagaagagcccagattcaaaatgaagaaatggaaactcgaaaaggatccttctgattctcaaagaatgaggggcaaggggattgataccgagaaagatttcttcttattataagacgtgatttgatccgcatatgtttggtaaaagaacaatcttctcctttaatcataaatggaaagtgttcaattagaacatgaaaacgtgactcaattggtcttagttagtcttcgggacggagtggaagaagggcggagactctcgaacgaggaaaaggatcccttcgaaagaattgaacgaggagccgtatgaggtgaaaatctcatgtacggttctgtagagggacagtaaggatgacttatctgtcgacttttccactatcaaccccaaaaaacccaactctgccttacg

SEQ ID NO: 1170 - DNA, 8329 bp, Zea mays
  Intron number 4 from transcript GRMZM2G045686_T02 (locus G RMZM2G045686) derived from phytozome v7.0 (chr-ID 6; pos 1 03582419 to 103590747)
atccctgcaagtttacatttacttaaacacactgcataatatatgtgtatccctacataaaagtattgacagtgtacattgagtcccagagtcacttgttcttttgttcttggacagtccaatttaatttattttgctgagtaaataaatctataaagtgcagaatataagtgcagcgaaagataatgactttttttaaatttgagacataccctgctcaacaatattataattttgcattagcaagaacaaggatggggatatttttattgagattcatgttggctcaatgtgcttactacagatcgtaagatattatattgcctccgtgttgtagacacctttgtgggccggtagtatgccaggcgccacaaaggataagtcctagttgggctgtttgtttagaagataagaagagataaagagggagtttgtaacactataaaaaccatcaactaaaaataatgcatttagttattatgataattatggtaatgaatttttcattcaagtgttggttatttatttacatttggaataatttttgtttgctcatgtttgattttggatttttaatagcattccttcttaatgaaaatccaatttaataatataataattattagtccaaaaataaatattgtagttataaatagttttggtataattattataaattttagggttatttataaatatattttgaaattagaaaagaaatagaaaaagaaaaaagaaactctaaccctaacgacccactaggggcaagccgcgccgcgccctcccctgcctcccctgctgccgccgccagggggatttctcccctccctgccgcgcgggccccattggccagggtcccgcgggcgtctcttccccgcgcccaggccgccgcgccgccgtcgcgacctgaccccgcgtccgagccgccgccgccaggacccgaccccgcgtccgagccaccccgcgcgacgccccgagaccgttcttctcctcggcgtaatggagcatcaaacgttcgtttcttccttcccccactctctccccattgatgtcgtcgccattaatgtctttgaagaaccgtcggccgcctctccctctcagcgccctctcctctcccctgtctctctctataaatatcggccgtgccatggagctctcctccctacccgagctcgccccctctctctcactctccttgctcgcccacgtcatcgccggagctcgcccacgtcgtcgctcgccggagcttcgtagaccgtgcagcccccgctgtgccggagcttcgtagaccgtgcagcccccgccggagccgcctgacgtcgagcccctgcccttctccacttggccgacatccccatcgaactctcccccttcacacgagcaagctcaaggtggaagacgacccaaaataattttatgtattttcgaaatcactttttgattcagtttgtgaattttataattattgtgttgtaatatgagaatgttgtaattcagaattcatgcgtatgtgcactatggatttttggtagatatatgcgataaattagtgcaccgttattagtcatgttatttgtttatgatgacttttagaaagttggattagagagaagtatgacaaaaaaattgatagacacatgatggtgataaaaacactagataggtaattttatagttaattttgttcacaatggattttggaaattatttagaaggttataatcataagttcattttaatagataatagaagcttttcttaacatggaattagtaaatggtatacgattcatggcaatataaatattataggttattagatgatttatctctgattattattaatgataatttcgtttaggaagaaaatataaaactaaaagaatatcactagtcgtaacaaaaattggtttttactaagccaaaataaaggtgttcataagtatatcatttaacttcttagaattagtaaaatactttttatgtcaaaataaccatgtttatgttataaaaagcccaattggtgatttatattgattcttagaatattaatgttagtagagtcatgaatgaaccatttttagctatacacaaaagtttctgtttagaaaataaaaggaataaaatctatcagtcaattattagtaataattaacctttattttcataaagaattattatagccacctactcataatttcatcaataatgctcgcattaatagtcataatgaattaataagtatttacgcgttaagacgtatttatgagtgtgataagtgtgacgtatgaagggtgaatgattacccttatattggtgtatgtttatttatttggtgtacgtattcttttgtatgtgtgatacgcaaatcgatcctagaagtggactgtgagttagacgagcctaacacgttcgaggacgacccgcaggacacgttcgagcaaggcaagtggattctccctctgcatattctatttgtacccaattaatgcatttaataatatttacttttttgatatattgcataatttgatgggattcgcctaattaaggattttctagatttatcaactgtattccttgattaccatgggaaaataatatgctttgcaaatttgtgctaccgcgcaacctgaaaattttgatgtcactcattatttgatattaatgttccggaaatgaaattgacattatagtgttaacccgatggttaaacaatattatttcatattaattggaacatggagtgaccacacaggacagtacaaccacgagtgctatcatggctctggctttggtaactagctttatatgcttagtacctagcaaccttacctgaaatatggacaagagggggagcgacagtggtggcagctcacgttaacatgcggacgtattcttggctaaggtacctcgcccagagggcttcacaccgacttggaaaccttagcgggctgctttgtattaagtgtatttttgtgaaagcctcataatagatccctagccattcaccttggtagtttttacgggtccgatcaacccaggctagatgggatacatggcttgtgggtaaagttgtaccacctctgtagagtgtaaaactgatatgtcagccgcgctcacggttaagagtaacctggaccctcacatgataattgaacttaaagatggacaataaatcgagatctgatgatctgccaatggtttgattaagtggtttcacataagtgtttttgatatactcttatacctttgtttaaatgggatacttggaatacacacttattattaagacaggtgttgctaataaaatattgaccaactaaaatgcttactgcttaaccttagcctcaccttgttaaacttgcattaatttttctcccacttgctgagccccgaccataagtgagctcacccttgctaatattttgatcagagggtgatgaagaagacattgatggagatttcgataaatactaagtctaacgatgcgccggtcatcttcctgtgggagattacccatgttatttccgctttactttgatgatacattttaaaacactattatctggatgtgtaataaagactattttactctctttacgcctttattggattgtcttttgatatatattacacttgtgatgtcaacatatgtatggaaatggatctttggcacacatatgctatgcattcggttttgcctgacagaagtggtatcagagttatgttgaccataagtcgttagactagttagaaatggaaagtctagtttgttcaaaacttcctaatttcattcttataaaattattttaccagccttacctctttaaaattcaactgagttgacatttcgtttgtagatggttcgtactctccaaaccacccgagttaacaccaactacgctcctccgccacgacaagcttctgtctaccccgtgatagtggagaaagtttcggtggatctccctcgcattcgagtggagcacggagtcatcatcgaagacatctcggaggaacttctgccgacgcccaccccgttggcagagtcactggccttcgcagctaggtcatcaacctcagcaccgcctgcaccagtcgttcaagctcctgcacccggagacgatgacccagacgactctagggacaacgatgacaacgacgacgaggagaacgtcaacgaggaggccaacgatgcccaacaggactacttcatggggtttgggcctgtcaccgaacattacacatcaatgttcgagacggggcacttccccaacctgctgcaagacgtgttgcacgcgttgggaacctacgtctgacccttgtacgagacaaggcgagtgtgcgagcctccccgggcttgctactacatcactcgcatccacgtcagggtgatggatgcaggggatagggggttcaggactctatcggctcatgagtccctgacaccgctatccacctacgctgcttcggtcagcgatgctgccagacggactttgtggtctctcagccatacctaccggcagtagctgcatgacacgaggttcaggcatcttcctctgcgtctaagtggaggaagccagaccagcatcgttccaggtggagctggtgaggatcgcctcaacaccctagctggtgtagtggtcggtcttaataccgacctggacagtgccaccctggatctctctagggtacacttggagctgaaggatgcccatgtcaggattgcagccctggaagccctacttcaaggacgtggatccccctgaagcccaggtcctcgccatggcgttgtcccctccccgcatgagagaaagtaggcgggtgatggctcataaaatcctgatgcttatctctagccggtggtgcattctgctggtgctgttggttctgctggttttgctgaatctgttgaacggatgcagtgagtccctgcataagctgcatctgagcggcgataaactgctccatgttaggattcggtggtggtgttggtatctgttgaccacgctggttcctgttgttgttggatcctgaacgagcgttcaccatctgatttgttagaaagtgaacttttcagacgagtgaagagtaataaagattctagagaggaataacttaagtttatttttttatatgctcttatgaccatcattccataagaccattgcactcaaacaaaaatccaactcaaacgtagtaaccaacaccaacacatggttgttattattataaagataacttataaaagggtattcatcgtctgacgtgaaaactatcttattacaacttataacttaaaatttcaaagcagcctcgtgatggatccgggttccccatagcgaatcctcttgcggggaggggacaacgccatggcggggacctgggcttcagggggatcctgtccttgaagtagggcttccagggctgcaatcctggcatgggcatcctccagctccaagtgcaccctagagagatccagggtggcactgtccaggtcggtgttaagaccggccactacaccagctagggtgttgaggcgatactcaccagctccacctgaaacgatgctggtctggcttcctccacttagacgcagaggaagatgcctgaacctcgtgtcatgtagctgctgccggtaggtatggctgagagaccacaaagttcgtctggcagcatcgctgaccgaagcagcgtaggtggatagctgtgtcagggactcatgagccgatagagtcctgaaccccctatcccctgcatccatcaccctgacgtggatgcgagtgatgtagtagcaagcccggggaggctcgcacactcgccttgtctcgtacaagggtcggacgtaggttcccaacgcgtgcaacacgtcttgcagcaggttggggaagtgccccgtctcgaacattgatgtgtaatgttcggtgacaggcccaaaccccatgaagtagtcctgctgggcatcgttggcctcctcgttgacgttctcctcgtcgtcatcgttgtccctagagtcgtctgggtcatcgtctccgggtccaggagcttgaacgactggtgcaggcggtgctgaggttgatgacctagctgcgaaggccagtgactatgccaacggggtggacgtcggcagaagttcctccgagatgtcttccgttatgactctgtgctccactcgaatgcgaggtagatccaccggaacttcatccactatcactgggtagacagaagcttgacgtggcggaggggcgtagttggtgttaactcgggtggtttggagagtacgaaccatctacaagagaaatgtcaactcatttgaattttaaagaagtgaggctgataaaatagttttataagaatgaaattagcatgttttgaacaaactaggctttccatttctaactagtctaacgacctagggtcagcatagctctaataccacttctgtcaggcaaaaccgaatgcatatcatgtgtgacaagatacatttccacacatatgttgacgtcacaagtgtaatatatcaaaagacaatgcaataaaaacgtaaagacagtagaatattctttattacaacatccaaataatagtattttaaaatgtatcatcaaagtaaaacggaaataacatgggtattctcccacaggaagatgaccggcgcatcgttaggctcagtattcatcgaaatctccatcaatgtctttttcatcaccctctgataaaaatattagcaagggtgagctcacttatggtcggggctcagcaagtggaggaaaaattaatgcaagtttaaaaaggtgaggttaagtttaagcagtaagcattttagttggtcaatattttattagcaacatctgtcttactaataagtgtgtatcccaagtatcccatttaaacaaagatataagagtatatcaaaaacacttaagtgaaactacttaagcaaaccattgttagatcatcagatctcgatttattgtccatctttaagttcaattatcatgtgagggtccatgttgctcttaaccgtgagcactactgacatatcagttttacactctgcagaggtggtacaactttatccacaagccatatatcccatctagcctgggttgatcggacccgtaaaaacaaccaaggtgaatggctagggatccattatgatgctttcacaaaatacacttaatataaaacaacccgctaaggtttccaagtcggtgtggaggccctttgggcgaggtaccttagccaataatacgtccccatgttaacgtgagctgccaccactgccgctctccctcttgcccatatttcaggtaaggttgctaggtactaagcatataaaactaattaccaaagacaaagccatgataacactcgtggttgcactgttatcatgggtggtcactccatattccaattaatatgaaataatcttgtttaaccattgggttaataccataatgtcaatttcatttccggaacattaatatcaaataatgagtgacatcaaaattatcaagttgagcggtagcacaaattgagcggtaacattaatatcaaaattatcaaattatgcaatatatctaaaaagtaaacattattaaatgcattaattgggtacaaatagaatatgcagagggagaatccacttgccttgctcgaacgtgtcctgcgggtcgtcctcgaacgtgttaggctcgtctaactcacaatccacttataacatcgatttgcacatcgcacatacaaaagaatacgttttatgctccattacgccgaggacaagaacgggcgcggggcgtcgcgcggggtggctcggacgcggggtcgggtcctggcggcggcttggacgcggggtcttaaccctgttttgtgaatactaattatggtaaacctcttttgccaattaaactaatggcattgtgtattatttgcctacatgatttaactgtttaagtttccagtatgctatgagttgttggatcttatgtgcattgtttactgaaactattccaatagtttataataccaaaactattctgagttgttgggttagtaagagcaactccaacagcctctctaactcattttccaatggtaaaaaatgaaaatcagtagaagtccgttccaacggtctcggtaaactcctccctcgcaatcccgctcgacattccatcccctcgcctcgcaacctttggcgagctcctccgcctcgcaatactagtgattctatgtatctaaatattttgtcattaaatgtattcttcctcaacattgcatgcagcatatttgattattctcctctgactagcaattcaatatatacagta

SEQ ID NO: 1171 - DNA, 10803 bp, Zea mays
  Intron number 8 from transcript GRMZM2G136455_T01 (locus G RMZM2G136455) derived from phytozome v7.0 (chr-ID 6; pos 4 2732741 to 42743543)
ttgttcacttaagattatactagtaacatgcccgtgcgttacgacgggagtaaaaaatagatacagatcgacagacatcactatgatatacaaaatgcagacaagtacatagcctctgttcataatcgtttgtgatggacgtcaaataccaaaatcgactatagaaaatattggatccttttccctttcacaaactatgtcttaacaaagtttcaagtcacatgcactgtatgagaaaaaataagttaccacagaaaaagatggtacaagcattatgccattgtagaccttatactcggacaagaacatcacaagagaagcagaacaaagctacacggccaagatccagaagtagacaatcctcgtcgggcttccaccggaaagttgatcactataccaaacttttaattctctgtatcatcattatcctcttccacttgatcgacaacacgagcatccaacgttacgctcgctgcctagaccagcagctttgcaccttcttgaatcaagccctgcaggctgcaactcccttttgctcaaacctgcccatgaaatcatcagagcgctcgcatggcagataattccattaggtgatttcattataatattctcaaagcacattctattccttgatttctagatggcccaacatatggccgaaacggccacgatatgaacatgtttggtttgtggcacaagcttctgcaaccacaaccagtactggttcacatcagaaatgtatggtccggttgcattttggatactatagacttgaatgcttaatggcctatagctgagaaaatgtttaaactggtacaattctgaattcaaataacatatgtgcttttatacaaccacctaagtctagtacactatcacagaactccataagtagcaccttgaatgaacttagaacatgctaaaatgcacagatatgattatcaaatttcctaggcaaaagtacatcaattacctaaaaagaaatgaaagtcataatatcattgtcacatcaaagctatattctcatatcaaaattatctgataccgtaatctctaatccaaaaatataaacaaaaaatgaatgcttgaaaatcataattacaaatattcaagcttaagcaacttctcaatggcagctggcaatggactaccaagatatctgtttgagccagatctctgcaaagcaatgctcagaaagtgagtgattgagtcgtagtgtaaactgtgaaacatagaagcatctttcaaaagaaaaagttacattatggcgatactaacaagatccttagcttagtcagacttcctatatcatcactcagacgttttagtttttgtcttcaatgtggctaacctccacgacataatccctcatgagctttgtattggcctcatcaacaatctgtagacagtggaagacaacagagcataacaaattgcgacactaaacaatgttgtttttttctaaaaaattactggatgtgatctgtcttttggagataattgacacgattttactgagcaacaaatagtagatggggcagaagattaataactcaaccttgaatgataatttcttcaaattgttccgctaaaattcgttcttcacatatgcagattggacctacagtcgcactaatacatcacccaacccctgttagggttagggtttcccattctaactcatttgaatcccttccaaacataggcagtgaaaactaagttgaattagaatatggcaccagttacgaatgctctcttatcagtatgcacctctagaatcctcatggttgtttgcttccaggacgagacgagagatgaaaccacatatgcctcagtaatttcatacgttgtttcaccaaaggatcgaagccagtaaaacagcatgcggttcaagaactggacttaccgagtcccttgagccttggagactcgtgtatcatcttttcgtagaaaatctcagtgtaattcatagaggtaccggtgatgaactcattcagcttgaattaagcttccctattgtaacttttattgatgatccaaataaacgagtgaaaaagtaatcaaagtaccatttgaagtccctttggcgatcacttgggacatgaaatctcaaattaattttagtatacaaattaattttcagaataaagaatgccaacctcaagctgagcaaggacaatgcggacatcgatgtagttaaagaagtggcttgaggttgatcgttgccttctgctccagtgaatcctccccaaagactgaatgatcaccaaccacaaccataatatataagtgcggtgactatgcagtgcagttgctgaatggatcaaggaggagcaaagtagatgtagatggagagtcgagaagcgaacggctaggtaccgagaacgtacatcttgttgcacctccacggggaggaggacgcgcccaacctaggcacctttgagcggaaggacggcgacactgcactccatgaccaagaagcgcacgctcactctgctctagcgctcttcactgatgcaacgtggacctgaaagtatgccagataggcgtcgcttggatataaagtcaaaaatggcgtaggagatatttgtcgggtaccgggtctgttcctacatatacagtacatagcttcttctaacctaaaatgcacaataaggattcatttaccttgaacgcgacctgcttgtttgtcttgttcgtcagcggtagcgtgcaggagatctacttatttaattcgactacaggatttagagaagaaatcaggaaactaaagaacaatataggatgaccacaaattacctcaaaatgattagaaaacacatagcaaatattgaattgaactccaaaaaggataaaaaacgatgaacccgagaaacagccaatagagaattatcgaatgagcgctcgacacagtgcattaaattttccatgaatacctgcgaagctatggtgggtgctcaaaaaattcaaggaaatcaatagaatcattgaggaaggaaatataacaaaaataaaaacacatacatgggaataggagctcgatggggtcgaactcgagcagctccactggctcggtgctcatcctggaacaaaaactcctgccattcaaaattcgcgatgctgggagtggcgaggtggggaactggggatttggaattttgatgcctcccctccgctcattttctgtttttctgactatctatattcctgaagcattggagcagaggacgaagcagaggaaaatgaagggttgaaatcaaaggaaaaaatcgggattttggaaggggctcatgaagtacctcatgttgccggtgtgcccatggtcccgtccccggtgtcggtggtcgtcgatgccactttgcaggtccacgacgagcgtcgtcctcggtaacgccactgtcactttttggcgaccttgttatattctccaatcatcaggcatcctttgctctttggggctatcgcaacatctgggctcataccctataagaaaaaagagcaggtaatcataggagtgcaaaaaagcaaaacttcaaaacaagatttttaatgtgcaaaaaatgatgagaaaaaaattggctattattttttcccttgtttgggacaactcgagttgaaattgaaacccactaatgaatttcatgtgtatgacctgtaacaaaattatttatctattttcagctgaagaaaacaataaccataacaatgcttcatctatctatataaaatagaatcacaaatttaagctgcacgattttactttgttgtcaatgcacacagcacagcacagttcaactcagaccttgaaactatgctaactaaagaaaaatatagtggaacatcatgaactgtatttagtgcatagccttacgttcgacagttattattctttgatgttttccagattgatttccagttcacatatgcaaataaaccaatacctcagtggcaccatcattggcagcaagtaaatgagcccttgccattgtatcatccttctccagacacacaacacgctgtaaaacatagcacgaggcataaccgcgtaaggggaaaaaaactgcaagactggtcaaggtatcctggtgatgagaatgcattttgagaaaaaaaacaagaacctcatgagggtcatccatggtagcagttgatttgaagaacaagtccaagcatgaattctccactacaaaagaccagataggttaattcaattcagaaacaaggagagaacaagaaagattgcaaccatcttatagaattctgtgtgctgcatataatcgtttcaggtcacctaaattgactttggaagatgcatttccaacagcatggagtagagcaatagttccacaagcatttcccaatgattcgatctattttataaagtaaacctggtcctgtgtttcctgtgttacacaaggcatcatgaaacaccatgcacagtaaagggatatgggcaagttgatataaaaccatcagagatttggatgatggagaaatcaactgcaaatcatacatgaggaaagggggaggcatctacaaggaacgcaattgttcaccttttctccagaaattaagagttgttctgaagggtaacttgcatcctgcagtggaacaatagtgtatctcagtaaaaaaactgaacttgcttactgagctcataaatatgaaaacaagttttatgtgcatcccacattaagagagaaacattcgtatttggacgagttgggttacatatgcagcatggtaaaaattgtttaggcactaattggtcattactcaacactaccagcagtcactacggttacttcatctgagggttacaaacttatattgcacgatcaaacttatattgcacggtcaaatctgagggtcatctagaagtagatttcggctctgtaacaaaataggtaatcacttattaaaagtaaggcattctgaagattatgctctaggttttgactcataattttcaatgaccctgaaaagtttatctttcgtaaagaaattgttttactactttatataaccttgttgctccaaatcagacgatagcacctccattgtgccgggagaatcctacagctccagcaaaccatgagtcgcaaggaagggaggtcactatcatctaatctgccatgcccatgataacaaatcaataagccacatgtttgcaatcagactatcggaggatgtaggagaactaacctgcagaccacgtctaagacttgttgtgacaacagggcgcctcttcagccccaacgatctagcaccaccgccaccaggaggtcactatcgtctgatttgacatggaaacaacttaataagtcactcgcctctgaagctaaagaagaccatgagtttatccatatcagtctgtgcacatgtttgtgatcagaccatcagaggatgtagaagaggactaacctgcagaccgcatggaagaaggattgttgtgatagcacggtgcatctacaagcccaccgatatggcactaccgctgttgtggcaatgtcatgtctctacagctatcgcctcacgcctttcttcatgtggatagcaacaacatttggatcatctgcaacaaaagtattcgacaacctatagattgaaaaaaatatgagcaccacatagaggttttaagaaaaaagtcttatggtgaattggacttcccctgacgtgtcgtcatctattagcctgattggatcggccctttcctgctgccgcgatctcgttagttgccaccgatgtggcggccatagcacagaacaacatcctattggcggggatgatgcccttgagcgctctctggttctccatctctgcaccaagcacgaaacaaaacatactgacattaaaccattttagacactaatcagttataaagagaactcagtagttacaaatgtccagacgtggcgaggtattagacaggaataagaacatgcagattgctcatggtcttatatttaaaaaattgaggtagtttcagagttaaggcagtaaaggtaccttcgggtcttgcaccacaagagctgccctgtcacaagtcagctctgcagctcgtagccatctatatagctgctcttccagaaagccagcaaccatgtcgaaacctgataaaagtgcatgtacttaccatgagatgtagttcaaatgaagtgtatttaggtacatagcccaccaatctaatgagatttcaagtagtcagatggtttaccagggacagtgtatgctcccattgtgagtatattggcaaaagtgagccaaacaccatgatcgcacttgaggtgacccaactcatgagcaaaaacagcctaattgaaacaaatccaatatgatgagtaatcaatgcattcaggcagtaggtaagcaaataataattcttgttttgattgttcatctaggcaatactagccgatgagtttgtttagagtaaacaacagtacctgcaattcccttggagtaagcagctccacaaggcttgtgtgaacgacaatgaatggttttttgccgttgattgctaaggtgtaggcatttggaacatgattctgccttatgtacaagtcaggagcttcggtgttcaagagctgcaaacatataagaaaacgatatgcaacatcaaagagccaactatgtccatacactccaatctatatcagaacagaacccttaagtcttaaaccaataagtgcctaacaatcgaataggccgcaactcccaatgaagtggtccaacagtcatatcgaatgtaccaaaacagcataacaaatgagcacctacagttagtgaaatgatcttagtttgttttgttagtttaaatattttcaaaattaagagaaaatagtagtgttaagttgtaagtgttcagaattgatagtataactgaaagtctggaaaaaaatcaacagtgaagtatctcagactaagtgtctttatatttcacatgccaagtaggttacaaaaaaataatttaacatttagtttttataaatcgcttcaccattacaatgggatcgagacctttgagatcttgatagtgatcgtcttgtgttcttccgttcatgtacctaccactacatcaatgaaagcacaaatttatttctttttagtttttcaagtataagtttacaaaatgttcagatctgaaccaatagagtatagtataataaacatttgtagaacaagcctcacaagcaaaataaaaaatgacaatccaaaaaaaagtcaagtgtccgtgcggtttttagggctcgattaattaggaatttcatggcaaggaacttaaagatgtggtttttgatgacctggagaacataaaccaaagatatgacattaactactacacattatcaaagtataaccccttgttaaggctacaacaacaccacaatacacacacgtacatgataaggcagtacataacacattatatgtctaaagtttgggtcacttgtcctctattcacgataagaaagtacaaaacacataatatgtctaagtttgggtcacttatcctcgattcaccatatcatctaactatggaaagaaaaagagcaaccaatcacacatccatacatgagaacaactttaatatgctattgttttttaaccatgggaaatctttttggtatatatgagctgaaacatccatcgaaaaaggacaataaacctgcagatacttctactgacaagactgtcacaagtatgtttctgttttttatagataaatataaattaatagctggaaggtcggcatcatccaagcagtccattatggcatagcaaaagagcatatgggcttcaatgacaaaaaaatacaagtgccaagaagtatctcaaaatctcgtgtgaaattagagcacggtagcctatgcaaacataagtacaaatagagttctgaactgaaatcaataaatgcatcatcaaatgcaaaagaaaaatggttcctaaaacatcaagacaattctgaaaattgccccaagggaggatatgccactctgtgctatctatgcggtcgcttttgatccatcaaaatcatgtgactgacgatgatacctgaacaaagccacaaaaatgataggattccggatattgttaccggcgggccgggctgctcgctgcgacgaggcccgtgtataatccatgcagtagatgcagttgaaaagggtcagcttcagctagtagctcacagtaaaaaacaggaccgaggccacatctcgatctcgtcatggtttgctcactcagaaaacctattatgtttcagtcaatatagagggattcttgggcccaagaacaggttgcataaagtttactttcgttcattccttcattcaccgccattattaagcaataatcctgctgcacgaggtcaacaaaagcagtttcgtttcgtatgcaccatctatggcgatattagtactaagggcatgtacgagaggtaaggaatgagggcaggcatagctcaccactttttttggaaggggagctcgccggaggggatgaagaagcctcgtcgatggtactacctcgcagacctgcaaagagagagaagaggtgaggaactaaaggcagagaggatccatgcggctagtggagggacaactctagtttccatgtcgacggtgatggtggccatctccatccctagcacccactctcctgctcctggtgatctggttcaccgttgtgcacctcgccgtattccccctgtgcttccagggatcgtccatgtgcgcgtcgacgtccacgggtccgtggagaacaaccgcgcgtgcggccgcaccgtccccaacaacaggagaaggaaaggcgaggtgcgcacgtgaagagctcctgcgtcgagcgcagtggatccatggaggagggcgacacgtgtgaagagctcctgcgccgagcgcagtggatccatggaggagggcgacgacgggcgggcagaggggacgagaagagtggatcctgcaccgtgcaccgtggattcgcgggaggaggacggcggggggcggacgagcgggcgggtgggggtgcctcctccacgttgcgcgcagtcgctacccacacgcgtgaagagctcctgtgccgagcgcagtggatccatggaggtgggcgacgacgggcgggcggaggggacgagaagagtggatcctgcaccgtgcaccgtggatccgcgggaggaggacggcggggggcggacgagcgggcgggtgggggtgcctcctccacgtcgcgcacagtcgctacctcccgccacaagcagagctagggtttcggctgggagtccatggaggggcggtgcagatgaggcgggcggttggtgcggggtggggagggggagggggcgggcacgactggatcttgtgtggacagtgaaggggcgcttgcggctggatggcatagacaatagaaacgaacggtccagatagatgggaggcagaacgacagaacgaggggaggcagactactattgcttacttaataagtagtacagatttgcgtcccaaaaagcaccagagtgattcgatatagtttgcaacccacactctactcaccactaaacattcctccattccagtcatccaggtaatacatattaccttgttaagaaggctcaaagtgttgtctcatttgtctgcgtgtggacaaaaacgcttcatgtaacgagagatatattaagcaacatcctcgcttgacctggatcaccaaacaaaaattctcagcggacaactgatgacatagaaaaatgtgtatctctaataaatctgtgaaaatgtaagaacctaagagagaataatgggagccgatagagagtatgaactacaaagctacaagtacaaactttgcccaaaatctgaatccaggaaccctagacctcagaagaggaagaaatcacctcaaccgaccataaactaaatgaaatagcacgctgacacaggtagaagaggaagaaatcacctcaaccgatgaggtttcgttggagccgatggagagacccaagacaaccgacagtgagtaggtctgccgccaccgccgtcgtcgtttctatgcgcgaatgaagagcccaaaccacagcgtcgcttgcacctctggtcgcggatcgagcttgaggactctgccagctcctccgtccttgctcaccgacgagaagaatcagagacctagaggggtgagtcgagggaggggagactcacctttgtgcgtgcgcgagaggcgagatgcaacgatggaggagagggagagacggtcgacgaggagcgcgaggcaggcgtcggcggggagcacgaggaggggagtgggggcgtggctgcgtgccttccaccagagataagctgcgtcgtccgctctgagggggctgctgtcttggacgagatgtcgatccttgcggggtcgcacgcatccacaaccgccatgcggcaaggtcggtcctcgtggggccgtgcgacaccgaggccgagggcggttcccaagctacctgtgtcgaggccctagagcggcggtggcgacgacgttgggggaggggcggtggaggcgaagggaggaggggaagcagtggaggccacgtcggcggtggaggccgcgaggcattctatcgcggcaggggcagggggcgggcaacgcggcagagagaggaacatgtgggggaaggttggggattgggtggtcgtgcggtggagggagatggagtgtgggagacgcagacgcacgatgcgatatggacggtccagatcgatggacggcagaacgggagaacgagagaggcagactactattgcttatttaataagtagtagagattggaggcggcactga

SEQ ID NO: 1172 - DNA, 28640 bp, Zea mays
  Intron number 10 from transcript GRMZM2G103033_T03 (locus GRMZM2G103033) derived from phytozome v7.0 (chr-ID 6; pos 80927304 to 80955943)
ggactcttgctttcatataagacctcaaattacatgtaagctagagttaaagttcttgattaatatgacacctttagttagaaattgattgaggcttgaaaattatgcccaacataaacttggttgtgactgcagtaaagtttttgagaacctaagggcataaatgcataatacatttgttatgaatagcaatcatattcaatctaagggcactaggctgacgggcgaactctggcgaactctggttaagaatctacaaagaataagaaatatctggttgagtgacaccaagtcaccaagataaacaagactcctgactatgtgacgataacaggtaggatgaacaaccatcagtggcactaagatgaaattgagctccatgtgagtctcaaaggtacgataatcattaagtgaaacacgatcaagaagaccctaaatgtactcctcttgagacagatagaagtccacaagtgtggtggcctcaatcccgaggaaataataaagaggaccgagatcagacataaaaaactgctcactcacgtgccctcatggaaatatactatggaccatcaccagtgataatcatatcgccaacataaagaagagcctatccacaagatgatgtgtgcacaaaaagacttggatcatgagcattagcataaaaaccagcagaagaaaaacactctaaccaagcccgaggatcctgcttgagggcataaagggagcatcaacagacatgtcgtcgcagctgacgggcgaactctggcgagtggtcatgaagatgagcgccatcaagtcaaaggagctgactgcgaagacgtgcagagccaccaagcgatgtgaggaagcgatgtgaggaagaaacgattagagaaagagaggaataactctaaccctaatttttggctctgtatactatgttatgaatagctctcatattcaatatgagggcactaagctcaaatatatacatcgatacatgatagggaccatgtacaacaaggactgtttatgagaccaaacacaaaaaaggatacatgcatcagcataggtgtctaacaacatttactccagcagccttggcttcattcaagttctaatgcatatttctgttcatttttatatctttttttttcccgaacagcgcaggagaactgcgcgtcatttcattaaggtagaaaagagtacataggtctaagaagaccatcccaggcaccataaaaggcaccactcatgctagcttacatttacatcattggaaagataagtaaaacgaccacacgacccccagtttttaagctatgaggggcatcgacctggacctcaactcgtggagtttggaagcccccactgagcaccaaatccctccttccaaattaatagacacaatgtcgcctttgacacttggtctctttttctaaaaaatcaagcatttcgatgcttctataactcccatgccactaggattatcaatgaattgagtccttttcgaatttcttttggtgctgctgcatttgttttcctccaccaccctgaaaaactgaaagtcgtagtatgtggcgccatctgcagcagccctaattgttgcagaattatggtccaaatctcacgagcaaagacacatcatatcagcaagtgatttatgttactaaccttaggattaacaaatgataatgagtccctaaggactatatgatatatataggctgtaggtctgggcctaatgggccttaacacccctcctcaaactcaatgtggaaaaggaggatctgaagctgtgagtgagcaggattgaggaagaattgttgtatatagaatgagggcagactgtgtacatatataggagaggaggaagagaggtaaaaggaaacccctattttctagaatacgcaggagagctgcacatctttgtattaatagaagaaaagaaaggggggagagaaccccaatacagcacacacaccactagagagtaactacggatcaccgactaaaacatggaggaaacacgacccacaccgctgttttaagccagcaactcatcgacttggaggaaggacaaggccttggcaccagtcatggaccagagcaccgcctcttccctagccatcctaagggccgtgaccaagctgggattacaaccatcaaaaacacacctattcctatgcttccaaatggtccaagcacctaggatcactaaagaattgaaaccttttctcacaagatccgatgcttgggagctgctagacttccaccacgactcaaaggattcctcatgagctggatacagatcccgcagccccactgaattaaggaaatcaaaccagaactgcttagcaaaaacacacttgaccagcaaatgatttatggtttcagcctcttggtcgcataaggggcactgctctggtcggtctagccctctttttctgagcctgtcagcagtccagcacctattatgttccacaagccatataaagaacttgcacttcccaggagcccaagatttccacacccgctccgctggttcgaactgaactgaaccaaggaagagagcattataagaagaactagatgtataatcacctgaagcgctgaatttccataaatgtcgatcccctattccaggctggagcacaactgcatcaagcacttcacaaagttccaggaattcagcaatgactctgactgagattgccccttgcacatcggagagccaatgtaaattagggagagcatctttgaccaaccgtttgttggcaagacgcaagggcaccaaatcaaacaatgcaggagctatgtccttaatacatctcccctccaaccatctgtccttccagaaaagagggtattggctccatcaccgagcttagtaataatggctgcaacaatcagatttttaaccaccttacaaacatgaatggggaagtccgcccaaggcctactggggtctgttttctgcagccatggccagcgagctctcaaagcccaacataggttctttaactcactaatcccaagaccacccaactccttgggacgggtaaccttaggccaagccaagaggcattgaccaccacggaactctttcctacccctccagaggaagcccttcctcagcttatcgattgctttgaggcccatacaggaaggtcaagtgccagagctgcataaatcatcttagccgtcatgacaaactgcacaagaataactctaccagccctggtcataagttcagctttccaacttggcaaaaggctggccactctatcaacaatggcctgaacctggtcacttgtgagtttcttgggagacaaaggcaaaccgaggtacttacagggaaaaactgaaatattgcatggcagcaagtcctgtaaacaattcacctctttttttttctcgaacgcgcaagagacatgcacatcttttcattaagaaggaagagaaaaaggatccaaaatggatcagtacaggaagacccccattacggtggtcgaaaacaaagaaacaaaaatacatccataagtaaaaggaaccagaaactactttgacctaaagacctgggattggggctgttaagagatctaagtttgtagcccttcctaacacccacatgtccctttcctcctcggttctcttgatggcttcattaacgcatagggtggaacgaggatatagtttgtggggggcaatgggggtgagattagggtagcacttgcagccgaaaacccgaagatgttcatacgaggggtgtttgccaagtaaggcgaagtggggtgtgccgcaagtaagtgtcttggtgggaagaatatttaggagatatgtggcagtaccaagagcagcagcctagaaagtgggagggatgctggcttggaagagaagcgtgcggacgacattattgatggagcgaatgatgcgttcggccttgccattttggggggaagtgtaaggacaagacatgcgtaaaagaactccatgggtggagaaaaaatcgcgagcgttgaggttatcgaattcgcgaccattgtcacattgaacaccctggacggtgacaccaaattgtgtgcgaacataagcgaaaaaatttgtaagggtggaaaaggtgtcagacttaaggcgcaagggaaatgtccacaaatagtgggaatagtcatcaagaatggccagatagtatttatgaccagacacactagtgattggtgaagtccaaagatcacaatgtattaattgaaaatttcgagtggcatgtgatgaagaagaatggaaaggtagacgaacgtgacgtcctagctggcaggcatgacataagggggtatttttattcggggtacaagggatggcagaagactgagctagctgagtgaggactgtagatcctggatgtccaagtcgttgatgccacaatgaagaggtggtagcatgaagggaagatgttgtgctcttgagtgggtagagtgggccggagctatcacaccgaaggatcacgcgccgagtgggaagatccttcacagagcagccaagagggtcaaattccacagaatagttattgtcagtggtgaattggcgaacagaaattaaatctttaatgagagacggtgaaagaaggacaatgttaagacaaaaattgtaaggaagttgagtggtgccagtggaagtgacaggaagaaggttgccattgccaacaacaatgttagagggtagatgattggaagaggagaggtgggaaagtataccagcgtcggaattcatgtggctggaggcacctgtgtcgaagaaccactcttgctgttggggatgttgaagagtggtggtttgaaaattggtggcaagttgttggagatcccaaccaggagggggtgcagcagcgccaggtgcagcagcgccagtgtagttaggggccaacccatatgcctgaaggggggggggggggcaggagcctgcccactggccgggaggtccagcaagaaaggcctgaggcagttgaggtggagtagcaggcactgaagtcggtggacgatgtgttggcggccgtgaccctggccacatgtagatggatcctgtccagggattgtagtagttgtggccacctgggggagtggaagtgtggctggaaccaccgcggttgccaccggaggaccgaccaccgcgcttgccccgcttgccacggtgctgaaaggaaccgccgccactgccacgcccaccagtctgctgctggtgattgggtgaaggtgggcgcggctgggacgactgggatccagtggagctgccggtgttggacagggcagcgagggcagcggccggagcagcttttgccatcgtgagttcctcaagagccaggtcgtcgcggacctgcagaaaactaggaaggggattggtgcggcgcaaatggagaccaagagcctggaagcgctcgttaaggcctctgacaatgttgaggactaaagtccgatcagaaacaggttcgccgagatcacgcagatcttcggcgagtttcttgtagcggcgacaatattcggcgaccgggagatcgccttgggagaaggagcggaattcttggtcggcataaagagcacgtgtggtgcggtttcccaggaactgggactctatagagagccagagggtgcgggcagaggcgctgcgctgagagatgatgtcagcgagggcatcggaaagggtgccaagaagccaagtgcggacgacggcattcatgcgaatccaatcaggtgactcgggaaaaacagaatcagagaggacgtggcattccagggaaaatttggtgagggtgagaaggaaagattcggaccagcgggcgtaaaagttggagttggtgtcaaggagtagagggacaagagcccggatgttggttactgcaacagcctgggcgtgaaggtttagcagcgtggctgcctcgtggtggagaagagcagcatgcagagttgcaggtgggatgtcgtcgtcggcgtgagtgccagtcgaacaagtgtcctcctccggctggggaggagcagcagccgcgcgctctctggcggcgcgatcctgggcagcgcgaacgcgggcttcagccgcgtcgcgttcctgctgggcaagcgcggcctcgctgtcggcagcagccgcgcgcgcaagggcagcctgacgggcggacagagcccgtcgctcatcctcttccttggcggcgcgaagatcggcgcctgaggaagtgtcggcgatgttgggatgctgaagcacctcggagccggagacagcatcgagaggcgacgcaggaaggctggacatggcagcgccgagtggtgggcgcgcgctaaggcggaagcgaaaaaaaataggagaaaggatcggtcggtagacctaggtctgtgataccatgtgagtgagcaggattgaggaagaattgttgtatatagaatgagggcagactgtgtacatatataggaggggaggaagagaggtaaaaggaaacccctatgtctatggaagctaataatatactggatcaatcagatccggactcctctccctaattccctctatctataatagtagtggtcggccgacacagggttgccaggctcaggcccttccatatgtagcagattctctaacagaagcgttgagtttgatcaagtgaaattgatgttgtgctcttgtttgtgctttggtgaagaaatctgccaattgaaattctgagggtacatatggaagatcaatagtcttctgctgataatgagaccgagtaaatgatgcatcgacaccaatgtgtttagtaagttcatgcttcactggatatgagaaatctgtatagcactcaggttgtcacataatagaggtgtatgagtgtcacaagaaacaccaagatcagccaatagccaacgcagtcaaataatttcagcagtggtagtagcaagagcccgaagttcagcttcagcactagaacgagatatggccgtttgcttcttggatttccaggcaataggagaggatccaagaagaatacagtaacatgtagtagaacaacggtcaatagggtcacttgcccaagtggcatcagaatacgcatgtagctgaagtggactatcagaagcatagagtaaacatatggatcgtgtcccgcgtaagtatcgaagcacacgaagcaaatgaccataatgaactgaggttggtgtggatacaaattggctcaacatatgaatagcatgagcaatatcaggtctggtgatggtgagataaacaagactacccacaatatgacgatagtggggtctgctagaggtgtcccatcctgcggacgaagttttaaatgaatatccattggtgttgcaactgtccgtgtatcagtaattccagagcgatcaagaagatcttgtatatacttggactgagacagatataaaccttttgaagtctgctgaacttcaatacccaagaaatagctaagtggacccaaatcagacatttaaaattccttactaagttgcttgacatgagagatatgttctgagttgtcacctgtaatcaacatatcatccacatataatagaagtaaagtgcgcccttttggagagacatgaacaaacaatgcaggatcatgttcactagaagagaaaccagcagctgtgatgatagagatgaatcgctcaaaccaagcacgaggagcttgtttcagcccatacaatgcgcgacggagacgacaaacgtgccctgagggagtatcaacccccggaggaggatgcatataaacttcttcacgtagatcaccattgagaaaagcattcttgacatccatctaggagatagtccaagaagatgaggctgcaactgcaatcaaggttcgaacagtagtcatatgtgcaacaggtgcaaaagtctcatcataatcaagtccttgagtctgttgaaaaccacgagccacaagacgagctttatacctctcaatggaaccatctgattttgtcttaattttgaagacccatttgcatgtgataggaacaacatgcgagggtaaaggaacgatatcccatgtaccagtgcgttcaagagcagccaattcatcaatcatagctagctgccactcaagaatcccagaagcttcctggtaagtagtgggttcaacaattgccacaccagctcgtgggaaaccatagcgatctggaggttcaatggtatcatgatcacgaagacgatatccctgattaaaaacatcgttagactcataattgttagtacaagaatcaggtacaggatcactatcaggaccagccgcaggaatagaccgggaacgacgaatgtaggtttggaacagtaagtagaggatgacgtggaggtggaaggtggtgttatggaaatgagaacatcagatgtggatgtagaagatgatggttcaacgataggaatggaaggaagacacatgaagtagattatgtgggataatatgaggagtgagtagattggttgtgaaagaagggacaattttcattgaaactctcatctctagaaattcgaatatgacgagtagatggatcataacaactatatcctgtgttcaggactgtatccaaggaatagacactctacagattgagcaatcaatttagtccgctcacgaggtggtaacaagacataacatatacatccaaacacacgaagatgatcatatcatagagaagtcccaaaaagaacttcacccgatgatttgtcagaaagtttagatgatggttgtctattaatgagatacacggcaatggaaacaacttcactccaaaagtgtgaaggaacaaaagaagataacaaaagagtacgatcactatcaataatatgacggtgtttgcgttcagcaacacccactattcttaaggcgtcgcctaggcgtacgggcggtggtctaacgcctaggcgccttgcccgcctacctcgcctaggcgtccaggcggcggtccaacgccttggaccgccttaccgctttaaaaaccatggcaacaccattttgggcatgagcaccaggacaagaaagttgagctagagtaacctctatggtcaatatctggcgaaaattattagataaaaattcaccaccagaatcggaacgaaaatttttaatagtagcagaaaactgggtgtgaaccatgcgagtgaaggacttgtaaatagaaggcaattcggagcgacgtttcatgaagtaaatcccactataacgagaatgatcatcaataaaaatgtcataatatttatgaccacctttagaaacaaacggagctggaccccaaacatcagaatggattagatcaaaaggtttagcagaatgggaattactaataaaatatgggagttgtatttgttttccaagatgacaacatttacaatggaaactagactcaacatgtgtaggacataaacatcctgactttattagagtagacagacgagatccacataaatgaccaagacgatgatgccactgggcgaatgacatcgtggggcccgaagcagcaagcacatgaggtgtagtggtatggtatgaaggaagacacaaagtatccaagatgtagaggcgaggcgaagttttacggcgacggccagtcccaatcacatcccctattttgcgatccttatcaaaacaagacgagtcatcaaatccaacaaaacaattatgatcggtaatttgaccaacggatagtagatccatggataactcaggtacaaaaaatatatttaggacaataaattttggatcagaaagagaactcttgttggtgacatgacataatgtaccatcagcagtctgaatagaagtaccctcggtgacaggtgtagtagtcgcgagccgtgactggtcagatgtcacatgaaatgaagctccagaatcaagaacccaagatgatgacaaagcaccagcagatgaagtagcagccaccgcaactgagcctctaggagatggtcctgtaccacgaccacgagcagcacgacgaacacgaaaatcagccagcttctctggaaacttagcgaagcagttctcagaccgatgagtggtctttttgcaatgttcacaaggctgaaaagaggtgtttctggacttttgagcagcagccaacacactttgagaactcacaccagtaatagaagacatggacttaagacgagtctcttcagcaagtaattcagataacgcctgagccatggtcagagtatcaaaactgtgaagcagccttgcacgaagagaatcaaattcagatcgaactcccataacaaatctgtatgtgaaaaacttctcaatgaacttgtgggctgggcaaggcacagttgtacaagcaggcaccatggaggtcaaagcattcataagacgatcaaaggctgaatagtattcatcaatggacatatcatgttgctcaatgacatgagtttgttgcataagggtatgtaaaagagcaccgctgttttgaacaaaccggtccttcagatgtgaccagatagccttaacagtggtgaatttagacagactcataatcatagttggtttagtgctattgaccattctggatgaccgtgacttgagcgtgaaggtgggagacgacgtccatggcgcggttgtcggcgtcccgatgtgggtcggcccgctgccgtgtagcggccatatccagttcgagtccgacaaggacctccttttcccaggatagtgcggcggacttctcctgtcgacgcgcatcggcgacgacctgctatagtgctgtggtggccaaagtagcggcgagggcatccttctgcagcaggcacgcaacttcctcctcagcagtcgccaggcttgaggtggtgtcgtcggccatggttagggggtggggctgagacagtggctggctgtgatggataggtaagcggaagtgaaacctaggtcttgtgataccatgatagaggatatactgccatatgttttgtgtgtcattgattgaggagaacaatacacatatataggcagagcgccttgaggtgtcgggaaccccttccctatggttggccagtgcaactacggctgggaaggtgataggtgcatcttaggctgggccttagacacacaggaatggcccagcccacaccagcggacagaacagacatattgtaacagattcaaccagtccctccgaaggagtaccagccaacgtagccttaggcttcctggttctcgaccgatgacgacaatgtttgctcctcgtctcagaagcagaagtcaccattgctgccattgttgaatgagaaacttgttccgtgggagggctgagccgctgccaaaatgccaattgacgtggtgcggtctgaagaggtccactggcaacgagatcctagatggaggcacgcccaataggctccttaaccaacttcctagcctttacatcaccgccggcgaggcgatcccagattgaaacacccatcttacaccttaaccagcgtcttggtaccaccctttctcgggcaggaggacacccgatgtggcactggactccaccaaacgatagtacttggagcgaccagaacgcttggtggtaaacagagccaaggaggggggggggggaggaagccagcgccgcttggggaggggagggacccggggacggtggtcgccggcaccgaagtggctggcagtgaggggttgggggttgggtggagccgacaatggtgggaaatgaaggggcgggagctgagggggcaaccatattgtgccatctttatatcttgaggtttgggatcccaacattatgagttggtacttaaactaccatgttttctattgcaatatatttttttatcagaacctattgcagtatgttatcccctagatggcgggaagaatggctccaccgcttgctctcgcgctctcccccaccgccgtttccatcaaggccgcacactgtatttgcgcctaccaccatgcgtctaccctagcgtcgtcgtccgtctagtctgcccctcctgacctcccctgcccgcgatggcttccccatttgtctgggatgataggggaaaattgctcgcaaattctttggattgctcgccgggtaatgctttctagctctcggttcttcagagatttggatcctcggtccaccaagcctcctcctcttcgtcgttgggctctttccttctgatagtggtatttcgtcgctacacttttcgtctttcagttgaattagtcagcttggctttgcattcggttcttggtggctccccgacgggtttccatgttgttgaagaatcaaaccgacattttcgtttttccgtggccactaagaaagttggcttcatggtccttgctcttaaacgcatcatctctgcaaactttgacgtctattttgatctttggggaaatggaagtccaaactggagaaaggaatatgctctttggtgcagagaggaggatgaaaaatggacagttgttcgacgtagaagcagccgttcttctaaattggtctcctttggtaagaatttggtgcaagactcaccaaacaagaaacatagcccttcaggtcatttcaacaagggatttcttagatcagctatgaagagaaagtcgaagctcatccctcatgatactcccactgttcaatatcagaaggattttgtgcaaattgggagtttcaaatgtcctttgcaaattttaaattcatactttaaatttcgttttagtttgaaaaaccgctctctggtgtctgccttggttcttgttccagctatcttttctcgtatttccccggatttggatagggtggagtcacttggggctctgtgaaatacccgtccctcatcggctgggagtgttcgcacgttgcatgcgcactcgtcttatgtgggacccacctttctattgggtaagctttgctaccggggtctttcgaacacccacttcgtcaggacttgttctagtttggtcaggtgccgccggtgttttctgctcggtcacttggaaaaatattgcaaaagttcgcacgtccagccttcgtcgcgtctgatttggaggcctaaggcacactgcattaatggattggcggcaggctgcaatgatgctcctgctgcattagaagttgctcctggagacttagccaaggcctctttgccttcggtcaccgggcccactcaatcttccggtaaaggcgccttttcgttctctgtcatgggcacccgttcggctcccatccctaaaagagtttcgctcgactttcaattggcttcggttgctgggtcgactgctatactcggttgcaggcatcttctcgtttctaacgctggccacctctcgcgtactgttgccgagcaaaccctcttgccctcaccttctcgatctcatcagttcggtggtctctcgttgttgccctcgtctctcttgcaaatggccaacttcccggtggatcctcgtcccttcctcccgccggagatcgtcattgaaaatgctcagcctgctagtggctaccagcctccctctgcccccctttgcctttcgaacctattggctcattttggcatgatcaggaggttttaaaggaaaagcaagtgatctccaaagtctacaaaaggcaggcgcctaagaagattgagcacattgacaagaagactaggtctgtgcgtaagaaggctgctcaacaatctcaccctcttccagccagaagaagtgcaaggatcaatgctgtaacaaagggactcaaggtctccttcgagcttggctcgacctctgggtcccgggaggtacccactcagcatctgcctctttcgttggaagatttgaatgatctcaattcttttcctgggccggttaaattaaaattcttgcaaaatctcttagattttgatggtacttatccagaaattaatgatatcaccttgcagaaggtggccattgagcattgtggtgtgccccctgaggaggcatccgtggaggtgctgcttcatccggacccaggagcggagggcaacatcatcctcgctgaaaacactcaagaaatatgaagattcacaaaacaacgtctaatgatgtgtgggtggctgtgttctgttgcgtcccaaaacttatgtggtggtttaatagtcttctctacccgtggggtactttctgatggtttttggatcttgggcgacaaacatcatctggccttggtggcaacttggccttttatttgcattttgatgatgctgttttttctgatccattttgacctgggtaagtctgtggggagggctctaccctttggttgcgtcctggatgtgatatccaggtgcttgttggccctatttatttttgtgatatttaatgaatcacaatgttagaaattggaatgttcttaattggaacattagaggtttgaatgatgaaggcaaagcccatgcaatgcggcaaaaaattgaagaaagtggttgttccgtcttctgcatccaagaaacaaaaatgaaggactttacccctcattctttcaaacgtttcgcccctagcgcttcaccaaatttgcctttagcgcctctagaggtgcctcggggggtattatgatgggttcgaataattctttgcttcagggctcgatccaagaggttaatcttttctctattacggtggagtttgtctctcgtctttctgcggaccattggaagttaacaatcgtgtatggtccttgtattagatcggatcgtattgcttttatcaactggttgagctctctcgacatctcttcaatagataactggatgttgttggggatttcaatttctatcgctcagcggccgacagaaataagccaggagggaatgtttctgatatgaataccttcaactctatcattagcagacttggtattatcgaaatcccccttaaagggtgaagtttcacttggagcaatatgcggtctaatcctttgttggttcaattagattggtgtttcacttctattagttggactactgctttccccaacaccttgctttttcctttggcgaagacctccgaccacattccttgtgttgcctaaatcgattcttctattccgaaagctaatatctttcgttttgaaaattattggattgagttgccaggatttactgaagtggttcttaatgcttggaacgaagaaatcagaacaacatctagtgctgcaagaatagttgttaaattcaaaaatgtcagatacgttctttagaaatgaagtctacctccaatttaaatcgcttgatttcgaactgcaataaggtcaggacttctttgactgtctagccaacagggtacaaccaaagatgtcgagtcttattcacagaaaccaatatgggtttatcaagcacagatctattcaagattgtttggcatggacctatgagtacattcatcaatgccaacagttaaaaaaagaagcggtggtcttaaagctggattttgctaaagcctttgacactatagagcacagtgccatcctggcgatgcacagacaacttggtttccctgacaagtggatcagttgagtccagaccattctcggttcaggttcctctgcagttcttttaaatggtgtgttggggagattttttcggtgtatgagaggggtaacacaaggtgatcctctttcactactcctctttgtcattgcggtggaccttctccaatgtatcatcaacaaagccgcaaatatgggcatcctctcggctcctcttgatggcgtcacccattcagactttcctgtcattcaatatgcagatgacaccctaatcatcatgaaagcctcgcaaagagagttgttctgtttaaaaggtattctacattctttctccatgtcgacatgactcaagattaatttccacaaatcctgcctcttgccgatcaacctggatgtcaccaaaaccaatcagctggaggcagtatttggatgccaagttggcaccttcccgttcacttatttgggctttccaatgggtctcgcgagaccaaaagtcaaagactacctccctctcatcaccaaagttgaaagaaggctcaacgccatcagttcttggttttctatggccggtagactcacactggtcaactctactttctcggcgatgcccatctttgcaatgtgcacccttaagattccaataacggtcatcaacgctatcgactgtattagaagggcctgtctctggcgcagcaatagtgaaatgcgcatcgtaatcctctggtcgcctgggacaaagtttgttgtcccagaaatagggggcttagcggttctcagcctaaggatccagaacacggccctcctgctcaaattcattcacaaattctatggcagagaagacattccttgggtaaatcttatttggaccactcaatactctggggcaagatcccccatgcctctcctgaaacaggttccttctggtggaaggatgtgttcaggttggttgactattttagagggcatgctatgccctgggttggggatggaaggacaattttgctgtggcatgatgtttggaacaatatctcccccagatccaccttcccttgtcttttctcatttgccaagaaaaaagattgttcacttcaagattttttagccaacatggatatggagcgcaattttcatactcctttatctcctcaggctgctcacgaatacctggctttccacgagatgatgagcaatcttcaaaattctgcatttgccaaagataaatggacctattcatggggcaataccactttcagctcgtccaagttctatagtctcacttttcagttaatccagcttcccgttgcctttaattggatttggcagtctaagcttggcaagaaattcaagatttttgtatggttggtctttagggacataatcaactccaagaacatcctcagaagaaagaattttttgccgctggacatcaaccttgattgcgatctgtgtgacatgcactgcgaagagacgacctatcacctgctatttcgctgccccttcagtatagattgttggagttatgtgggtcttcactggaatcatgacctcgatttcttccctatgattcacgaggctaagggtgcctggtcatagtttcttcatggaaattctggcactggtgctatggtgcatttggaagcagaggaacaactacatctttaggaatgaggccccttcgttttctttttggcgacgctgtttcaacgacatgttgaagttacagatgctgagatttaacccctcttctagagctaggcttaaactctcgatagcttcttgctcgtcttctttatttccccttctaatcactatttcattccaaaaatagttccaataaaatcgtgctataggggcttcccctatagcctttttcccctcaaaaaagatagatggcaggagaagtcctgtgcttttgccacctcaatctcctccagaactagagattgtttttttatcgaacacgcaagagagctacgtatcatttatattaagaagataaaaagggtacatcgaaaacccaacactcgagcacacactccctaactgcctagcacaaagacagatgcacctgttacagatacaccaagaggaacgaccaacacatcaacagcccaactctagagcctgggcgactaggtgggagacaccctttgcccctgctaaacaccaaagatcaagctcctctaagacctggttcacaaggcctgcaaggctaggcgaaactccatcgaacacatctattgcgaagcttccaaagagaccaagcccctagaataaccacatagttcagtacttgtttgatgagaccagagactacctcatttaaatgctgccaccaatcaccaaaggaaacaactctaggttcagggtagagagactggaggccaaacttctgaagaagctggaaccagaactgtcgggagaagacacaggaagcaagcaggtgatcaatggtctcaagttcctggtcacaaaggaggcatctaggatgatgttgcagccctctccgatcaagccggtcggccgtccaacatctatcctgagcaaccaaccacatgaagaagcggcaattacccggtgcccaggatttctaaatgcgctcccaagggtcaaagaggatccctccctggaagaaaccctctttttttttgaacaaacgcaggagacctgcgtgtcattatattaagaagaaaaaaacataggagagacaagacttgtcaacccctaatacaaaggcccctaggccgagacccccctgacattaacacaacgcgccacgcacacagagcaataacccgaccaaaacgaccaccagcaggcaaactgctagggtcccctagggagctggcgtaggaggaggtcctgcagagctgatgcaccagccaagcaccaaacgctgccctcctcaatcacagcactctgaactcgctgggtgcagggcacaaccccttcaaaaacacaagcattacgatgcttccaaatctcccaagcgaccaaaatgatcaaggaattaagaccttttcttagtctcttctccacttccttgatactttggcaccaccaatttgagaaacgagtgcatccaggctgaggtacaatggaagaaaccctcataggctgacttcgcagagtactgtccagagggtgagtgttgattggtgaaaccctaatctgataccatgtagaatagtggagtgacttgtattgataatagatgggatacaatatatatagagactcaaccctaaccctaataggccggcagcccaacagtggtgccggcccacacacacagtctaacagtgagaaccgccaaatgtgtctatcttcaacttctgggtccagcacaatctgagagagattatcccaaagctgcaaatactcaagtaaggcagcaacaccaagggcgcctttgaggcccgaaatccaaatattttgagtcaaagcatcaagaaccgttcggctgttggctcttcgtttgggaaccagccggaatagcagcggtgcaaggtccgcgatacactgtccatggagccatttatctgtccaaaaaaatgtattggctccattcccaatctcgctacaaatagcgattgagaagaaggactgcaccatatttggggcatgaactggaagtgaatcccaaggcttatcaggctcagttttttgaagccaaagccatctcatgcgcaatgcctagctaagcttctgaagatcagtgatgcccagaccaccaagctcctggggtcgacaaactttttgtccaagcaagcagactatgactaccgttgagctatttccttcctctccacaaaaatctcctcctgatcttatctatttctttgaaagcccacggcggaagctctacagccattagcaaatataccaacatggaggtcagaactgattgcaccagaattctcctaccttcccgagataacaggtcggccttccaaccaggtagacggtccgcaatccggtcaacaaacagctgaatttggtcccttgtcaacttaagcagggaaagaggtacacctagatatctaaaggggaattctttcagctcacatggaagaacgttctgaaccactgccacatccgtttctgtgcattggattgggaaaacattactcttaagcaggttggcctttaaaccagaggcatcaccaaagagttccaacatatccatggttaggttcaaatccaagtcagcaggatgaagaaaaataaccacatcgtcggcataaagggacaccctgtgttgcaacgcccttgtggataggggttgtagcagtccagcagcggaagctttagcaaaaatcagactgaggacatccataactaggatgaataacataggggagagggggcccccttgtcgcagccctcttctatgaaatatggtgaatccggggattccattcagtaagacctgtgtagttgaggatgacagcagaccactgagaacatcccgccagatcagcccaaagcttagcttctggaggacctccagtaaaaatgactaggatactgaatcaaaggcttttgtaatgtctagtttgaggagaatacgagcctgcttctgaaggtggaggaacctggctgtttgtttaacaagcaaaaaattgtcttgaatggatcagcccttgatgaaagcactttgattcggtttgaatttcttaactgatttgcatgcccccatgtcagactattgaaagttacgtcaccaaatggaagtgtcttgtcagactattgaaagttattatcaccagttggaagtgttaactagagtcattctgagctatagattttacatatggaaattacaacagtcacctttactttagaaatttaatgaaccttgtaatttaaatagcttccactcatgtatgcaattcggaaattgtatatgttctcccctaaaaatgttttaaaattagagatggtaaacatcacattttaaggtttatctgaaaatctagcaggacattttgtgtttgttgcaaatctgcataggaatcatcgtgcaacattatctaaacattgaactcagaataaagagcgcatgtctaattcatacatccattccacatacattccacacatgatttttaaacacttcgtgcacaatcttattcttgtgcatataacttcaagtttcaggatatatgtgtttctcactttgctaatgattgatatccatttagatatgtaggtggaaacaacttaagtggacctgtgccttctgaaattgttcaatcatcagtttccttgtaagttgttttatttttgttttctgtgtttgcactagttaatgaatgccaaattgttaaatccacgtagcaaaagtcaacatcctcagacctcacttggcttagacgtcaggttctccaactccatgcgaagtgcctgcagtgtggtcttgcgggcacggtcgcagtgatggcgtcctaggcctccttggtagtccgctttttgggaaagcgaaaactgcatctcaggtgggactgcagtaatgagggcatccagcgcccgtcgatcctcgtagtagtcgcgtcgccgtaccgaactgattcccacatgtggcgaacctggagtcgtactctcatcaccgcggccactcgacgtagttggtcttggtgagggtagatcacccaccgtcgggaccggcgtccctaacaacaacctagaccccgcggtgaccatggtaccaatccggggagggggagccgcgccgcctgtagaagccacgatctttgtcgacccggccgctgccaccaggagtgccgtcgacgcccgtttaggctgtcgccgcgtgcgttctcgcgcggagtgccgtcggcgtatctgcgcctacaaaggctgccgccgcgcgcgcccccatggggttacgcggttgctcattgtgtcacctgctcttgcgctgccagcctgagttcgtcgttggtgttgtcgtcgacagaagcaaagttgttggttctactgccgcgcagggcctcgagctctaccgctgccacacatgcagcatccgccgccgctgcttctacttccgccctcgttgctgccagttctgctgccgccaaccttgcagccctcgtcgttgtcgctgcagatgctcgctcgtgttcctttgtcgcggcgacctcgtcctcgtgccggtgtcgcgcactccaagcaaccgagcgctgggactgttcttcggacatggcatgcaagcgaggcgttactgtgtggggaagaggctgacttggacggaaggctgctcatctgagcaagagaggagggttgagtaggaacagtcggtgctcttgttgccggctgagtaccgggagaggcgcgggaaagagatgaacaagagatgtttagactgcatgatagtttggcttcgatatcaatcgtaagcaacgagactcttactcacatcgagaggagacattacaagtggggcaatttttcttttttaattttcctcacactacactatgtcataaccagctaatggttggggatacataggatacatatttataacccaaagggctgccagagcatatgctaagatgctcttaaggtgctcctaacgtgctgtcctatttctgccctctactgtgtaagtagagggactctaactctcatcaagaggatgacactatgagttggggcaattttctgtttatttcctcaaacactacacaatgccatacccatctaagggttggagacccatatttatagccctagaggctgcactaccacaccttctcacacacactacacaacaggattgtcctctagatgctaaagagactacagaggacagtcaaaagcgactgttgtcctctagatgctaaagagactatagaggacagtcaaaaagcgactgctgtcctctagatgctaaagagactacagaggacagtcaagctgtcctctagatgctaaaggactacagaggacagtcaaagcgactgttgtcctctagatgctcaagacttattccatcattctccccctaagtcttgggcgtcgtcttgtgagaaagttgggccatccccgacctggagcaaagctcaacaaacttgatcttcccaaggggcttggtgagcaggtctgctagctgatccttggtgttgatgtagagcgccttgatgctcccttctgccacacagtctcggatgaagtggtatctcagccggatgtgcttgctccgttcatggaacacggggttcttggccaatgccagagcggactggctgtccaccctgagttccaccgctccagtgtctctcccgaggagatcactgagcagtcgagccagccaaagcgcctgagtcgaagcagtggacgccgctatgtactcggcctcgcagctggacatggccaccacctgctgcttgaccgactgccagctaatgaggcacttgccgaggaagaagaggatcccgcttgtgctcttgctagtgtcgatgtcaccggcgtggtcgctgtcgctgtacccgacaaggtgtgcctccccagggcacctcgggtagtagagaccgtggtcgagagtccccgcaacatagcagatgatcctcttcacagcctgctcatgctccgtcgtcggtcgctgcaagaaccgactaacgtagccgacggagtatgccaagtcaggccgtgtgtggacgaggtagcgaaggctccccacaagacgccggtactgtgtagcatccacctcctccgtcgtgctgtcgcgactcagcttcagcctctcctccatcggagtgagagctgggttgcagtcggtgagcccagccagctcaacaatgcgcttggcgtaggcggtctggcgaagtgtgatcccagagtctccctggtgcacctcaatccctaggtagaaggagagatgccccaggtcactcatttggaaggtggccttcatctcttccttgaacgctgccacctctgcatccttggcgccggtgatcaccaagtcgtcgacgtagacacccaccagcagggcacttcctccattgccccgccgatagatggccgcctcgtgcgggcttggcgtgaaactcattcctttgagcgtggaatccagcttggcattccacgccctcggtgcctgtcgcaggccatagagagccttgcgcagacgcaacaccttgccctccttgccagggatcgcaaaacctggcggctggtgtacgtagacctcctcctttaagtcgccgttaagaaacgccgacttgacatccatgtgatgaacgtgccagccctgctgggctgacagcgcaaggaggagtcgcacatattccatccgtgccacgggggcaaaagcatcgtcgaagtcgatcccctcctgctgtaggaaaccgcgtgccaccaagcgagccttgtgcttgacgatggcgccggcttcatccctcttcagtttgaacacccacttaagggtgatcgcgcgatgaccatgagggagatcagcgagctcccaagtgcggttcttctcaaccgcgtccatctccgactgcattgcggcacgccaagccgcatgtttctcggcctccgcgaaagaccgaggctcaccatcgtcgcatgcaagatgcaactctcctgccagaatgcgagacgcagggcccgacaccgacgggtcgatgagaaggccctccacccttcgataccgcaatggctcgccgtcgtagcacgcgtcgacgcgctcctcgtcgcgggagagcggggtcacgagctccactgggtcgtgctcgacacgagctggtgtcggcgaggacgttcccagagagggtaccgtcgatgctggagtacgtggtggcgaagagctcggtgtagccggagtcgtggctggagtgcgtggtggtgaagagctcgtcgtagccggagctggagagcgtggcgctggagtcggtgtagacttgggggctggggtagacctgctcggagaagagttgcctactcccccagctccctcaaagtggacgtactcgatggtgaagtcgtcgtacgtcggagtcgtgccgtcgtccaccgccttgtcccacgcccatcctcgcccttcgtcgaacactacgtcgcgcgccgtgcgcacacgctgtgttcctgggtcaaggatgcggtaggccttcgagccctccgcgtagccaatgaacacccccagggtgctcctgtcgtcgagcttgccgatgtggccaagctccttggtgaacgcgaggcagccgaagacccataggtgagagaccgccggcttgcacccatgccaagcctcgtacggtgtcatcccgttgagtgccttggtgggcgagcggttgaggatgtagaccgctgtcaccaccgcctctccccagaagacagacgacattcccctctgtttgaggagagcccgagccatccccacaaccgtctggttgcgccgctcgacgacgtcgttctgctgcgggctgtacggcgcggagtagtggcgctgaacgccctcatccgcgcagtacgacgcgaactcagctgccgtgaattcgccgccgttgtcggtgcgcagcacgcagcttgcggccgcactccgcctccgcagcgacctgcacatgcctgatggcgttcgcagcctttcccttgctaccaaggatcatcacccacatgtagcgggagagatcgtcgacgagcagcaagaagtagcgtcgtcctcctggtgtggctggtgtcaccgggccacacaagtccccatgcacgagctcgagcctctccttggctcggaagctcgactgttggggaaaggggagtcgtctctgctttgtcaacacgcagacatcgcagaattgctccacatggtcaaggcacggcaggcctcgtaccatctccttggcactgagccgcttcagggcctcgaagttaaggtgcctgaaacgctcgtgccatgccccgtcgtctcgacgagcagcaaggcagcaaggttgtgccaccttcacattgaggatgtatagccgatttggactcctgcgtaccttggcaagaaggcgacgagaggggtcccagatcctcatgactccgtgctcgacctccacgcgcgaatcgttctcatccagctgtcccaagctgatgatagagttcctcaacgcggggatgtagtagactccggtgagcagcctgtgctcaccagatgcggcggtgaagacgactgagccggcgcccttgatctctacgccggaggcgtccccaaacttgacggagcctcggacgctagagtcaagctcggtgaagaactcccgtcggccggtcatgtgatgagtggcgccggtgtcgaggcaccatccttcgatcatgtctttgctggagccgtcgccgaggaaagcgcgtgctttcgactcatcaaggtggaggagtgccgctgcggccggtgccgctggagatagctcgatgcttgcatgtgctaggagcagagcctcctcctccgcctccgcctgtgcgacgttggcctggccacgtcgtggctgtcgacagtccctggcccagtggccaagcttgccgcagttgtgacagtcgttgtctcgtgccggcttcttgttgccgacggcgccgccttgggcacctccacgggcaccaccctcagcatgtcctcgcgccccggcctgggcgcctccacgcgccttgcgcggcttgccgcgtttgcggcctcgtgtcgaggaggactcccccttcttctggtcaccctggcaggcctcctcctactcccgagtgagatgtagctttccgccaatagtgatagggccagagggagcctgtggttcgtcgccgtcgaccaccttgagacgacctatcgcctcttcgatcgtcatcgtggagaggtctagcagatactcgatcgagcgagcgatttgcttgtacttctcggggatgcaacggaagagcttctcaacagctctctcctcatcgtaggtgtcgtcgccgaactacaccatcttctgcaacatagtgttgaggcggagagcaaagtcatcaacatcctcacctggcttgaaggccaggttctcccactccttgcgaagtgcctgcagtgtggtcttgcgggcacggtcgctgccgatgcgggtcgcagcgatggcgtcccaggcctccttggcagtccgcttctaggaaagcgaaaactgcatctcggacgggactgcagcaatgagggcatccagcgcccgccgatcctcgtggtagtcgacgttgccgtactgaactgcttcccacatttggcgaacctggagccgtaccctcatcacctcgacccactcgacgtagttggtcttggtgagggtaggccacccaccgccgggaccgatgtccctgacaatggcctgggccatgcggcgaccatggtaccaatccggggagggagagtcgcgccgcctatagaggccgcgatctccgtcgacccggtcgccgccgccgggagcaccgccggcgcgtctacgcccgtctgggctgccgccgcgtgcgccctcgcccggagcgccgtcagcgcgtcggcgcctatctgggctgccgccacgcgcgcccccatggggtgcgcggctgcccactgtgccgcctgctctcgcgctgcttccctcgccagcctgagctcttcgtcggtgttgtcgtcgacagaagcaaagctgccagctctactaccgcgcagaacctcgagctagagcatcttagactagggcatcttagaggacgacatcttagactagcatcttgtcatatgcttgactgccttgggcagctataaatatgtaacccaacgacttaggtgggtatggtgttgtgtgagaaataaaactagaaaattgtcctaactcctagtgtcatcccctcgatgagattaagagttccactacttacagtccatccgacagtaggcatgcgtcggcacggccacgtcggtgaggacatggtcgtcgagggcgtagcggtggagagtcagtagaacctgatcacgtcagtgagtgtactgtgctgagtccgtatgctggggagccccgccgcctgaatatggaggctgacgataaccgacacgtcgggtgcgggaagggcgacatcatcgtcgatcttgtgcacagagtgggagtcatcacccgggacgccccctgaacgagtggacgggcgcgatgagctggcactcgagggcgtcgattgttgtgtgctcttgagaggtggttatcaccgataggtgactgtaaaccggtggcgagagcgtgtcgagccacccctcgagagggtaagatccatcagtgaagggggagtgccactcatcatacctatgtagggaaagtgaggaaccagaagctcggcacgacgggcatcgacatcgacagaggcacatgtgtcgcaggcgtggccttccgtagcgtggtcgcgtagacgacaacatggaggcgggtgcagctggggcgccactgtcgtggaaggggaggtcgttgcgcacgttgtcgagggccgcacagaagacggagggggggggggcaaagcaagctggagaacaaccacactactctggggaaggaccgcgacgacatgctgaagagtggcggcgcgggtcgcatggagggtggcggcgctggccgccgcagcgacgagatatgggcgtggggtttgtgccgccggaccccacgatggcggtggttgggggtggtgggtccgagacggacgcgacggagaaacccagcggcggcggcgcagagaagtcttgcgaggttgcggacgcggtagaggcgcgagcggtgacgtccgcctagtgtttgcaatggccttagtagcactttaggtcctcggtccgaatccctatggtagtgaattttaggatgggtaaaaaagtttacttgttgattcccctagttgtcatgggtggtctaacctgttgtgagcgtaccctcatgtaaggggctagtagtgggttgggcctcaaggcttggtttaaggcccgaaccattgggcttggcatctccatgtatgagagccctagcttttatgacctttctcggtcgggctcctcctgttgcactcttagtaaattatcgtgccgacggtcttctccaccgaccgagttcttttagaatctagctagaaccctctgcgcttttacaaattatgtttgcatactgtttgtttcagaataatcttttctccaatgcagactaagtgatgcttgtctaactcttctcaattttgttataaactccaggg

SEQ ID NO: 1173 - DNA, 796 bp, Zea mays
  Intron number 6 from transcript GRMZM2G035461_T01 (locus G RMZM2G035461) derived from phytozome v7.0 (chr-ID 1; pos 3 3885694 to 33886489 reverse strand)
aacttgtacgaagagaatttgagacattatttccggtaactaattgagctctagtttaagttcatttaagataagcttagctggcccagaattctgtgtataccatattttaccaacttgtcaagatattaaaagattttcgtgtgcaagcgataccgtctagctttaagatgaatgtataaattctaatccatccattttctttgtattaattgacccctttccgaaactccccattccattgcagtactaaaagaatttgttgtcaacttattttctactaccccttctattcaatttgtaaggcgtatttttttattgggaaaagtcagatttcctaacttttaaccaatgatttattctaattatatggaagttcattgttaaaaaattataaaactagactgttcttcaaagtacttttaatgtgatgttgatttagtaataaatgactataaagagatatgaactgtcaaaatatccttataaatatttttttttaaaataaaaaaacgtgccttataaaaatgaatggagggggtattttttatcgttcgaacttaagtaatattggagaaatggtagtttggatctatcctagaaactgttttgggtagctttatagattcataggaatatttctctagcatagttgcattaaaaccttgaccatggttctgctttacagcttatgattacatctggggtataagccaatcagctatggggtttgctgcttcaattatatggcaataaaaattgacttgacaatctgtgcatgcagtatactataatc

SEQ ID NO: 1174 - DNA, 4068 bp, Zea mays
  Intron number 6 from transcript GRMZM2G113232_T01 (locus G RMZM2G113232) derived from phytozome v7.0 (chr-ID 9; pos 1 47396913 to 147400980)
tacaaacaacaatcttggaagaagtgtcagtaaaggtaactataaagtaggaacatcctttaagattgaccttaccggtgaattgaacagagtaaatgttctttggtagtttggcttcacttatttccacacaattgattgcgtgttgttttttatttaatgatttctactgtcattctgtggtatttgtaatgctaggtgattatatcatgcactgtatatgtgataatcgattactagtttgctacctcaatgtttggttgttccagtttttttgcttttgtttggggattttttgtggcagtattcttttgctgtcacagtagctgtttgattgttagcataattatgaaactatattttgaaatttaatcaacttttgttatgacatattttctattagcagaagtatctggtcaaaactcaaaagtccacataattgcaactttcgagcttgtggcctggtggaatgtcgctattctccagatatacacatatacattttctagtaaaccaacctaatactggcaataagaatttcattcttttcttatgctgcaacatgtcctctgtagctatagtttactttgttctctggtctattctgttctatctagctatgacaagatgtcgggtacttaaaatagcaatctcatgttgacgcatgtatgttgggtgaaccctccgtgttcattttagcatggcctcatcttaggtttggtacggttttattttgctgttacaaactattgtaatttcattgctttcaagtatagaaattcggttcgtccgtggcggaaaaaatgtcgaagctatatgttctaccagtccttgttccaggttaatcattatgagtatatcatttgaatgttgtgtcagaggaggtattgctgcagaattaggtgcatatattcatgtgtaggggagtatatatatgatcgtagaggtgggcggctagggaaaccctatgcgccaatgagctagacccaacctcacgcacgagattggtcgggcccaatatatataaaccctaatacacatataggcaacaattagtattctaacacccccgcagtcaaaaatctagtcacaagagatgttgagctagatcgaagctccgaaaacatcgttgaggggaggccattcgtgaaaatattggcaaattgtgatgatgttgacaacaccctcctaacgcacaacgcacaaatccagcatgcccatcattgcttcattggcgagcatgacaacatgctaggctgcgtgccagcgtctgcctcctccggatgttggtttgtgcgacgacgaccgactttcccagtttccctaccctattctcggtgcggcaacagagactaagcgaccagcttgagttatgatctagtttactaattgtattatgtgtatgttcaattatatgctatgaaactacttctataggacatcgattcgctcgacgatgctatatggtgctgaatgttggtcgacaaaaaggcgacatgtccaacaactgagtgtagcagagatgcgcatgttacattggtttggtcggcacacaagaagggatagagtccgaaacgtagatattcaggatagccgatagggtcgtggtggcaccaattgaggagaaattgattcaacatcggttgagatggtttggacatgtctaaaggagacctcttgaggcgccggtgcgtagagggattttggagcgggtcgataatgtaaaaagaggtaggggtcgacctaaaataacttgggacaagggagttaagagagcttaaggagtggaatatctccaaggaattagctaaggataggtgctcttggagactagcaatcaatgtgcccgaaccatgatctttgccttttttcccttaactctaccgtctttcttttaccctttcggtttttttctatccttgtttcttgtgggtttcatctctagcctaccccaacttgctatgttgttgttgttgtatgaaactacttctatgtgatactataatcaactatacatgccaaaaggctactaagataggttttaaaccgatttttttgtgttctagtaaaatttgaatgcccattctctaaatccagggcacgtccctgctggatggaggtgcagaaggtggcgttgagatggagggtgtgggtctcatgattcctgagagagcgagctagaggtggcacgtcgtgccattgtgctctgctccctaatgatccaacacaactcaggggagatggtgctggagatctagcagatgatgatgatgtccatccgatcgcaacatgaatcagtgtttgacggagggttagacaagacgcggccgacgagggtgttccgtgtgagagcaagtagcacctgatcataccagcaggattaattgtcggaggaggatgatcgtcaccaacaatcagacgccgggaacatcggttgcatggctgtggagattggcgatggtggcaacctcgtaagttgcaagacgtcctgtggggacgccctagggtgggggccggtggtcgtggggtgttgtaggcccaaaccttatcgggtggcgacagcctttgcttgagggagcagcagcggcctttctcctattcgagaagggtggctgcctagacgtgagcgtgtgctttggcagcctttttttggcaacctgagctgtgacgagcatgtcgtcgatcttcttgtggaaggccacaacctcatcaacatgggcatggggcacgatcctcgacagttgacgaggtccttgccatgggtgcagaggtggggtgaaatgcgtgtgcgttgctgtggcgacacagcacaagggtggcagcgtccctagaggggtggttgccaggggaggagcagaaatgagattggacttggatgctaagttagaggcagttttgcgacagaaatagatgcatctattatgtgttcgggaacacatatatagtcgtagaggtgggtggctagggaaacactaggcaccaatgggctggtcccagcctcatgcaggagatgggccaggcccaatatgtataaatcataatacacatatctgcagcaattagtattctaacattgtgatccaatcttgttagtgccaacttgacaaaaatcttttggcctaaataatctctgctcagccagcaattttaagctccgtgcatccctccttggtagatttcattaactagaaatttcttgtctaattggtatgaggtccaaacaagccttaaacaactaggtgcacttacttcattttgggtttgttacaatttatgtcaatactgacagcatcttgtaaggatgtgacccatagtagattctccttgagcagttttgtgattgtcacacttacactagtagagaacagatctttgattcaacacattagtcatagctagagttgggcccatgactaatgtgagcattagttctgggtccaagtttcatgtgcattggacgacctttagtccggtgggctaaagggtctacattagtcttggttggtgttaccaacctggattaaagagctttgagccattagttccggttgataacatcaacctagactaaaagggtcattcacgaattagttcaaaaggaaagtatcccattcccatccaaagtcacatgtgctgtaagatcttgggtgagtcccatgaatcgcatgggtgggagtttgtgccaattttttttaaggccttgcagagacgcagaccctttagtccctgttcaggcatccgggactaacagaccatgccctttagtcccagatccctagtcctggttggaaatcaggactatagccagtttttgtactggtgttatattcactcttgcatgtatattggccttttgagtatgctaattaagggcagcatacttgattatttaatacttaaatatgacaattcttccttgtgctctttacatgcaaaagaactcttgtcattactttgtcttcttatccttttgttgctaactacgtccagtcttttaagaagatgcgttcagtgaaaagttgcggttttgcaggaaatttctttagaatacgcagtgcttttgcgtat

SEQ ID NO: 1175 - DNA, 9598 bp, Zea mays
  Intron number 6 from transcript GRMZM2G151195_T01 (locus G RMZM2G151195) derived from phytozome v7.0 (chr-ID 5; pos 4 0340698 to 40350295 reverse strand)
ctgctgctgttatcttcaaagaacaggtagttatgcactggatacatagtactgaatcaactgttgagaaagtaaaagtaaaagctcatagttaagtgttactagttagtggcctgtgtgttgctacgggcacctaacatttaaacgaaataatataatgcataacaactgataaatggattctgtggatacaattccattcagaaaaaagagcaaaaataccacaataaagggtacccactaggccactacccaacatggcaaatgtcctaattaacttgaattccagtacaatttcctacattacctagataaggatatgcttccacagtgtttctttagtctgtcgtaaaattgtacaggaaggcaacctgtggtgtcttgctggtaattcagcgcttagccttctgtgtgcgaggttggtggggctgggtccttgagcaatccccctggttgtgtttagggcgttttttcctccagagtgttgtgttttttctccccttgcttaatgaaatgacacacagctctcatgcgttgttcgaaaaaaggatatgcttccacagttcatacttttttatttgtgcaactaaagtagtacatatcaatgtatttttctgtagcaccactcctagtgcgagtgccttgggcattaacacacaagtctcacagcttaaacctcaaagtacttcagatgaacctatttcccacattttcgttgaaagttaagctcaactatacaatgtattctgaagcaatcacacattccaatcacattaatctgaagctatcacacattccaatcacattaatttgaagctatcacacaatatattgacatccttggaagtattgtacgtgggaaagttcaagcgataagctcaaccatagagggtctgcaatctatctaccctcgttctcctcgtcaatacaacctgcaaatcattaaagatagcaatgtgactacatatgaaaaccagatctgcaagcaaagtgaataattctattgtcaaacagggattatctctgacgtacttgtctacactgctaaaaaaagtcaacttgaatagaaaaaacttaccacaaaggtgcaggtaagagtcttcaattattttgaaccaaattagataaggaattctatagatacattagaacagcattagtgggtaagcactaactcttaaaaaactaacttgcatgactatacaaacggatttccaggacgaagttaattattaccaattacagttcaggtagtagcttcaaattgaatttgtactggacatgcttatcaaggtgtctgtccattaagcgtcgcctttgcgtcactttagcgataaggcgcgctcacagggcaaggcgtctagatcgccttgtgccggggagtaaggtgtccgccgcggcgtaaggtgcgggcggggcgtcggcggggcgacgcttaggggataggtagggttttgaagggcggcggctggaaacagagaagagggcttggcctgtgtggcgggctggcgggcgcacattgctccagccatcagaggagggagattgcggtggaagaaccgagggagagagagagaggagagctgtgggtgagggagagagaggagagctgtggggagagatgcagcgtgagggagagatagaagctgacagctgttactaggttgctggtggctgtgacctaaaactgtgttttggactggactcactcattgtgaggttctttctttactttttttctgcttctacaaggctgaaattggatctattagatcttataaaagtgctagcttgcttttaactttaaattagtgatatataaataatgtttgatctctttttttatatttatctatataattaagggatcgcctcgccttacgctttatcgcctaaaagataaaaagggggtcggtcgccttatgtcgccttaccaccttaataactatggtactggaacaagtaaaagctgcagatctcactattttttttttaaaaacgcaggagaactgcgtctcattatattaaggagaaaaaggtctaagaagaccaggtacaacaagacagacttccttacagaggttgaaaaaccagaaaaccaaaataatccatcctagaacagcaaactactactggtctagaccccctccgagactagccctcaaggagaggggcagacagataggaaaggcctttagccccaaccatttcccacattcatctttcctccaaagccatcctaatggctaaagacacattagggttccagttatcgaagacacatttgttgcgatggttccaaataatgtaggcccccaaagcaatcagagaattgagcccctttctaacaagacctctgactgaagaagaggcttcttcccaccagctcatggaggacaaaccaagttgaggggctagcatttgaaggtcgaaagtcctcagcagctgaaaccaaaacatccttgagaaaacacaggagaccaggagatgatctaaggtttcatcctcttgatcacacaattggcatttcggagggtgatcaagccctcttttggccaacctgtcagcggtccagcacctgttatgcgcaacgagccaaagaaaaaaaatctgcatttaggcggggcctaggtcttccacaccctgggatagtggctgaaatagatagatcccatgaatagtcatcgtctggggcaatactgaaaacatgtttgtcttcaatagaaggctgcaacactatcttagagataaggttccaaagctgaaggtaatccaccaaaactcccaccaagagggcccctttgatgtcagagatccatcttctatttaggagagcctcctgaacagttcttctttttgtgatcctcctgggaatacactgaaaaagcctaggagcaatgtcacaaattctctgccctgagatacatttatcagtccagaatagggtgttggtgccatttccaacttctgaaacataggcacatgaaaagggagctgcgcccagggacgagttggatcagctttatgcagccacaaccatctcatacgaagagcccaacacatctcgggcagactggagatgcccaggcctccaagcttaagaggatggcatactctcccccaagacacaagacaatggcctcccttagcctctttgcgtcctctccaaagaaagccttttcggattttgtcaatggcttcccaggcccaggaaggaaaatcaatagccattgctaagtaaaccatcatgcctgtcagaacatgctgaacctgaatccttctacccgctcttgtcattaaattagccttccagttagggagttgcctcgcaattttatccacaaaaggttggacttggtctttagtgagcttgactagagagagagagaggaagaccaagatattgacaagggaaaactgaaagcgcgcaaggcagcatactttgagtaaccacaatgtcctcagagcaatggataggataaatgttggacttactttcattgttctggaggcccgaggaggcaccaaaaagatgcaaaatctccaaagctgctaaaatatcatctgccaacgggtgcaggaacaaagccacatcatcagcatacatagagacccgatgaagacttcgtgtttttgatagaggctgtaataatcctgcttcttctgctctagagaataaaagacccaggatgtccatggcaagaataaaaagcatgggagatagtggatccccttgcctaagaccccttcgatgaataatgcactttcccaggaaaccattgagaagcacatgggtggaagaagaggaaagcagcccacatataatgtccctccaaatttggccaaaaccaaggtgcttcatgacatcaataagaaagggccaagagaccgagtcgaaggccttagtgatgtccaacttgaggagaagactagcctttttctgatgatgaagtaaccgtgaggtttgctgaaccaacatgaagttatcctgtataaatctccccttttatgaaagcactttggttgggtgagaccatctcatgaagccttgtagccagccgattggcaaggactttagtgatgagtttagcaacactatgaaccagacttataggcctaaaatccttaacctgggcagcaccctccttttttggaatcaaagtaatatacactgtattaagcttgccaaagttgttgaatctcctgccccaaactgctgacacaacattcatgaaatcctttttgattatgtgccaacaaactctgtagaatcttccagtaaatccgtcgggtccaggtgccttatcagggggcagagttaaaatagtgcccacacctctttttctgaaaaaggtgcatccaactcagagaggtcatgactaggtataccaagagcttctaaatcaatgattctatctctgcccacatttgtaccaatcagattgaagaagtgatcaactgctgtagccttctcattatgcccagttaaggtgacatccccatccctcaacgaggtcacaacattcttcctttttcggtgtctggcatgcaaagggaaaagcttagagtttgcatggcgaggaggatgattgggattcgggcgatccccagtctcatcaccggattgagcaccggatagatctacaccttaaatatatattacttctagctccaattatatgtgtacttctaggtctcatcaccggattgagcaacaaaatagtggttcccatgtctctcacactgctttgaattaaagatataaattttgcgcaagctgtgcattctgtcccaaatgagggggtgtttggttacaccccgctaaaatttagcccctgtcccatcgaatgtttgaacttccgttccgggtattaaatgtagtcggattataaaactaatttgtcagccgaagattaaaagacgagacgaatctagtccagttggttgggtctatatttcatactcctatttaaaaatcaaacgcttgatgtgacccgggctaaactttagcaggagcaaccaaacaccccctgaatagataaccttttctgtccaagttagcagctggttcttttagttaacttttttgttggtagtcaaatgatgtttcttatatttttaaactgcagatttggtattccaacatggccttagcttaaagactgaaatgataatcaaacaacaaacttaaattagttttatctttaagattatgtggcaacttaactttctgtcccataggactgttgttatggtcagcagatggctgcgagggtttgagggtgacgactagggttagaggtgctggggaggccagccgcaaggctttgcccacggccgacaagagaaaagggatttccttctaatctcttgcttaccttcaattgatacaatccttcttatatagagagggttacttggcatctaagcactagatctaatcttatctctaattctaatcttatcccaaacttgccttatctttatctaacctacctgaggggcatgttgctacagtaccgacgtcattgtagcgggccctcttgggccctggcgctacacccctcctggacaagcaggtcgtcctcgagctgcgacataacatgacgctaacgatgactctgctagagtgctagacgcaaacctaacacctaaaaataggccttttacatcttgacttattttattattctgaacctgaaatagactgcgactattttttttgacccgttaagatgagacagacaccttccgcgcactggacttgcacgtctgcagccacctagatcccatggatgccatctggacgaaaggggagcacatggatggccacctggaatgggtcgcaacaatgaccaacggaggcgccctcatggcggccggtagcggaatgtggtggcgctaagcagtgcaccctcgccgatgacaaggaggggagcgccttccctatcgccgttgccgtagagttggagttcgttgccaacgggacacacaccatgctcgcacttggagatggtgggccgacgcgactgggtgaggtcgtgcccccatgtgccgaggtcaaccgccaccaaggctgccccgagtgtctaccgacgcacctcttgcagccgccgacgcactaggaggccatgctccgcagcctgtagccgcaccaccgccgcttgaagatggggcgctgtcctgccgacgcgctagggaggcagtgtgccaccgcctgtagctgcatcatcgatgccccgatgccatccatgcccccgtagaagacgtcatcgtagtgccgctatggcggcacatgcatcaaaacgatgaacaacggggtcggtgaaggagacgttaccatcgtgatttccggcgccgtcgttgatgagagggcgtactatggaattggagatggtgatggtggcatggagatgaggtaaaggggtaggcctccctgagggatgattgcgcctgatgtcgcaatctgtgtttgaggtgaagacattactggggtccccccatagccatggtgtatgatggaatagggaaaggcgacgatggcattgggcaacagatgaatgggtagacatgatgccgctggggcgctggtacgtgacatgccataagatatcggcggctgtgggcagtggctgctgctgcggaggaagaagggcggttgccaatgtctcctgcatggtttccatggatcgcgtgagctcatgggcggctgcttccaaggactcgacggggaggtggaggtggtgtgtatgaggatgtggcgggtctgggcaccgcgtggtggaggccgatgactggatggtggtggacggagggcttgacatctctgataccagattgttatggtcagcagatggctgcgagggtttgagggcgacggctagggttagaggcgctggggaggtcggccgcaaggctttgcctacggccatcaagagagaagggattttcttctaatctcttgcttaccttcaattgatacaatccttctccttatatagagagggttacttgacctctaagcactagatctaatcttatctctaattctaatcttatctccaaatctaatcttatcccaaactagtcttatctctatctaacccacctgaggagcatgctgctacagtaccaatgtcactgtagcgggccctcttgagccctgacaactgtattgaagcagtttatttgcaagattattttacaagcacatcaacttataccattctataaccaagattttctcattaagtgatcaagctgtagactggttagcttcagaactaatggtgaaaggctgctattcaaatggtcatcaaattgatcttgagaataccatatagttctgcttcagaactaaatgcagcaatctgttaatcaaaggggcatcaaatcaatattggaaatactatgtagttttgcaaatcaatgcagcaacctctagcaattttggtcttggtggtgagtgatcccaagtctgggataattccttttctaaaagaatcaatcttaatatttggtaggaagtggtcaaaaagtctggaataactatcaattgtatttgttttatggaaaaatcaaagaaatattataactgtaagaacagtgcaacaacaaacaacaacaaagcctttgtcccaaacaagttggggtaggctagagagttaaaacccgccgaaaccacaatcaaggttcagtcatatggatagctattttccatgcactcctattcaaggctaaatattcatgtatattccatcctttcatgtctcattttattgtctcttctcatgtcaattttggcctttccttgtctctcttctcattgttatcggcctatcgcgccttagaatccttttacgcattggtgcctctggaggttttcgttggacatgtccaaaccatctcaaccggggattggataagcttttatttaattagtgctacccctagcctatcgtgcatatcattgttttggattccatcccttcttgcatggccacaaatccaacacagcgtacacattttcgtaacactaatttgctgaacatgttatgatgtcttttttgtaggcaacattctgcaccatacactataccaggtctaatcgtcatcctataaaacttcattttagcttttgtggtaccctcttgttatgtagaacgtcagatgtttgacaccacttcattcaccctgctttgattctgtggctaacatcttcatcaatatctcgtctctctatagcattgatcctatatatcgaaaggtatccttcctgggcactacttgacctttcaaactaatgtccctttcgtcatgtatagtagtgccgaagtcacatctcatatatttggttttagttctactaagtctaaaacctttggactctagagtctctcgtcacaactctagtttcctagttattcctgcccgactttcatcaactagcactacattgtccgtaaaaagcatacaccaagggatgtccccttatatgtccctcgagaccttatccattaccaaggcaaaaagttaagggctcaaaggtattaattgatatagtcttattctaattgtgaagtcatccgtgtctccatcggttcgtcacttgtatgaacacttgtcacaacactattatatttatttttaatgagaccaacctacttagttggaagttggaactttatggttggtcaaagctcaccacataacattctttggtattttgttataggccttctccaagttaatgaaaaccatgtgtaggtccttcttgctccctatattgttccatcatctatcttattaagaaaatggcttccatggttgactttccgggcatgaaaccaaattgattcgtagagatccttgttatttctcttagacgatgttcgataactctcttcagtagcttcatagtatggctcatcaacttaattcttcggtaattagtacacctttgaatatcttgttcttgtagatcggtaccaatataattctccacttgtcaaacatcttgtttatccaaaagatatggttgaacaaacttggttaactatactatagctatgttcccgaggcatctctatgcctcaattgtgataccattagggccaatcgccttaccctttccatccttttcaatgcctctctagtctctaatcttagattcttggatcctacgcacaagattgtcattttgcgctttctgtgttacagtattacctggaaagccttcaccttttatatatcaaccttttggaagaaactatttttgtatatggcacactgaatatctcttctgttgatgccattcagtaattactatgtattgttttttatttaaaactgccactacaaccgaaatagtatttactattttaagctgcagaactatttataggcacgccaccatcagcatagttgacgattattaattgcaccaaagattatgtagtcacattatctgcagagcagctgtgctaactgctaaccagttgagtgatctttgagaagttggaccaaatcagtaatgtcttgcgaattgttggtgtgttttacagattgagaaggctttcagagaaggcacagcgcggca

SEQ ID NO: 1176 - DNA, 19585 bp, Zea mays; identical to SEQ ID NO: 675
  Intron number 5 from transcript GRMZM2G167886_T03 (locus G RMZM2G167886) derived from phytozome v7.0 (chr-ID 2; pos 1 73175013 to 173194597)

SEQ ID NO: 1177 - DNA, 4208 bp, Zea mays
  Intron number 8 from transcript GRMZM2G701689_T01 (locus G RMZM2G701689) derived from phytozome v7.0 (chr-ID 3; pos 1 19982020 to 119986227 reverse strand)
cttttggaaaacgggagggtgagtgaaacccatttccataaatttctgttttaaacaactgcaacatcaacatgcatactctaagatcatagttgcacctcatgcagtcttatttagtatacaagtaacaaaagcagctaagagacggttccagtcaatagtactagttatagcttcacataaaaccttgagtcactgagttctttaggccctcattcaacttgaaaatatattaccatatattccatctgttatttattacctatttaaaaagtaaaaaagaccgttgcacgtattagaattctaccttatttattagtttggagtactctttaatttgtttgtttcctaaattaccatggtgaccattggcatcagtagtctggtcatgctgtgtaggattgccccggctacggaggttgtatgagtggctaatgggtggagggttggaggaagaagggtgagaggacgtcgcgctgacgcccagtgtcatgtgcgggcgcacctacaccagacgcgcctgcgacgtgcgtcgggcagaagagcgcgcgatacgcgcgggcggttagccgcgcacgcgctggtttgttacagatagatagaattactatctgtttcaagttcctagaattaaggaaaagatttgggggctggttgtaaggaaagataagatagctatccctaggattaaggagtaattatctctagtttgttagggtcgatcggccatatatatgtgtaaccagccgtctggaaggattaagcaaagtttattctctctaatctcacctctccactcaccaacaaagcctgcgactgaggggcaaaacctcgccggagaagacgggtcgcgactacgaactgcgtagtcgaggccttgctgcccggggatactcaacccttgacaacctggtatccggttccaggcgttcctcgtcttcctccacgccacctccacaacccatcatcgccgctgcgcccttgaaccgacagcctccccaacccaccgtagccgttgcgcccttaccccacccaccaacatcaccaccaccagccgacgccacttcagctccttcagccatgtcagcaccaactactgttgatttggccaagatgatcgaggccctggccaacacggtgacaaaccttcagacgatcgtggtcgcactgtagaaggagaagtcatcctctttgtcgactaccgacaggggcaacgacggccaacaccacaacgatcgtccttcgcggttccagaaattggatttcccccgctacgacggtacgtccgatccattgatctccatcaaccgctgcgaatcgtacttccatcagcagcggatcatggagaaggtctggatggcctcctacaacttggaagacgaagcatagatgtggtacatccagatccagacggatgaaggtaccccgtcatggcgtcgattcaaggagttgctgaacccgcgctacgggccaccgctggccgaactggccgcatgacggcgcactggcacgatcgccggatatcaagatcggttccaggcgctcctacctcgcgcccggacactcgaggagtcgcagcgggtccaactcttcaccgcagaccttcagccgccgctcagcatcgatgtccgcatccagaacccttagtccttggcatctgccatgagcctggccaggcaattccagttgtgcgagcagtacgccgcccgatatcccgggccccaccaggtcctcgagcagcagcacccgcgatgatctccgtcgagggccgccagatcaagtgactcacccaggcggagcaagaggagcggcgccacaaaggcctctgctacaaccgcgacgagaagtacacccggggccacaaccgcgtttgccagcggttgttcctcttggagggcatcgaggaagacgatgctaacgccatcaccaaggagactgcgggggccgcggacgaggacgcccccgtcttctccctataggccctcgtcggggtctccgtcgtcgacaccatgtagattgttgtcacgctcagcttcgtggcgctcgtcgccctcgactccggcaacacacacaacttcatctccgaggcggctgcctgaccctcaggccttcctcttcatcagcgcccacgcctcacgacaatggtcgccaacggcgagcgcgtctcgtgcgacggtgtcatccgcggcgcaccattgactatcgacggcgtcgccttcccgccgacctcttcgtcatgccattggcagcctatgacatggtcctaggcactaggtggctcgacaccttgggccccatcgtctgggacctaggccgacgctggatgacgttccagcaccaggggcgtgccatctcctggacgggcatggcgtccaccaacgcgccaaccctgggtgccacggcagcaggagagcccctcctcgacaagctcctggactcctttggggacatctttgccgcgcccaccgggatgccccccaagcatgcgcacgaccatcgcatcaccctaaaggcaggcacgcagccggtggtcgtacgcccgtaccgctatccggcggcccacaaggatgagctggagcggcagtgcgccgccatgatcgagcagggcattgtccgctgcagcgactcaccattttcatatccgctcctcctcgtcaagaagcgccactacgaccggtaacatcgcccgatgtcgtactaggtcggcgactgggcgttcttgcacctccgtcagagcgcggccatctcccttccatgctcggccacggggaagctcaagcccctcttcgttggaccctaccgcgttgctgtccgcctggaactaccgccgggtgcgcgtcttcatgatgtgttccatattggcgtactcaagaagattgtcgggactccgcccgccacgccgcctgaccagcccacagtccaccatggcgtggtggttccagaaccctctgggtcgagcggactcgcctggcgtgaagagttcgccaagtgctcgtgcactggcgccgcgagcaggcctcgtcagctacatgggaagatctcaacgacttccgatcccggttttcggacttttagctcaaggacgagctggacctcgaggggggagatgtcatgtgcggacgcacctacaccaggtgcaggcgcgtccgcgacgtgcgccgggcagaagagcgtgtgatacacgggggcagttaggcgtgcacgcgctggtttgttacagatagattggattactatctgtttcaagttcctagaatgaaggagaagatttggggggctggttgttaggaaagataagatagctatccctaggattaaggagtaattatctctagtttgttagggtcgatcggccatatatatgtgtaaccagccggctggaaggattaagcaaagtttattctctctaacctctcctctccacccaccaacaaagcctgcggctgaggggcaaaaccttgctggagaagatgggtcgcgactacgaactgcgtagtcgaggccctgatgtctggggatactcagcccttgacaactggcctagggttcaggcgcagcgatggagttgagaacaacaaggaggcaagactcaatctctttctttgattgatctttcctaattacagactagcacaataaggggcttatatttccgccccgaataacagaagctaccaatattcaaggaaatctaaacaaactcttctattttaaactgagcaagcacttatctgcatgctgatagccaaacttatccttccttctgcgcctctgctgctggctcgccctctggctgcccaggggtgcccatacaccttgcctatcataacatgctgcttcagtttggagttgcagtctttgtctgttaattggtgttcttctatattatcaatagtaactccattacttggtgaaaatttcataagattagcttgtgttgtatgatctatgatgtttggttggtttaaagcaagctgcttacatttagctatatcattctgaaagggtgccctatacaatactagatctgaactttgggttattatatgaagtaatagtctatggttagcttagctatttcaatttgtctcagtaactaaccatgtcttacattctgctatccataaaaaactactatttctctaaagttttttttttgaaatcttattcaaggggctgccgtgttaagcatagaggaacctaagcag

SEQ ID NO: 1178 - DNA, 18108 bp, Zea mays
  Intron number 4 from transcript GRMZM2G302876_T01 (locus G RMZM2G302876) derived from phytozome v7.0 (chr-ID 2; pos 1 52019039 to 152037146 reverse strand)
cacctcttcaagtagcagttgccggtgttcaaaaggtatcacagtttaacacacaagttactgtggtttgtcgaaaaaagaacagtagcacatcttgctgttatcataccactttaatttgctgaaaggaaaaggttccaaatagaaggcgaatgttgagttgtaactcatttgtattttttagtgcttggtggggaagtaaaatactcttctgaaagtgttgtggagttcctgtttgaatcctaatttggcagatacgatacctctgtatgcaggatctgaggcttactattgccgctgatacacatcctatgctcgctgaattactatagagatgatggcagaaagatcctactctaaggccaacctttgtagagattgtggatacaccaaactctataaacgaggtgtgcattcacacaaagaactacatgcatttaccctgcttttggtttcatcttattctatattttttcacacgctatattgtaggtggttcggagttctgtgcatcacaagaggcatctaggtcgatctcactcttcttcgtattcatggttttccatttccattctcatggttgagatcatgtttcacatgtgtttcctgtgcactacttgtttttctcatgtgatgtttgcagcattagacttagacatgaatatgatgcgaagttcattcacttgtaatcttattatgtaggcgcagttgtagttccaatgatgatttaaagacgtagcaataggaagtgtcgtttgtcactgtaaacaacagctgcttctttcttcttcatgtgtctatctctcgatcataaccaatttggtctaggatacaacaccatctgtagttgttggattcagctgtagtgtgatttaaatcgtatctatgcaaattacttgttagcttattcaatacattttagtttacgaactgaatgtcttgaaatttgggcctgatgccacgtctctgttagccataccagagatgttatgattatgccggaacaaagttgttccaatatttcacatgttgataggatcctggggaccgcttctatgtgtccacaatgtcggttagtgtgattacatttttcctgcacgtagactatttttaattagtttgcattgtgtataggtttgtttctcaacattttcagtagccctccaatagcttttgccctaccagacttgagagctactgctgttaattccttggatatatgaaccattaatatttctgtgtaaccttttttcttccctaagtgttccattcattgtttgtcagattttgattgcaaatgatgatgaaatcaaggcttgtttctctacgttcttagttgccgccaaagagctttcgccctgccaggcttgagagctaatgctgctaattccttccttggatgtgtgagggcaattttgctttgcaatctgttaaatctttactgtgtgcttcattttgtaaaaaattattgtgtgtattattggaagaatttgtaaggatatgcaagcattatggcaatatagaattatagtatttttatacattcttgtttacaacagtatttttattcgtttcaatgttattggggggctcttcatcattgctgacctttacctagtcacttggtctcgctacaatgaggctcaaagcactctggtgggcggttacctatgacttcttctcatggagggtggtctgccaacatccaccaagacagaaggaagctccttcaaggggctccattgatactttacacctagagaggcagatggtttttgccccgaattgtttctctaggacaacaatggcacatcatcagatttattttcatgtctttattgtatgataccaatcttgcatatatatgcataattagttagttactaccatttcaagcattctaacaaggttccattgccaggaagaatcacagggtactgtagaaaacatcatatcctaaacattatttttggtatcctaatcgacattttttgtcccaaacttttggttgtcctttcgactccaacagatctgcctgtataggtccaaggctagctattattgccctgattgattttgtctgttattattgcacaattttctatgattttccctatcttgagcttatgttttacctttgcagaatatcttttttatgcctaagaagtgaagctacaacacgctagagctatcgtgctcggcaagacgaacccttcttctgcgatgatggaatccaacccgttcctcgcattctaaggcatccttacggagttatgttgctagatggctaatgcaacggtatgcatcttactgtgcaaggagcagctcacctggaggctatccaagttggaccagtgcgtgcaactgaagctcacggtggtgctcgtcgacctcgactcgtcgaacaattggtgggcaagccagctgccacgctcggggtcgacatcttccagcggttgctctccgtgtttaaggacaatgggctcaagcaagagatggtgacatagatccccatcaactacgtgcaaagctcgctgcacgggctgatggccaaagacgtgcacaagtatgtatgccaagtgtcgactggttaaggacgcccgcaatgtatttcatggaatgcatgagagaaacgttgtttgttggacatcaacgatttctaggtgtacactcatacactagcaagtacccttgagccatatccacatccaatacaagagaatgaggataatacaatgccaaaatcacaagttaacaatagaaagagcaaaagagggatgaaatttgattacaaaattgtggaataacttggaacaattattaatgtgatttctttttgagagaaaacaatcttttctcacagtttgaattattgttggtcaaaagatgtacctatgttcttgaaagtctgcatgctatccttcatgagacaagaggcgtgagacactggcgacacggctgatgggggacgtggatagcaatggcggcaataacgatctcttcgccatctcctgatagatgggattcgtggtgagcactgttgcctcgtcctcggtgacaccaaggaccaccacacaccactagcagtattactcatgccaatcacctacatgtgagtacataccaaacaccaatcttgcttaatcgttgtgtgttttgtctttgtttttttgagtaggtggctttcatctatttcatgcatgtatttctcgacacaatttagatgcatagtctagagaatctgattttattcttgttctaaatattgaatttgatggaacataacaagaccttgctatgttgcccttatccaaattgatcataagttaattttaacatcataaagaaaatatctgatttacagatgtctgcccaaaacaaaccaccaagaaaatattgcacatattatccttccatctaatctcatcagatatgctgaacaggggcgcaaaaccaagaaaatatctaatttatcagtagtgtgtataggtagagaacttgtaatgaaaaatgttctgtagcttcgagttgttgatttgctgctaataggggtttgtcctactcatttccacttttgatgttgattactagatgatatgtgcttagtgaatctggtcatatctttgtccatcggtttggttttagtttcttttcacgtcaaaggttgtcatgacatttattcatcgtttgataaatatgttgaagtcgaacatctagaggatgataacaagtgtaacgaaccatcttgttgttcgttaagataaaaggccagagcatggacatgacacaaggtgatggtgatgcagctacgtcgatcatgagtatgtcatcatgcttatctgcttcttcgatcatgagtatattctgctatttccacacaagttgatggtgatgtagctacaaagcttgtgaggttttcaaatattctgaactctgatctcaacaattaaaagagctaaggattctgccaacattcagagatcacagttccatgggaattttgttagacaaaaaataaagccacatgttctctctccatgatctgataggtggcacttattcttccaaaaactggtagctctgtcattacctaatacctactgcagtagctctgccttttagatatatatgcctaatcttcagtagatcattccacacaggagagcttttttttattattctgcttaagatgagaaacaactcgcttctttaattgtgtacagtttcctaccaaattcctttcccattttccatcgccacttgcaaaggagactaatattcattcttctcaaatctttgacccctaaacgccctttctctttgggtttagtaatcttgatccacttgattaaatggtactttttcttcaaccaaccaattttgctgtgaaaaggaaaaaagaaaaaaaaaggtttggttaattctatcatgctccttgatatggttctgtaacatatttctgcaatgctcctttatttagttctttacttttttgttaagatatgaggtgtagcgatacaatatgtctactaacagagtttgtgttcttgatagttcatttaggattgaatgaagttactggtgtgaccttgtcgagactgaagtaaggagggatagagctaaaaactctcttgacagtaagttctggataccttagttttgtgctcatgaatcttctctcttgtgctgctactctataaaccttagttttatgctcatgaaccttctctcttgtgctgctactctataatatacgtgccacctatagtaatgtcttagccaaatacatttattattttcttagacaaaaaataaagccacatgttctctctccatgatctgataggtggcacttattcttccaaaaaccggtagctctgccattacctaatacctactgcagtagctctgccttttagatatatatgcctaatcttcagtagatcattccacacaggagagcttttttattaatctgcttaagatgagaaacaactcgcttctttaattgtgtacagtttcctgccaaattcccttcccattttccatcatttggtttgacttaatttttatacttgcaacacacggacctaaaaagagagtcaccgatgcgggtatgtgcaagctccttggcgtaccctcgagaaagaaaacatcggatgaacggcaaaggctgactgccattttgtgtatatcgtgatggtttcaaccctgaaatatatctgtcattgtggtcagactactacaaaaagaatatagatgcttactgaaacaagcataattcaactaacagtcacacatacatgcagatagagtcaaacacactctgccactaaccaaaaaataacaaggctactcactttgcaaagaaaaaagagatatagaataacaaggctactctacgaaggatgtgtgagtaacgagtaaggacaatgatgatagtactgcttcctcagtatatcactcatgctcgctcctcattatatcactttgccagcaatcatgtttatatgcgcttactaaagcaatataaccgagtatgtggttgattttgtgatcatgtatttatttcgcatcaaaaaaatgttgattgaaagctaataaagtttatggctttatgcaacatgcatgctatctatgttctaaaatttccttgatatttggatacacaacatgcatgttgtctggaggaagtaatttgtgttagtctagcctgttttctcactccagggtcttgttgcaattatgcaactgtctgatttgtatgccttttcttgttacttactccctccgtgccaaactataacatgttttggtatctccaggttcgtaactttactatatctagaagcgtagcaaaagttatcaatctaaaatagcctaaatcttgtataatctggaagaattttttggtgtatgcttttttagcattagacacgtagtatgctatgttaggcttgtttactttattttattattgcagttttgtcggcgtttcgagaccggggggtccctcgggccgacgagtgagtgtcgccgcgtgccccagcccagatgggtcgagcgcgagggcgagcgcgaaggggggagaagcgaggcggccggagtccggcgtgagagaggtgggaatcccgcggccttcgtgttcgtcccgcgcccaggtcgggtgcgcttgcagtagggggttacaagcgtccacgcgggagagggaagcgagcggccccaagagagcgcctgtctcgtcctcgtccccgcgcggccaaccttctctaagagggccctggtccttccttttataggtgtaaggagaggatccaggcgtacaatgggggtgtagcggagtgctacgtgtctagcgggggagagctagcgccctaagtacatgccgtcgtggcagccggagaattttggcacccagctggtgtgatgtcgtggccgtcggaggagcgatggagcctgacggagggacagctgtcggagcggttgggtccttgctgacgtcctcttgcttccgtaagggggctgagagccgccgtcgtcacagagcatgcgaggcgccatcattgcctatctggcggagctagccagatgggacaccggtcttgttccctgcggctcgagtcagctcagggtagggtgatgatggcgcttcctgttgacgtggctggcctgcgccctaggttgggcgatgtggaggctcctccgaagccgaggtcgagcctgtcttccgtgaccgaggccgagtccgagcccctgggtcgggcgaggcggaggtcgtcggctgaggccagggcggagtccgagccctggggtcggttgaagcggagttcgtcgtcttctagggctgagcccgagtccgagccctgggtcgggcggagcggagttcgtcgtcttctggggctgagcccgagtccgagccctgggtcgggcggagcggagttcgccgtcttccggggcttagcccgagtccgagccctggggtcgggcggagcggagttcgccgtcttccgggacttagcccgagtccgagccctgggtcgggcggagcggagttcgccgtcttccggggcttagcccgagtccgagccctgggtcgggcggagcggagttccctatggtgcctttggcagggcccgactgcttgtcagtctcactctatcaagtggcactgcagtcggagtggagcaggcggcgctgtccttctgtcaggctggtcagtggagcggcgaagtgacgacggtcacttcggctctgccggggggcgcgcgtcaggataaaggtgtcaggccacctttgcgttaaatgctcctgcgatttggtcggtcggtgcggcgatttagtcagggttgcttcttagcgaaggcagggcctcgggcgagccgtaaatatgttcgccgtcggagggggggcctcgggtgagacggaaatcctccggggtcggctgcccttgtccgaggctaggctcgggcgaggcgtgatcaagtcgctcgaatggaccgatccctgacttaatcgtacccatcaggccttagcagctttatgctgatgggggttaccagctgagaattaggagtcttgagggtacccctaattatggtccccgacagtagcccccgagcctcaaagggagtgctagcactcgcttggaggctttcgtcgcacttttttgcaagggaccagcctttctcggttgcattttgttccggtgggtgcgcgcaagcgcacccgccgggtgtagcccccgaggcctcggaggagtggtttcactccttcgaggtcttaatgcctcgcgcaatgcttcggctggtctagttgttccctcatgcgagctggtcgtagcccgggtgtacggtcgggtcccaagttctcgggctggtatgttgacgctgtcaacggatcggccggagccgggtttgcgagagcagcccccgagcctctgcacagggcgagaggacgatcagggacagactcggcttttttacatacgcccatgcgtcgcctttccacaaggaggggggggggggaagcgccatgttgccctcgatgggcgccgaacatggtgtctccggtgagctgcaagcgggtaatccgagtggacgtccgtgccccgttcgttaggggtcggctaggggcccagaggcacgcccaaaagtacctgcgggtgatctgccggacccggtcccctagcgacggggtccgagggctcgatgcctccctctgatgggattccgttacaagatcgctcccgctggtctcggaaatgtcctagggtacctcgggagcgcagcccgagccttggttatgtatcaaacgtacccatggtcatccctcgctcggcgtctgaggcggctgtgaacccttcgggggccagccttcgaacccctgatcagtaatgggcgtggagcccgagtagcctgaggcggccgtggaacccttcggggggctggccttcgaacctctgaccagtagtgggtgtagggcccacgcgatctgaggcggctgtcgaacccttcggggggccagccttcgaacctctgatcagtagggaggctcggagcctgattccttcacggggaaggatccttttcggggtatccccctttcccggtccctgttgcaagagagagagaaagaggaaaaaaaggaaaaggatacgaaatcgaacgacgcggcgtaccttttttggtgcggttattacggcgaaggcgaagcgtcgcctgcttctcttgccagaagcgccgcctgtcccgccgcggagttaatgcgacggggcgagtggttggcggggcagccgttgcgcgtgcgcgagccgttcgaggaacggctgtttcgcttcgcgtttttgaatcccgcgtccggtccgggcggaacgttggaaccggtctcgcctcggtctttatatacctgggagagggtttggtgacggttctttgctccgcttcctgcctccctcttaggttttcgcaacccgagagacttagccagagaagaggaaaccgcccttcctgccccttgcgccgccatcccttccgctcggcgatggctgaccgggtgaccatcatcccgccgcgcgatccatggcctttttccacggtgacggcgagtgatctggaggatctggtcggcgagggtttgcttcgccctctcaccgatgagcagcgaccggaatggattcctcccgtgggcggagccgctccgtccccaccgccggggtacatcgtgagcttcgtctccttccacgagcggggattcggtgtgccagcgggccgctttatgcgggcgatcctgtaccactatggggtggagttgcacaacctcacccccaactccatctcgcaggccgccatcttcgtagcggtgtgcgagggatacttggggatcgccccccattgggatttgtggacccatctctttttcgcggagctttttgcctcgccgacgggggagaggaaagtccacgcagtggtgcgggccggcggctgcaccctcctgctgaggcagtcgcgggcgtcgctgtatattcttgccatcctcgcgtcctcgaacaaggggtggcagcgccggtggttctacctccggaatgacggcgagttgctctcgccgttctcccaacgagtagtcaccactgccaccgacgcttggcgccacgggaccccgcacgagagacagaagaacctcgaaccccttctccaggccttagaggcgttgcagaaggggggactcaccgctgcgggagtgattgccgccatccaccgtcggagggtgcttcccttggcggagcgacggctgtcgctttgggagatgaccccggaggcggactgggagggctcgcggatgtccgctgatcctcttcccttcgacgccctccaatggcgggtgtccgtcgcgttggggaagccagacccccacgccttctcccagcttttgatgcgccccgaccgagggtgcgtgactctggtgagtgcccgctccttccttcttcatacatcgggttgctcctggttcttacgaccgggggttttccccccttcttcaggaggtggggtggcacaagccttccctgccacaggtcccgcaggacgcgatggaccgagcagcgcggcgggtcgccgcggaggagaagaagaagaaggacgcggagaaggcccgggcccgcgagcggaggcgggctcgagacgccttggaaaagctccgtcgccggcaggagagggaggggctcccgaggaaaccgtcgccggaaacgcccgacgacgacgacgatgacgaagatgatgacgaggaggacgacatggccgcccgccttggcctcagccccgacttggggtttggccaggaaccgtcaagccagcccccgagcgggctgacgccgtaagtcctcggagtcggggcgtcggggtcccggcccgaggggcgggggcaacccgagagggcacctgacccctcggctggaggagctgaggtgaccccggggggccaagccagggcgtctgctccccgagagccgctgctcgtgccggcagcgcagggaggcgaccctcaggtcaccgtgacagtgcctgggcaatctgcccctcgggcgtccaaagcaagggtggtgccgaagttgccggcgaagcggacctcagcggcggtttcgggggccgggatccaagagacttccccccaggcatggtggatcatggcccggagcgggtaagtatctcggaatgtcttcgtcttggctttccattcatatgtcccggccatgatttttctttttccctcagcaagcgaagccatggcctgaccgacctggcaccctggaaggcccttaagacgacgccggcctgtgcggccagcgccactccgggccttgccgttcagccgaccctcccgcaaggcgttccaccgcagggggctcgggtggcaccggtcgccgtggagcaggttcccgaggctggctcttctgccaaggcggccaccgtgataggggaggcggctgacgctgacgtggtcccgagcccaccggacgtgccggccatgccggcgcctgccgctaccgaagtcgccgccgtcccagtcggagagcgaccgattgctgccgacgtcgagacggttgatgcgtcggcgcttggtgcctcgggggaggggggcgtggaggcgcgatccgtcccgctgggcggcagcctcgtcgctatgcggcagagctccgagggccgacgccagttgctccggttccggacccgtgaggcctcggaccccgtcttcgttctcgacgatgaacgggaggaccagtcctgggatgagctctgcgaatgtgctgaagcaacagtggggtcgctccagtcgtcgctggaggttttctgcagggacgtccccaaaatcctccaggtaacggtttcaggcataccttttctcttctgtgaccgaggcgttcttcgtgacgccccgcttccttccctcaggatctgatggatcggagcgccgccaagtcgtcgttcatccgtcgagaggtcgacgtctggggctcgctgcgatccctgaggacctcgctcgctggggctactgcgcgcctttctcagcagggtgccgaggtagcggacctccagttgctctgcactgacctgagagccgaggcggcagcggcgcgagcggaggcggccgcggcgcgcgcagaagcgcaacggcagcggtcggagttcgaccgggtcgtcgaggagcgggaccattctcggggccgggctgccgaggccgaaagccgggctgaaacccttgcggccaacctagccgtagcccaggtcgcggcctcggagcagcgtgcccgagccggaggtacgccttggccatccttggttctcgttcctatttgtttcctctgcttgtgtttgagatctttcttctggctgttcgcagagctcgagtccacccttgatgagtccgccaaggcgcttgccgaggcgcttgccggggcggccgagcagagggaggccgaccacgcggccatgtccgaagccgtctcggacgtttatcggatccttggctccggcgacgtcccctcaggaagctcccctcaaagtcgccttcaagccttgggtgatcacgtgcgcggcatactccgcgaggcgctacaccacggcgtcaggcgggccttcgccgtgctcgcttcccactacgttgtggacctggagcgggttagtgaggggtattgtcttcctgacgaagacgaagctgccctggcagaagtccagcggctcgacgcggtcgccgcgggtccgagcgcagtgctggcgaccacctttgaggcggagatcctcccccctgcgccgtcgccggaagccgagatggactttaccgaaggcggggacggagctgaaggcgcggctccttcccaaggcaacgcctaactccgttggaacagtttctgttggatgcgcgtgtgtctttctacggccgctgaggcctgcacactttgtttccattgcatgaagtcgtactcctcttccttttattttgcgtgtctggctttgcctgtcaataacagggtggcttcccgagtaggggtcatttttcgtggcgggtgatgagtgaggtgtccttaaccaggaggcataggaattcctcggctcagtcggccttgccacttacatgcgcccacgttcgctccttaggaccctgcttctgacgtagccgggagaacgcaaaagcctttttgaccgaaaattttggatgcggagaggtgcacccaatcttgacgcagaggggctcccccctttgtagcccccgagggagggtcgggctctgccgaggcgaggctgacccttccttgacgactgagacttgtgtgggagcaaggtatacgaacagcttgaaaacatcttaagggtagaagcgacgtagctatcggatgttccaagcgttgccgtagacctcgcctcgaccgccggccagcttgtggatctcctcgcctatcgctccgcgcttctcctcgtcgaatcgacgcagaggctgcttgacgggtcgggctccggcccgaatatccagcgagtgctcggcgacatccctcggtatgccaggcatgtccgagggactccacgcgaagacgtcggcgtttgcgtggagaaagtcgacgagcactgcttcctatttggggtcgagcccggagccgatccggatctgcttggaggtgtcgccgctggagtcgaggggggtggccttaaccgtctccactggctcgaagttgccggcatgacgtttcacgtccggcacctccttagagaggttttccaagtcggcgatgagggcctcggactcggcgagggcctcggcgtaatccacgcactccacgtcgcattcgaacgtgtgtttgtacgtggggccgacggtgatgaccccgttggggcccggcatcttgagcttcaggtaggtgtagttggggacggccatgaacttcgcgtagcatggccttcccagtaccgcgtggtaggttcctcggaacccgaccacctcgaacgtcagggtctcccttcggaagttggagggcgttccgaagcagacgggaaggtcgagtcgtccgaggggctggacgcgcttcccgggtatgatcccgtggaagggcgcagcgcctgctcggacggaggacagatcgacgcgcaggagcccgagggtctcggcgtagatgatgttgaggctgctgcctccgtccataaggaccttggtgagcctgacatcgccgatgacggggtcgacgacgagcgggtgtttccccgggctcggcacgtggtcggggtggtcgacttggccgaaggtgatgggcttgtcggaccagtctaggtagactggcgccgccaccttcaccgagcagacctcccggcgctcttgtttgcggtgccgagccgaggcattcgccgcctgcccgccgtagatcatgaagcagtcgcggacctcggggaactctcctgcttggtgatcttccttcttgtcatcgtcgcgggccctgccaccctccgcgggtggctcgaccctgtggaagtggcgccgaagcatgacgcactcctcaagggtgtgcttgacgggcccctgatgataggggcacgactccttgagcatcttgtcgaagaggttggcaccttcggggggcttccgagggttcttgtactcggcgacggcgacaaggtccgcgttggcggcgtcgcgtttcgcttgcgacttcttcttgcctttcttcttggcgccgtgctgagtagacgccttgggagcatcttccgatgggcggccctggggctgcttgtcctttcggaagatggcctcgaccgcctcctggccagaggcgaacttggtagcgatgtccatcagctcgctcgccctggtgggggtcttgcgacccaacttgctcaccaggtcgcggcaggtggtgccggcgaggaacgcgccgatgacattcgagtcggtgatgttgggcagctcggtgtgctgcttcgagaatcgccggatgtagtcccggagggactctcccggatgctgccggcagcttcggaggtcccaggaattcccggggcgcacgtacgtgccctagaaattgctggcgaaagcttggactaggtcgtcccagttggagatctgccccggaggcaagtgctccaaccaggcgcgagcggtgtcggagaggaacagggggaggttgcggatgatgaggttgtcgtcgtccgttccaccccgttggcaggccagacggtagtccgcgagccacagttccggtctcgtctcccccgagtactttgcgatagtagtcgggggtcggaaccgggtcgggaacggtgcccgtcggatggcccggctgaaggcctgcggaccgggtggctcgggcgagggactccgatcctcctcgctgtcatagcatcccccacgcttggggtggtagcctcggcgcaccctctcgtcaaggtgggcccgacggccacgatgatggtgcttgttgccgaggcggcccggggctgcaggcgcggtgttgcgcgtgcgcccggtgtagaccgaggcttcccgcatgaatcgggaagtcgcggcatgaggttccgaggggtatccctgccttcgggaggcagagctctcggcccatcggatcgcggcgccttccaggagattcttgagctccccctggattcgccgtccctcggtggtggatggctccggcatcgcgcagagaagcaccgctgctgcagccaggttctggccgactccactagatgcgggtggcagcctggccctggcgtcgtcggtgacgcggtgctggaaaccctagggcagatgacgtatttctccggccgcgggttggcccgcccatgcctgcccgacgtcccgacggatcggctcaagcactcctgctccctcgtcgagcctgacctgcaccccgcggatttgctcgagctgtgggtcgtgaccccccgccggaacggggaccacagctagctcccgtgggatgtcaacgcggggcaccggtctagggagatcaccgtcctccggcatgccgagatgattgccttcggagggaccccctagatcgacgtggaaacattcgctgcttgggccacagtcctcgtcgtcgaggctgcggctaccgtcggaacagtcggagaggcagtagtcacatgcggtcatgaagtcccgcatggcattggggttgccaagtccagagaaatcccaacagatgctgggctcgtcgtcttcctcggacccagaggcccgtaggtcgagacgtccgtcagccggtcccaaggcgaccgcatgcgaaaccctagagggtttggactcgcccctacgagagcgcccaccaaagcgaggtcgctaggcgggttgaggctgaatccaaatgacgtgggatgggaatcggtcggtacctcttggtcgacgagcggcgataaagtcacgtcgggggctgactgcaccgtcgtctcaggtacgagggcgacgtcctgcaggctctccgcgagcacgctggcgtcgtccgcttgctcgggattggcgtgtcgcggggagacggcgctcgtcttcgtctcaggcgcgaagtcgatacccggtgcgcccctcgttggggtgccgacgctgtcgactcgctcgacagccgacgaggcgctgcctcctgcttggccttggttgccctgccttcccctccgccgacggggaagaaggcgggacgagctcgaagattgttcttccgccacgcggggaagacgtcgtcgattccgccgccggcgggcgggctgtcggccgccattgtcgttgtcgcgcggcggtggaaggagcatcatgtcgtagctgccgtcgagggacatgaactcaagactcccgaaacggagcaccgtcccgggttggagaggttgctggagactgctcatctggagcttgacgggaagctgttcgtcaacacgcagcaggcccctacctggcgcgccaactgtcggcgtttcgagaccgggggtccctcgggccgacgagtgagtgtcgccgcgtgccccagcccagatgggtcgagcgcgagggcgagcgcgaagggggagaagcgaggcggccggagtccggcgtgagagaggtgggaatcccgcggccttcgtgttcgtcccgcgcccaggtcgggtgcgcttgcagtagggggttacaagcgtccacgcgggagagggaagcgagcggccccaagagagcgcctgtctcgtcctcgtccccgcacggccaaccttctctaagagggccctggtccttccttttataggcttaaggagaggatccaggcgtacaatgggggtgtagcagagtgctacgtgtctagcgggggagagctagcgccctaagtacatgccgtcgtggcagtcggagagattttggcacccagctggtgtgatgtcgtggccgtcggaggagcaatggagtctggcggagggacagctgtcggagcggttgggtccttgctgacgtcctcttgcttccgtaagggggctgagagccgccgtcgtcacagagcatgcagggcgccatcattgcctatctagcggagctagccagatgggacaccggtcttgttccctgcggcccgagtcagctcggggtagggtgatgatggcgcttcctgttgacgtggctggcctgcgccctaggttgggcgatgtggaggctcctccgaagccgaggttgagcctgtcttccgtgaccgaggccgagtccgagcccctgggtcgggcgaggcggaggtcgtcggctgaggccagggcggagtccgagccctggggtcggttgaagcggagttcgtcgtcttttggggctgagctcgagtccgagccctgggtcgggcggagcggagttcgtcgtcttctggggctgagcccgagtccgagccctgggtcgggcggagcggagttcgccgtcttccggggcttagcccgagtctgagccctggggtcgggcggagcggagttcgccatcttccgggacttagcccgagttcgagccctgggtcgggcggagcggagttcgccgtcttccggggcttagcccgagtccgagccctgggtcgggcggagcggagttccctatggtgcctttggcagggcctgactgcttgtcagtctcactctgtcaagtggcactgcagtcggagtggagcaggcggcgttgtccttctgtcaggccggtcagtggagcggcgaagtgacggcggtcacttcggctctgccggggtgcgcgcgtcaggataaaggtgtcaggccacctttgcgttaaatgctcccgcgatttggtcggtcggtgcggcaatttagtcagggttgcttcttagcgaaggcagggcctcgggcgagccgtaaatatgttcgccgtcggaggggggcctcgggcgagacggaaatcctccggggtcggctgcccttgtccgaggctaggctcgggcgaggcgtgatcaagtcgctcgaatggaccgatccctgacttaatcgtacccatcaggccttagcagctttatgctgatgggggttaccagctgagaattaggagtcttgagggtacccctaattatggtccccgacaagtttgagtacctatgtcatgattttatttgatgttgtgttgtggtaattcatctttagggtt

SEQ ID NO: 1179 - DNA, 8417 bp, Zea mays
  Intron number 3 from transcript GRMZM5G833032_T04 (locus G RMZM5G833032) derived from phytozome v7.0 (chr-ID 5; pos 1 96285178 to 196293594 reverse strand)
tgcccatccatatcctcagaaggcttccaagagtgagacttcatatcctcagaaggcataaaaataatgatcatatatatccatgtcatgcgctgtggagcatcaaattcaccagcaccctttgtgttggggacttgctctcaaatgctataaattgagaacaaggcaacacagaaacaggttatttgttaatgactttcgtccttcgaagcattatttccccaaggatataatgattttcggacgaaggtcatgaaggacataccttcatcatctcaatatacatatatgtacacacattaacagcaaacgaagcatgcaaagcataagaaacaatgtgaagaatcatataacattattatatatatttttcattatataattgttaatgaatataaggacaatatcgaattacatttagtaccttcgacttgacagaagacaaaggtacaagcgtgacgcaaaaaacaaatgccaagttagcgtgaacagtacgggagtactgttcatctatttatagacacgggacgcaacccatgtgaaattacattcatgccctttacatttgctagtgactctaaggtaatccaccgaggtctaaatagcctttttccttttaagtcggttcccttttctgtcgtcatgccgaagctcccttgcgcgtagcttcagcgctgtgtcaaccttcgtgttgttcctgcttctcactctgtgtggttctgatccgagtccgaaggtacctgttcatatataatactcgggaaatattgttaaatcatgtttttgatgaccttcggaagacgaaggcccccaacagtagcccctcgcgatattaatttgttagaatgacaaattcagattgcgacatggacgaagactctaagccgaaggtccgaaaaaacaccttccctttgctagaatagcaacagccaatgacagacggggccctccaacttggagcgcactgggcgtataaataggaaatcacaccgactgcacttgacacactgcttgtgccatttgccttatttcctcaattttacaacttttgcttactagcgcttgatagctctcaaacttttgagctttggtttgtaggacacattttcgtcatttccgaagagaagatgtctcaagacaagaaggcagttgctgagacgaagctaactgaagaggaaaagcttcttgaggagaagattgctgggtttgttgaatcaatcgcaaaaacaaatacagagaagatcactaaagagatactggaaggcttgtctgaagatactgatgatagcgacagctatgatatggagagtggaggcgaagactctgaagatcggccctggcgaccaagtcatacagtcttcgggaaatcaactatcaaacagagtcatctagataatatgagaggaaggtattttcgagatatgtctatcgtgagggctgacatagacagggccgctcctgctcccgaagaagacgaagttgtgatcttccgaagcttcttcaaagctggacttcggttcccgttgagtagatttgtggttgaagttttgagtacataccagatctaccttcatcagattactcccgaagcaattattagaatggggattttcgtctgggctgtgagaagtcaaggtctggagccaagcgcaagatgtttttgcagtatgcatgagctctcgtatgagacgaaggcctggggtaaagaacaatatcacaacaatttcggctgctacagctttgttgctcgctccggcgtaagctacccagtgccaacattccggaagaggtggcccggagactggatgaaagaatggttctatgtaaagaatgatttaaaggcgagagaagacattaaagagatcatcatgcgccccatttggtcccacttcggcctccggaagccgaaggttgaaattgacgaggcagtcgaagcatgccgaagggctttcagcacaatttgctcttttgttgggacaagggacttgcttcaagagcatatagcctacagaatatggccacttgtagacagctgggaaatgccgaaggacaccatcactaaccctagcgagggcggcctagttcgactgaagtacaccttcaggtttgaggacaaatttgtcgaaccagatgatgactggctgaagtgtattgaaaatactagtgatgaattacttggagcatattccaagtccgaagataatgcactatctgcagctttcgggagccgaaaaaagaaaagattaaatagggtttttgatgctattggatttgtgtaccctgactatcgctacccaccacgggggcagaaaagaaagggtgtatcctctgaaaaggttgctgcttcggctgctccgagcgagcctgcaccgaagggtaaaaaattgaaggtccttacccaccgaccacgctacattgaaccggccgtaatgcctgaatttggtggggagacatcttcagctactgagccgaaggaacctgcccctcccacacagaagattgaaaagccggctgcagtgccgaagggtccttcgagtaaggtgattttaacaaaggttgccgaagataagaccgaaaggtcaaaaactgaaagagcaacaaagatgtcgggggttctgagtccttcgacagaagcaacagtgctgacggcagaaaaaagttctgccacaacccctagaaggaaaaggatggtgaatgttttagatattttagacacactggattcaaaacgcccttcttccacgaagaaaactgccggagctgacaaaacgcaacacaaagctggttctgagcaaatagaagtcgaagctataaaaaaccaggatgaagccgaggcagggcccaaagtgcctgttgagacgaagcttgcaacaaccgaacaaggggccaaagaaatgattccagatactaatatagtttttgaaaaaagtgcggccaaagaagccgaatctcttacccccgaagcatcctccgaggatcttgattatatcattcgacatgctgcgggaaagaaattatccaaagaagaaatttttgaagccaaacactatgctcgggaactgaagtatccaaagggggccttagtgtttaacggtatggatgaagatgatttcttgtattgtctcccggacaacaaagaattacccgtctgccgggagatggcccgaagcatgggtttcccgaagcttgaagctggcctttgcgccatgacgaaagatgatcttgcagatagccttgcatataatagtctgaaggtataaaaagttgtaaattttgaaatttatatattctgtaatggagtcttttatatgttaattcatttattttttcttgtagggcctaatacttagcaacgctttaagagcgcaaaagaatgctgaagacgagagctgcactattgctctcaacaaccttcaaacagaggttatcaagctgaggaacgaagccacggaaaaagacaaaattctacttacattggtggacaaagtaaaggaggatgaagctaacttaaaggctcaaactgaaattcaaaagaatgagattgaagaccttcgaagacaactggctggagccaacttaaagtgtgctgtcgctgaagctgatcgagatgccagtgaatactggaagaattatttagaaaaaacagttgcagagcttcgctcctccaaagaaagatgttttgagaaatctgtggagtgtgtgaagaaaataaagactagctttgctaacgtgggcgcgtattcgagcgaagacaactttatacgaggcgaccccgaaggcgttatcgaatggatcagtaatgaagctgaatcttttgaagaaatcttaagtgatcgtggggatgtttgcgcattttctggcgcaagaggaattgcgaccgtcttggagaaggcggattgtgatcacattaaaaccttggcccaggccgaagctgccttctccgtggacgtcacgaaggacccctcgaccgaagcaagtctaataggcggaaaaattttcactgatatctgggaaaatggcggccgaaaaatggctcatgaaataataaagaaaagagaaaaagatcttcatgacgctcgagaagcagcaaaagaggcagaaagagcagcagcactcgaaaaacgaataggtattacttaatggcttttagctttgtcttttagtttttttgtgacttcgaactaactgatgttttgtaccgcagctaaactttctcctccaccagagccactcgacccactggccaacccagaaacaaagaaggaagaagaaattattaacatggccgaagctattatcgacgaagttgttgccaagctactaaacgaagctgctgaaaaagttttgaaggaagtgtagctgctattgtaaaaacatttctaaaatattaatgtaacatttgctgaactaagtttgtaatatttgttgtttataatttttgaatgtaatatgtaaattgtttgtagttcgattctttacgatgcatgaaactttacatacataacgtttttgagccttcggcgaaaaaacactttcccttcttttcatgcttcgtgaaaaaaaaatttatatctcgtgggaatacccatacttcgtaaagaacatccaagcttcgtaaaaatattaatgcttcgtaaacaatagatttcttcttccatatcagagctgatgaagttgtacttcttcaaaacttattttgtgccttagcacaattttacttcttcgaaacattctccgaagatcaacattgtatccccttcttgtgacattgatgcaatatgatgtatgatgttatgttatgcgaaatgatgtgatgatgttatgttatgcgaaatgatgtttatgccgaagtcacactcacaccgccatagtggaatacacaatctgtttgccgtttatttttcggcttcaccgcttatttttcggtgtatcagcgctgacttttcgctgtaagttctgcatccccttaggaacgtcttttgaacttcttcgccttatatttcggcggtattcacgttaacttttcgcgcttcgccttatatttcggcggtatttggttctgcattccctttggaacgacttttgaacagaaaacttacgctgcgctcccttaggaacgactttttgtagcttcggtgaaacttacgctgcgttccttgggaacgactttttgtagtttcggtgaaacttgcgctgcgttccttaggaacgacttttgagcttcagcaatttctgaacttcgtgagtctgtggagaagatatatttcactatggcaagaacgaagctattataagaaattggaaatggcaagaaaactaagtttacaataattgttccttattaaagatgaaaatgacaatgaatgtaaaactgtttcaagggtaggatatctctcaatagatgtgtttcgactctggcacagtactgttgactgtgcgagcttcagactcctccctgaaatctcgctgttgatgggtctgttggctcccttctggctgctggcctcgtgaatatgcaggttgtagtggtggcggaggtggaggctgtggccaagacgcctgtggctagctagccgaagcaacagaagctgtaggatggttacccacatactctggtatgtagggtgagtgatacgaagcggtgtgcatgacctgctttggctggttctgctgagctgcagcttctgttatttccttttgtttctgaatggtgacatggcacatccttgtagtatggcccttgtcctcaccacagaataagcaataaatctttcttgactgatccccaaaccttcctccgaagcccctggcgcctttgcctcttggaactggcggtcggaaagagctttgttgttgccccgaagattgtgaagtatattgtgacttctgcagctgacttcctctgtcatcactctgggtggagtgaattgacctaacatgccttgggtggattcttcctccgaagcccctggtcatctcagagaacctgtaggcttcttcccttctttgacgaaagtcattatcggctcggatatactcatccatcttctgaagcaacttttccagggtctgagggggttttctggcgaagtattgggccgtaggccctggccgaagccctttaatcatggcctcaatgacaatttcattgggcacagttggcgcttgtgccctcagacgcaatatcttcggaaatacgcctggaggtattcttcgtggtcttgcatgcactggaacaaaacttgagcagtaaccggcttcgtctgaaacccttggaaactggtgatcagcatgtccttcagtttctgccataatgtgattgttcctggccgaagagaggagtaccaggtttcgcaacattttttactgccatgacaaaagatttcgccatgactgcggtattgcccccatatgaagatatggttgcttcgtagctcatcaaaaactgcttcggatctgagtgcccatcatacatggggagctgaggtggcttgtatgatgggggtcatgaggtagcctgcagttctgctgacagaggagaagcatcatcaaaagcaaaatttccatgatggaaatcatcataccatccatcctcgttgaagaagccttcttggtgaagctccctatgttggggccttcgttcttgttcgtcttgagcaagatggcgtacttcttcagtggcttcgtcaatctgcctttgaagatcagctagtcgggtcatcttctccttcttcctttgtacttgctgatgaagtatctccatgtttctgatttcttggtccaactccttctcttggagtgttggactggaggctttcctcttctggattcgggcctctcggagggaaagggtctcctggtttggatccagtggctgtagtgctgcagcccctggcgctgaagctttatttggcggcatgaccaaggtcggtgtttgccgaaggtggtcgaaaagggttcaccggaggtgggcgccaatgttggggacttgctctcaaatgctataatttgagaataaggcaacacagaaacatgttatttgttaatgactttcgtccttcgaagcattatttccccaaggatataatgatctttggacgaaggtcatgaaggacataccttcatcatctcaatatacatatatgtacacacattaacagcaaacgaagcatgcaaagcataagaaacaatgtgaagaatcatataacattattatatatatttttctttatataattgttaatgaatataaggacaatatcgaattacatttagtaccttcgacttgacagaagacaaaggtacaagcgtgacgtaaaaagcaaatgccaagtcagcgtgaacagtacggtctatttatagacacgggacgcagcccatatgaaattacattcatgccctttacatttgctagtgactctaaagtaatccaccgaggtctaaatagccttttcgcttttaagtcggttcccttttctgccgtcatgccgaagctcccttgctcgtagcttcggcgctgtgtcaaccttcgtgttgttcctgcttctcactctgtgtggttctgatccgagtccgaaggtacctgttcatatataatactcgggaaatattgttaaatcttgtttttgagaaccttcggaagacgaaggcccccaacactttgtatatcaaatagttgctctaatgtcctctccctgacgtttgccttactcgaaagaagcacgagcgtcaccctagccagcattctttttatttggatttggatttagtagaatccaagccatcttactcattgattagtagaggtcaattcaatgctctaataagcttgcgagaaagcctaagtgaagttcagtctcttttttagtctgtctcttttcagtttttaagcaagtgaccatagggcaatggaaagatctgatacggcgttataggccttgtaggttgcaactccttctaagataataaaacgtaaccacgagggagattacgaatattccaagcatatacatcttaggccagtaagctaaggatagatgaaatccagtaagacagccagaagcaaacgagttatcaagtggcgagataaagctttgtatagctgctgtctttttcatatatacatatgtagaaaggggtatagctgaggagttttgaattcgaagagcaggcatattgagaataagcgagtagtttgatttcttacctcactactgtttcaagtgcttttgccttctagcgagtgtgagttccccctaggtagggctatagactaaaagatatctgtcaatgatagagcagtagatttctttcttttaagagttctcttgcttgttttgattctgtttattgtattctgaagtgaaccaaactatgacctcaaaacagattcatcttccatccataggaactctggc

SEQ ID NO: 1180 - DNA, 6563 bp, Zea mays
  Intron number 5 from transcript GRMZM2G053927_T02 (locus G RMZM2G053927) derived from phytozome v7.0 (chr-ID 7; pos 5 0506587 to 50513149 reverse strand)
cttcgaaaactagtacctccatcagaatatagaaagtatgctttctgataactcatctgtcatggctacacattatctagtacttctttgactattccgccattttactcatgatgatcttatcctagcaccactgtacatatgtaatatgttcattatacacttgctttgtatacttgaatagctcctaggatcaatattgtgtatagcatctttctactcaagcctagtggttaaggctttcgagtagcacctccaagtcccgggtttgattccccccgggggcgaattttcaggatcaatattgtgtatagcatctttctactcaagcctagtggtatagcatctttatcctgtagcagcttagtagataatggaccatgttcaaccttgcaatatttactctgtgctcttaaaatagcaccatgacatccctgtgctcttgctgtgatcctcactaagtcagggtttgaaactgtttgagcataaactagttagaagaaaagtaataactactagtcatattgaacttcacatttcaatttatttcagaggtggcaggtcagtccattagtaccttcacaatttgtttgtggattttatatggagaacgtctcttaaataccatacaattaacaattgaaatgccactaatgctccgtttggatgtcgatgttggagggcatggaattgaattgggttcaataccaaatcagccataacattgaaatgagatgtaataccaattctattgtttggatgctccgaccttcttccaccggcgcttcttcacctcccgtcctgttctccaccaccacctccaccacctggcatcgtcgtctcggccatccaggacctgacgtcatgaccatgatctccagcagtttacatccttcttgtaatcggggacattttgagggcctttgtcatgcttgtcagcttggccgacatactcgtctcccttttactacatcttcttctagggctgagcaggcttttgacctggttcgttgtgatctctagacctcccctgtactcagtctttctggctataaatactatttggtgattttggatgatttttcccatttactctagactttccctcttcggttgaagtccgacacttttaccaccctcactcatttcttcgcctgggtctccacccagttccgtcgcccggtccgtgcactgcagtgtgacaatggctgcgagttcgacaaccacgcctctcggtcattcttcctcaccagtggcgttcagttgcgtctctcatgcctgtacacctctgtccagaacgtccgggcagagcgcatgattcgcaccaccaccaacatgattcactgccttctcttctaggcgtctctccctgccagctactgggtagaggcactgcacaccgccacctcctcaaccgtctcccatcgaaggcggtgagccaccccatcccctacttcgccctgtacggcacaaccccctcccacgaccacctccgtgtgttcggatgtgcctgctaccctaacacttccgctactgctccgcataagttgtctgcacgctccactcgctgcctcttccttggctactctcctgaccacaaggggtatcgctgtcttgaccctggagaaaacacagttcagcaaaatatgttgtatggtctcttgttcttgatcacacaggggcaaacactatgatgtggcagcccatgtttaagcaatcggtccgcagtccagcacctgttcttgattcccagccataagaagaacttgcatctcaggggggcccatgatttccataaccttttccaaggtgagaacttaatagatccaataaagaaggaattatatgcagacttggttgagtacatacctgaattagaaagcttcgaagtgtgttgatcaggtaatgagggctgcaatataatcccatccaccaaatcccaaatctttagatactcaactaacacctgcactgtgagagctccctggatatcagaaatccatcttatattatttagggggttgcgatacagtgcgttgtgccgctgtcccctagctcttttagggataagctgaatgaaattaggggctagttcagcaactgtagaaccattaatccaccgatcagttcagccccaacccgtctctagccgagttggttaggtggtctgaaagcactcctcaggtcctggattcaactccctgcgggagggaatttcaggccatgattaaaaaaaaatctcctcgtgtatcccacgccaaagcacatgtctaaggcctggccctggtcgtggtcgttctcacatgagctacggtgccattgtgtatgggtggggcaagggttcgggagttttctcgacttgtgtgagaaggtattcttcttaatacaatgcccgggggctgtcttactacccccgtaggtcgagtttttttataagtttggtgaccaacttggcaaaactgtgcacaaggctaattggtcggtaatccttgacttccatagcatccacattcttgggcaataaggtgatgtaggctgaatttagaagttttagcctagacacatgcccatcacaaatggtagagagcgctaacattaaatcctccttgatgacattcggcggcggctggcagcgccatgtccatcaccggcggcgccacgcacggctcgatcggtgcgtcgtggcgttcgttggtgggagagatgggttggtgatggagatgcgtggagtggtggggtagtgggggagatggagagatgggcggggcggagaattttttggtggcattttgtgcgcatgcagttaactgttcttatccaatcacatcacatgcatgaaagcttatctgcggtactggttgttaggcgagaagggagaagcgggtgagaggaaggtactggtggttaggcgataagtgggggagaggaacacatctactcagaacagatctacgagcgaagcgcgcgacggtggaaatgatggaaactggtgctctataggatttccaatgaaccagtttaatttcaaaagaaaacaaaaagagagctaggatcaaggaaaggttctcgtattttaaaatgggcctaataaaatggagtaaaatgttttgctggatccatgcaaatagctacagcaatatgcacgccttgctgaggaagtaagcagtcggaacggttgtggacacatgcgctactgagctgggcctcagcttttttgtcttgactggactcgtatgagccgctggggtgttgcgcgcttgtaatgggctttgttgtgtttattcgctgtaaagaagatggcttgctacttcattatgattgtacaggcaattatatgttgattcattgctctattatttgctacctattgttccaatcaaaaaggccctcctgtttatgtaacaacaggaatggatacaaatgtacatgatttatcatgtgcagtattttttttgcaagaagtgtgccctgcccggctatccccctgcgtctagccgttgcgaccgtccactgcagcagatcgcgctggctccagggcaacgccgcgcctcacggccctgccccattctagactggcagggtacctgtggcctcgcccaacggtgcccgttcctccagggcgatccctgcggcagcagcaagcagctacacggctggcctcctgcctgtgcgcaaggtgaggcaccagtggggcgtgggacagcgagatggaggatgattggttgtgttggtgggcggttggttgggtgctcggcgatggtggagttgcgaggaggggaggagagcggatgacacacgtggggagcgtagagctatatagagatagattaagaacagaactacacacttcgtgcgtgacatacaatggtggaaactgtttttttttcttatccattcagatgcatgcttatctgttatgcgagaagtggggagaggaacagacccacatttcagttccatctacacgcttcgccagtgacatacaatagtggaaactcgtgttttaaaggagttgagaagagatgggtagctgcaacatgtttttggaggctgtagcaatgacctaatatcgtgtagcagtggcccagtagttggcttggtttggctatctgcagttgcctttggatatcaagttagattagttaaagatgttagctaagggcccgtttggcacagctccagctcctgattctaaacgaggatctggaggagccgtgccaaacgggtatttttttaaactgattctcgtgtggagccgaaagatcgggagtcgtttttgtgaagaaaggtgggatctaaaaaaacctgctccaccctcccttaaaacagctcctcaaccaaccaaatatggacctccccttaaagtttgatcgaaattacccgcaattgccattggacaaaaacataacgagccaatttatggattaaacatttgagaccattttatgcactactatgatgggaatattttatatgttattgtttcatattttttcccgtatatgcatcctacttattggtttgtaataaagttgaactgcaaagagtaaaacagacaatcgctacagaccaccaactctcagaagacaagaatcagtttacttgccaaatggttttaaaaatgattctgattttctaggagaatcaagaggatcagctcctcacgaggatcaagatctagagctaaagaagcaggagctggagctttgtcaaacggggcctaagattgttaggtctggctcctaaataaaggaggtcaagtcaaacaagataccctaccacccaaatctcagcatgattagaaccttctgctgcagggacaagccaagaacaatccattccatttttcgaaagggaaaaacagcaagggagacccttgctatggtatatatttatatatataatcacagaaaaaaacagtacagacataaaaatatatggagagaagagaagagatgctagctaaaggactgaacaagggagcagaaagcatctttcttagaagagttcattctatgaacttgaagaaaagtctcatcaaggaacgatcttttccaagacgagagcgagggcatttttgcttcaaagatgagtccgataggtgatatgttgtctcctccctttcattatcacaaagaacgcaagcatagtgatggttcttaagctgatagtttttccttagaatgttgcgtgtgtgaagagtagccagacaaaaactcttatgttattacagcacttggatttccagatccaaacaaacaatccattccattattttccacctccgaattttaccactccccccatggatttcccattgaccatgtgccaggatacaggtggctatgagcttccagcatgacatactgtacaagggcgtgtgaatgcatatcgcaggtggcagcgggagtaaaggcacccagctagaactccaagtaacatttttctgtgcatccacaatgcttggtagcatatacaggatcctgctgtagttgtaactttctaagacactagaaaaaagtcttttgtattgcacttaacactaaactcatgggaggacaactaataaaaaggagggtaggatttgaaaataatgcaacctaactttatgcagttttttgtggcggcttgggggctgaggggacaattggtggcaaataaggagttttgacttatgttactaaccttgggttagaggaagagtgattagtccttaggacttggtagaatatatataggcacagccgcacagctaatatgggccatatgggccttaacaggggcaaggccaaagattgtgttttgtgtactttgctttgatgactggtggactgaagtaaatgtagctgatgaccagactaagaaaggacttaactccctcatcatcttgggagcttggtcaatctggaaacgtagcaaccgatgtgtgtttgatggacttcagcctagaattgacgtcgttctgcatctactgggggaggagctacctttggagcagggctgggcctcgaggagtctctcatcttctcgcccttgagccatctggtacctagactgtaggcctggttgggtgttgaatctattcctgtcttcagtgagggatacgtttgtttgtatgctctcgtgtgtgtggcatgtgtgttgttcccagggtttctaaaccctccttttcttcttgatgagacacaactctcccccgtgttcgagaaaaaacatttagtgctagtcatttcttctaacactttattagattaatggcaatagagatggaaagcattcaagttaggttccatcacatgcatttgccacatttgtctaaagaacattttgttcttcaaatccaacagtaaatagttggtggaatgttattgagcatcttgggtgagttaaatattgacttattgggacagactgtcaggtgctgttgttgtaatagcagtctaaagagcattttgttctccaaatccaacaatgaatactttggtggaatgttctttattgggtgagttaaacattgacttattggggcagattgttaggtgctgttgttgtaatagcagcga

SEQ ID NO: 1181 - DNA, 5324 bp, Zea mays
  Intron number 1 from transcript GRMZM2G140590_T02 (locus G RMZM2G140590) derived from phytozome v7.0 (chr-ID 8; pos 1 15015594 to 115020917)
gggggcggccaaggagggcggtgcgcgcaaggacggtacgtcggatcttcgcgtcacccgggtcgaatcaggtggcgttccttggaatttggaaagagctggatcttggatgcgtttgtggtaggaaatgacccttaatttcttgtgaagtggcccgctgatgcgtgcaaagccgggatttgggtgggtagtgttacagaatgagcgaagctagctgttgtggccgtattttaactgtttatgttattggatttagatatgatagagctgaagttaatctctcctatttcgtttatcaaacggcatttagcatttgtggaattagtatttatgttggggtatatgatgaagtgatgttagcttaccttgttcgaggagtttaatatgtggaagagaggacgactatcagagttctatgcacctttcttcatgaaggggagagctttgtgcatcctttgttcataaagtagctgggataatatcccttaaactaaaaaaggaccataaccatcgccttggaagtcatagagtagtagagcttaggctcataaaaaatatgttctttcacagataagaactgacaaatatttgttgagtaaatttcattgaaccaccacatagatgatacaagtgggtacccaatgctattttagttcatctctccccaccaaaattagttattacatgtcatgctgttttagttcacttcagaaagttttgatcaccccagtgaacccagcaagtggaccttgcatccctaaccccagatccttgtcttaactgggaagactgaagccaaatttatttcaagtcagctcgtttcttgttttgtaaaacacgcacgaacatactctgtggacaatggggtgggtgggtatgttatatgtttatcttctattaatgtaaatacacaattctcctgtgtattcacagaaaaagaaaagaaaaccagactcatgtcttgccaagcgaaactaccactggttttggcccccttccacaaactaccactattctcctcctacattatcctgagcagtgagcatctgagccaactcggcagtgtcacatagtgcaaaacagagtaaaacaaagtagtggtaaaatgtgacaatgacaagtgggcccaggtgctgaggatactgtaggaggcatagctttatgagaagcgcccaaagtagtgtggttctgtgaaatggccttcagaagttatgtgacagttaggacagaaatgtggtagttttgggaaatttactctgatttgtttgatgatgattattgagcacatatctgcctgccatatcccctagattttgccctgcactctataatcatgtgatattgattagcatcagtagcttcggttttatcttttctttgtttgttatgtatttcaccagtagatttaagtatccctttatttatttatttttcttgaaagcgcaggagaactgcgcgataatatattaaagaagaggggcagatacaagaacaaactgggggcccctacggcggccaataacaggcatacagaaacccatccatgactaaaaaactaacaagaactaccacaatgctagctaactagcagggaggcccagaatgggggcggtgagcaaagacaactttgcacaagccatcttccaaaggtcaacctccaacccaactcttctaattgcgtcagcaatactggggctcttactgtcaaatacacagccattgcgctgcttccataaggtccaaactcccagaatgactagagaattgaggccatcccttgcaattccagagtccttagtgcataacgttctccaccattcaaggaaggcactatcctcagattggggggcaagaagctgaaggttcacttgaagaagcagtttgaaccaaaattctcgagcaaaaacacatccaatcaacatatggtccaaggtttcttgatcctggtcacataatggacatctctccggatggtccatgcctcttttctgcagcctataattatatgctgtccaaaccttcctgtgtgcgaccaaccacataaaaaacttggtttttggaggagcccaagttttccatattctatgaaaaggctcaaactcagaagatcccataaagaaacccctatatgcttcctttgaggagaactttccgtttgaagctaggcggaaaaaaaatgcttgtcttcaacttgaggtcttagaacaattgagtcaattaaatcccacaagatgagaaattcattgataattccaacagaaagagctccctgaatgtcagaaatccagctctgattagagatagcatccaccactgttctcttgttaacccttctcttaggaaaagtatccctttatttatcacttaattcttccagtttaaaaaatcagctgtattaggattttaggtagtcaaatttctttaacttagcccatcaatacatgcacagttacataagttgacaacacatgattgattttattagattttttgtagaccaaggcatttagccctgcttattttgaaagcatcacataagttttgctggggataccagtttacaagaactgcggagcccagttaaaactcacctccactaaaagccaacaccaggccctacccaaccagagaaacactaacaaaacaggtaggttgctacaacgaaaaacaaaaaggaggaaaccacagcaagagagaaattctgaatagcaaaatgaaaagaaggaacagctaagccacagatgctttgcctttagcctcctttttcttcatgtcttttggcaaccagacgctcctagttgtttgacaccatctttccgtctaggcacatttcactatcttgaaagtccatcctttatcttcaacaggaattcctccatcttgtctctgtcttccttcttcgtcgtcatctgccactggtttagaaaaccaagacattgaagccacttgtttaggagatttaagcatttttttggagaaaactagaccatttcttgttttccacaacacccaatccacaccaactactatcacccacaaggacttgttcctatctccaccatctttgttcaggcacagctcctggaatttatcaacgatggtggtattttcggccagcccaagctgtcctgacccagcaccaggccaccatcgctataaggcatctgaacagcagatggtccacttgatttttactagatagcatataacttccactatttcgaatgatatatcactacaaaaatcacaagtaaaagtgtcacattggagactgtcactttcttaaatgacttacatttggaatcagaaggagtactatgtttttagattaaagtccatatcagtgggaatgggatggtcaaactttgctctgagagactagatattcacattttaatcacgtgaaaaaacaaaatatatacactgttgcattatttggtgggcttagacactattgtacatcagtgggatatggaatgtgcatattagaattgttatagtttgttagttgcgtagttaatacatgtatgttttcagttatatatattagacctttataagaaacacaactctgtatatttgcaagtatggaacgtggccgacaatattattttacaccaggaggtgccttagcagcacaggtggcgccttagtctggttcctgttctagtaaggctgcatacaatgcattcttctttgtgtccatcaagtttgtgccttggaggagaatttggagatcctcggcaaccctggggtgtaaattttttttgtgtcttgctgtcaaaaagtggtctggatggctaatcaaaattgtacaaacaatattgtacaaacatagtttaacgcatcctgctgctagcttattgtgtgatcaagctgaagagaccatcctgcatattttagtttcttgtattttcgctcggcaggtctggaccttggtattacagaagcttggacttgtggcactagcacctgattctgatgtaacaagtttccccagctggtggtgtggtgctatcaagaagatacctaaggacgtgaggaaatgatttaacacttaaattatcctggtagcttggaaaatatggaagcatcgaaatgcatgtgttagctcaaacgtgcaaatggttttacaggcggtgggtactgagagaatcctttggtgctctccaggagcttctgctctttaggagctgctcccccccccccccttcagattaggtttgagttttcctggttgtggttatttgtattttttttaggtgtgggtgtgtgagtctcaaggttttcctgggagaaggttccatgccctctccccctggtgttctttcttccatcttaatgaaatgacatgcagctcttctgcatggttcgagaaaaaaattactgtaaggtatctctatctaatatcagaagcaatatggtttcttctagaaaccttcttgaactgtgcacatgaacagccatgttgtcccctgtctttccgttatcatccatgacgcttggaactagagttgtttatgtgcaaagttcagaatctatcttttgtatgccttctatgatccagtaagaatcaaaacacaattcacattctatcaatgcttactggtcaaacagtccatgtaccaaacggcaaacctcttactcatacatgcatgcagatgcaggcggcgtgttcgagcccaacacaccacatcattagagcatttgttttacaaaagaggctgccatggcatttttttatgaaagaagagatctgtgaggggaaaggataagctgtgctgtgtgcttgagcacatgagtctcatacgttattaggctgggagtgggagcgctggttgaggttaaagtgtgctggaccaggaagtggtggcccaagttgacctttattcattttattgtattacttttattgttctctttaaaacatgtaatttatgtatagcccaataaagatgtgcatcaaccagttgcttggaccctgggtcatcggcctcataaacttgggttgggtttgcataccaagtcctaaattgtcattaaatgatatattctattttctaaatgttgacagtaagatcgttactcttagcaacacatgggtatgtttgctagtaaagataggtgctaagtgctctagatcaacttattccgaaatacttgatgcaccgaatttcttttagttttcatttactgctttaacttcgcattttcggttgtagttcatcttgattatgttgaaccctttaacccggatgtgacctaactctagactaacttctgctttagataaatcaaaaccacagggtggactagactctaag

SEQ ID NO: 1182 - DNA, 1115 bp, Zea mays
  Intron number 4 from transcript GRMZM2G001777_T01 (locus G RMZM2G001777) derived from phytozome v7.0 (chr-ID 2; pos 2 30248285 to 230249399 reverse strand)
aacttgtccatattctgcttgcacatccaaaggtaatatgtgggttcatcataggaccactcttcaatttcttgtaatatgttaattttatctgaaacataaatgaattttgccatccaccttatttctaaatcaaagttgattgtagagcccatatttgctttgcttctattttggtccctgatccgccaaatttttttaatgcatctttgctaacaccttctgtacaccaatttcattgttacaagggttgattcttggctccatgaaatataatcatgtagcatgtttttgagtgttaaccttactcttgatgttttattctggagtcatttagctatccttgtgtggcattttgtgcttgatttacatagcaaccaatgttatcaagtcatccgactaatcgcgattagtcatgttgattggtgtcatggcgatcagttatgcactatgattagtcaggctgatcagtgccatggcaactaggatctattagacgatttgataacaatgatagcaaccactgcaagctgccaggccaattattaatccaaacttgctgtaaaattctgcagttgacatgagactatttttctgcattggagttatgctgcttgaattttgtagatctacgcacatgcttgctgttaaactgagtttgattatctaggttatatcaagatagtacaatagatcccttggtattcttactgtcttataagcatgacttttgaggtgtctcttaggtgtctaggcgtgcccccaatgcctaggctatgcttataagtgacataatttatgctaatgttctgctgacggttgcccaaatgcccagtgtatgttctgtatgttatctgatgatgattaaagtttttgcatgtgtatatttttgtggtcctgtgatttgggattttacatgtgtatgttgtttggaaaaattctatctgtgcacttattactctttttaataccccattgagtacatactgattcataatgttattctttcaatatatatgctattcagcaacgtgtacctactttaggaacacttataattcaatcatcggtgctcatactaacacttaatgactcatggtcaggttgatatcttt

SEQ ID NO: 1183 - DNA, 4510 bp, Zea mays
  Intron number 6 from transcript GRMZM2G122935_T02 (locus G RMZM2G122935) derived from phytozome v7.0 (chr-ID 4; pos 1 9612974 to 19617483 reverse strand)
accctgacccaagcaactcagtaagtttttctgccattaattatttttattctgtaatttccactgaatccctagatatttttgttagatgcctatgcatgtgttcttgttgtattccgtctcatatatagatttattgttgtagatgatctctatcttgtataggtgtatatattaattcaggtctagtgccctcattgaacatgagtgatattcatgaaatggtatacagagccaaaaattagggttagagttattcctctctttccctaatcattcctctctcgcttcacttggtgactttgtccggtcgccttgcagctctgcacatcgtcgcagtcggcttttttggcttggcgacgttcatcttcgcggtagcttgtcgaaattcgctcgtcggctacgatgacctgtctgccagcgctagctcctgttcgcttgcccgcctatcacttgtgcgcctgccagcgcatgtcgcaaccgctcgttagtgcctgcttttgtcggttggctcgtctgaccacttcccaccgcgtaggccgctgttacaatatagaatgattagttattttggcatacatgccttgttctatccagatagagatatattctaattatagatagagttgtaaccgaacaggactagatatagaatcctgatcggttaccactattgaaattaagttcgactctaacttgttgtcagtttttgcccatataaatgtacgtcatgcagcctcctctggaggatatacacaaccaatttggtggttttctctcatggtattagagtcaccttttaaaccctagctgctaggactatccagaaaccctaaccctagacgcctcaaaaaaatcaatttgccatggtgagttcttcagctttctctgctggatcacaacttttattgggacacgcaattgtagagaaactcaacaagagcaattatgctctatagagggcgcaaggcctgcccatcctctggggcgctcagctgcaaggttacctgggtctagatggaccttgtatctttcttcttcatgttaatataatgatacgcagctctcctgcgtgttcgagaaaaaagatggcttgtgtgctgcttcggttgagaagattgaagtttcaggcgacaagggtgaaagatggagatcaaccctgagttcacatggtggtcagcaattgagcaacaagtacttggttttcttctcactccatgaccaaagaagtcatggtcaggttttgaccacacctcagaaggtgtgaactatccttgaggagatctatgtgtcacattctcgagcaagaataatccacacaaggattacacttgcaacaactcgaaaaggtaacgtgccaatttttaagtatatcgtaaaaatgaagtcacttgcagatgagatggcatctgccaagccaattgatgaagaactagtctcatacatcttggtgggactagacatcgagttcaacctggtggtatccgctctatgcacgagttgaatttatttcacttgtggaggctctcttctagcttctctcttttgaaagcaggatggatatactgcaggaacaacctcaactatcggccaacatggctgcgacattcctggtcaagacatggtcggggacgtggtggtcatggtagaggtttccaaaacagctctagagaacagtgaacaacaggaaggtgacttggcaaacctcaggttccctgacaggtttatgataagtcatttggccctggactgctggtacatatttgatgaagtttactccaactccaatagtgcaacaacaactactcacagctatggagtgagtacaaattggtacatcgacattgctgcctcctgtggtgcaggtctatacacggcgttttctcttggatgtttctgctttgccatcttctgatgtgctcaatccttctgatgcttcatcttctcctggatcaacttctcttaccaaattatttgttgagccatcctcacctagcaattcttcaactgagttgcttcttcgttgtagtcatcgatcttgtcaacttcttgatctgtatggtttcggaccagtcacttggcaaggttttgtgagtactattctttctaaaacgacttcttattgggatgttattcttcatccaaaatggcagcttatgatggctaaggaaattactccacttgagcttactagcacgtgggatcatgttccccatcctcgtatcctattacctgtaaatggatttataaggtcaaggcctgctctgatggttctcttgggtgttataaagctcatcttattgcttgtggttttcaacaagagcatgatcgtgattattgctcgtggttcgcactactcttgttgtggactctgtccgtaagtcatccatctctcatcttgatctcaagaatgtctttcttaatggtgagttgtgtgaggtctatatgcagccacctcatgggtattctattcctgagggtatggtttgtcgtctttgctgctctctttatggcctcaagcaggtgccttgggcttggtttcagcattttcttctgtgatcacggttgctattttttctattggtgctcatgatcctgctcttattgtacatacaccatctcatgggtggactcttctttatattgtctttgtgaagacacgtctgagtgagcagtctcttatgtctgatcttgatcctcttcgttattttattgggattgaggtctcctccacgccttgagtacttctatctacattcaaggtcttcttaatcgtacttctcttactaatcaccatacgtccatacctttgagactcccatggagctcaatgtccatcttagtaccactgatggtgagcctcttgttgattctatcggctactgagtactgacacatagtcgggagtcttgtttatcttagtgtcactcttcctgatatttcttattctgtgtatatttttagtcaatttgttttggcccccacatagctccattatagtcacatgcttcgtgtcttgtgttgtctttgtgggactatatcttgtcgtttgttctttccatgcacaaattctttacagctccatatctattgtgatacatcctaggctagtgattcttctggcaccatattgtgttttttggtggctcttattgcttggaatacgaagatgcaaatagtagtttctcattcgagtataaaggctgagttgtgtgctatggctcttgtgacgactgagatgacttggttacggtggttgtttgcagattttggtgttcttttttctaggttgactcctcttttgactgacagtacatgtgctgttaatattgttcgtgatctggtcaagcatgagcttactaagcatataggttttgatgcctattatacgtgtgcacaagttaaggatgaaatgttttcaagtcgtctagtcgaacctagtcgtatagctaccgactagtcaactagtcacgattagtcgtcgaccagaccggctaatcgagcatagtagcaacaagaagaccaagaagggacacgagtcacgagctatagcaacaggcaacaagcaagaaaaccagagcagcaagaagcacaatcaccatatgaggatgagcccatcttttggattttgggattatgtccactgttgcttcatgcagtcggacacataagagctgggcctgggcgacgatgcttgaacctggaagatgacagatgtcgttggatcttgcgggcgccagcagtggagctcgggtggctgtctggaaggttggagctacatcttgcgggtgggggaggggcactgtggcagggtgggcgtccacttggatcttgtggccttgcgggcgggggcaggatagtgaacttgtgcggcggccgaggggcattgtggcatcatggagccactaatggcttttgcatcttgtgcggttgtgactggctggtggctgtccaaccctacaagttcacaattacagcccatagatgcatcaccaaatggcagcccacaagtccacagtcgcagccccaaaagtccatctaaaaacacatgtctaatcgcttcggtggatcaagttgggtttaagttaccgattagtacgactaatcgcgattagtcaggttacttgaaaacactgtcagtatgatgtgattgatcttcgttatgttctttggctgatttcttcatcaaggcatagactatttgttgtattcgttctcatatatagagttattgttgtacacggtctctatctcgattggtatatatagattggggtctagtgctctcatattgaacatgagtgttattcataacatttttgacttccctatccctccttccctctctaggtggagaccattatttgtattaatctgttggtttttatttattgcttcgaaactgtttagttgattattaacttcagatagatggccatattcaccaacagacttaccaatttttggaaatgcaggcgtcagctgaagcagacgcatacttttgctttgt

SEQ ID NO: 1184 - DNA, 2982 bp, Zea mays
  Intron number 1 from transcript GRMZM2G175474_T02 (locus G RMZM2G175474) derived from phytozome v7.0 (chr-ID 4; pos 6 2309730 to 62312711 reverse strand)
ggtgcttgctcggctcgcttggactggacggatccgtgagcttccttcctacattatttaacgctaagaatctgtggatttgattcttgtttcttaggatatgtgagctcttctttctagcaaagcttagccaaggcattcgagaaagaagaggatgttatgctcctggagaacttctaatagaactgtttgcgtaattcctttgcatgttctttttagttactatgcagtgttggttcctaagaaataccaagtagtttgagaaatgtttgttgccaacggatctgtatgaatagtagaacatatttagaaattttgatttgctcagaattcaatgagccatgaaagacatactctctgctagggttttgagttatgaggcaagcccagtacaaattaaggcattctaatgaggctggagacatggtacattaaccacagctagtaaaatttggactttcatatgcttataactttcatattccaattaacttctgcagtaaacatattagcattagtgaatgcattaactcaatttggatattatggtttctgttttcttgaagatgttgctgttgtaatgcattatgatttaattggacactataactagaaattttatttccactctcctttgcatttatttatctatttttgttgattgtttgatcaaaaggatttatctcctccttggcaagccccttttaattaggtttcattaactgaccccctttcaattagttcaggacttagagggagagtgagccgtcctgtacaacttttttagggtgcgtttggttgcgggacagacatgacatggacgtcccctgtcgtcctctctcgcccctccaattttgagggacaactgaggacaacattgagatagtcttgttccaaccctggaccctaaaccaaacaatcttatttaagggatcatctcatcccgtcccgtcctgtcattgtaaccaaacacacccagtgtgtcctgagtggccttctcagaattttttttggttacggggtgcgcatatcgaatctaccaaactagtttacatgaattacgaattaattagcttaccgaatgaatcataatagccttttggcgcaagaactttacaatgacacattctagagtaattttacctgcaatctagttgccagatcccttagggttcgttcgtttgtccaggaatggactcggaatcgttccagctaatcaaaacttatataacttagagaagaaatccagctaggaattgttccaggcctccgttccgtgaaaaccgaacggcaccttaatagtctcaaatggcatcaaacaaaatttgcagcaagttctattcagaaactttgggtgcacatttgcgcccacattcacagtttctgattagaatgaaagatttacctactacttttcttactaaactggcatttcatcagctccctctttagttctgtttggcccagctcaagctttatttcaagccattttttaacttgctgccccacagcagctgtttttcttttataggagtagctagataaaaattgatggtgctttgaatacttagcatttatacttcataccacttttcacctgtgggatccacctgtcaggaaggattgtcacaaacaatgaagagctttctacctaagggctcatcacccactgctaaccgatcatcctgctgctcactgccctgagcttgccactctctgtcctgatcttgatactccctgaaagaaacacggcaccaggatattaaattgcttgctttgacctctaaggtagggatgtaaatggtccatggagaagtttgagataggaggtgggattagtaaggcttctggagatagcctaattgggtaggggctgtattaatatatagccaagtacatgggctgggccaaagcccattacattaggaatagacacatagtcatctaacaattataattatggactggttttaataagatttaatcttccagtatgacagatctgtggtaaatttacgtgtattgatatcattgtcctagttcttctctttaaattcaacgtaggcaggaaacatagtctcgtttctgaagttcaatcctgtttctattcatagctgatggaagattttttctacttatcttccctttttcattcaggagtttgtagaattcgatactgacacaacagctttgaataaaagcaaggatgcaccaccgccaaacagtggtatgatcatatctgatctattggacttaaaaatcacttgccttcctgaaaataaggaaacatcttcaagttccataacaaaggagcaataatcttctgtggatacactaataaatttatctgctgctaacctagattcattttttgttgaaagaaaagagatgacttcttctcttccgcaaactcataatgcggagcaggaaaagaaaagaactgatagcaaaaaccatgaatctagactggaggtgcttgctgcatctaaaagcttaattagttctcaaagaacaaatcagattgaagctactccagcatttgcaagttgggatgctgattttcagtctgctagttcagaaagtgctgcaaaaaaactccaaacaaactgatctgtttaagagctcttgtgtccccgagtcttttagtttcccagcttcagatactgccatcaaacctgtagtaggtactgaaaataaaacaaatacgagaagtgtcatcctagaacatcattcagaagatttggcttcagcaaatggcacattatttggtgatgaccattctaatcaaaaggttgcccagcatatctttgagagcaacattgctcctgagtccactgaatcccctctcaacatgaatttgctaagagcgatcagttacatggaagggaatatactgcagtcaatgatgatgaagcttttgatgaatggcaagaatttacagcaagtggtaatcaggacagcctatcaaatgcaggagagaat

SEQ ID NO: 1185 - DNA, 61170 bp, Zea mays
  Intron number 1 from transcript GRMZM2G056592_T01 (locus G RMZM2G056592) derived from phytozome v7.0 (chr-ID 8; pos 5 8744446 to 58805615 reverse strand)
tgccacctttaaaggggcgctcgctgcagccattggtgggcatgggcggctgctgcagagcaccagtctgcacagagacaaaaaagagcacacattggacggacgttttggcatttttcgtttggattcggacccggatcactgcagaaaatatgttccttgatgtatactctacaatgtttgtacagaacttgaggtgattcgggcactggttagagagttatagacccatgaaaattggtttgtcagtggctcagaaatcagtggaaacttgtgaaaactgagtgtcaaatcatgtcaaacggaatggatgaatgccatcttttgatatgatgtgcctccattagttactaacaacttttatatctggtgaacttcaagttgttcaacaaattttagggaacacgagacgtcgacccgaatgacactaatttcaaacttagaagaattcgaatcctgaaatcagatttttattctgtcttgagggcactgtttgagatacttagagattgaatcaaggcttggtttaaatataaaatttgttgtataacacaggttctacaatttttattaaaggtcaaacctcatatcgtgaatataaataaaagtttcactttggtcaaggtagtatcattataaagctcccaattatatttttaaggcaatcagactattttcttgacaatttcttggcattttctctgcatgaacccttaataacttttgttgtagagttgatatagagttgtttgagcaagatgacaaggttttgttgaattccaaaatttgcatttgttcagacgagtagtttcaagtatgtataggatttatcttttcatgtgagtatttggttcaaacttataggaatctttagaatacactttatagatagagatgaatgatgatatagataataacaagctgatttgcataaaattaattataggttgacacaaagagattctgcaggagaatgcggattcagattaagtatttgggcgtagacctactatcgagaaagcggattcggacaccgattggataacataacaactatcgagagtccgaataaataagctttagacgagatttataaatcgagattgattatcgaatttgcattttctccgagaaacaaaaagttttaacaggctccaaatttggctattctagagatcgaataattccaaacttggtgaaactttcatgagtaacttgataaatggagataaatgcgataaagagatagaaattttcactaagcatccgagattaggataaatctcctgacataacacgaaatagacacctggggtgtcacatcttggtgacacaaaacatgtatggttcaaagttctacgcactaaactattaataactcatctaatgtgtgtaatgcatgcatgcaggggctgttgggggccttcgtcttccgaaggtcctcaaaacacgactaacatgttttccaagtataatatactgttacaggaacgttcggctttgagatgaaggtgcgcacggtatgaaaggagcggtctgcaagaaggatgaatcagttctgaagctatggatgaagaagcttcggcttagcgcaaagacagtgatggagaatgaaaccggcctaaaggggaaaagactgcttagtcctcgacagattactccttagtcaatagtaaatgtcaaggacttggatgtaattttacccaggttgcgtcatgtgcctataaatagatgaacaataacaccgtattgttcacactgacttgtaatcactcgcacgtcactcttggatttttaccttctgtcaagccgaaggtataaatgtaattcaataccattaatgtttgttcatgatcatataatgagaatatagataatctaatgatttaatatgattattcatgttctttatatgtctcatacgttcctgcttttcattattacatattgagatgatgaaggtttgtccttcaaaaccttcgtctgaagatcattatatcctaagggagataatgcttcgaaggatgaaggcctttaaccattaacatttgtgttgtcttgttcttaactcatagcatttgagaacaagtgaccaacattggcgcccacctccggtgaactcatttgaccaccttcggcaacctgtgaccttcttcatgccgccgaagaagtcttcagggctagaggctacactgcaaccactggacgtcaatcaggacacattacgcgaagctaggagccaaaaaaggaaggctacgagtccgacacctcgggaggaggggttggaccaagaaatcagggacctcgaaggcattcatcaacaggcccagaggaaaaaggaaaagatgcttcgtctcgccgatctttagaagaagattgatgaggccgctgaagaaatgcgtcatctcacccaagatgactaagaccgacgacctcaacacagagagcttcgtcaagacaactcccacaacaatgacgaatggtatgatgatttccatcatggcaattttgcttttgatgatgcttctcctctagcagcagaattgcaggctaccccatggcccccatcatacaagccaccctagctctctatgtatgatgggcactcaaacccgaagcagtttctcatgagctatgaggcaactatatcttcttatggaagcaacactgcagtcatggcgaaatcctttgtcatggcagtcaaaagtgttacacaaacttggtactcctctctccgaccagggacaatcacgtcatggcagaagcttaaagatatgctaatcactagcttccaaggatttcagacgaagccagtcactgctcaggctttgttccagtgcacacaagaccatgtggagtaccttcaggcgtatgtctgaaggttcttgcgtctaagagcacaagcgcctacagtgcctaatgaaattgtcattgaggtcatgatcaaagggcttcggctaggacctacggctcagtactttgccaggaagccctccacaaaccctggagaagcttcttcagaagatggatgaatacatccgggatgataatgatttccgccagagaagggaagaagcctacaggttttctgagatgaccaggggcctcggaggaagaatccaccccaggcatgttagatcaatccataattctggcctaagtgatgacagaagaagccagcctcaaaggacacaacacaactcccaatcttcagggcaacaacaaagctctttcaggccaccagccccaaggggcagaggcggcaggggcttcggaggaaggtacggggatcaacccagaagactatattgcttattctgtggagaagataagggccacactacaagaactttccaagtcacaatacagaagcaaaaggagattgtcgaagctgaagaacgacagaatcagccgaagcagattttacatactgcttcatgctactctccctatgtaccagagtacgtaggcaaccaacaaccttcggcttctgtcgcttcagcaagtcactcccaagcttcctgggcctagctcccattaccaccaccattaccacccactcagacccgaagccaacagccagaagggcaccaacacgcatagcagcagcgtgattttcgggaggaatccgaagctcgcacagtcaacaacactgttccagaatccaagcatatctattaaagtgtatcatgttcttgatgtatctttaccttttatgtcattttgatttttgtatgagaaacaagtcatgaaggaataaacttagattttctataataattatgacttcatcaacgagtaaaatacgtcttaaacagatttacgaagctacaaaactcgttcctaacggagcacggagtaagttccaaagctaccaaagtcgttcctaagggagcgcagagtaagttttctgctcagaagtcgttcctaaggggatgcagagccaaaaattccaccgaaatataaggtgaagaagcaacaaagtcgttcctaagggagcgcagagtatgttttctgctcagaagtcgttcctaaggggatgcagagccaaaaattccaccgaaatagaaggtgaagaagatccaaagtcgttcctaaggggatgcagagcttaaatgccaccaaaatataaggtgaagaagctccaaagtcgttcctaaggggatgcagagcttaaagactctaaagacgtccctaaggggatgcagagtcttgtgtgttccagtgtgggcgcgtgtgtgtgttcgacaccaccatcatattgcatcatatcactgcatcattctgcatagcattacatcatacatcatatcgcatcaacgacaaaaggattggatacgaagcaaatcttcggcaatactttgttgagtgaaaatgtgctgagcacgaagcaaacttcggcaatacttgaatgaaaatgtgctaaggcacgaagtaaatttcgggaaacaaaattttatcaaaccgaccatagaaggggcatcttcctttacgaagcatgtaaagaagggaaggtgttttttcgccgaaggctaaaaaaacggtatgtacgtaaatttcatgcatcgcaaagaaatatattacaacaatttacatgtctgattaattgttcaatacaacaaatggtacatagtatcattacaaaaaagtttaatcttccttaagtattttctctgcagcttcgttcaatagcttgtcgacgacttcgtttatgatggagttagcaacactcattatatccagtgcttccttcatgactggatcggctagggggttgtatggctcgggcagcggtgacagttcagctgtaatagacaaaatgttagttcgaagctataaaataagcaccgaagctaaaattcaaaaacaatacctatgcgcctttcgcgttcagtagcttcttcgactcgcctagtttcttcccgggcttcgtgggtttctttttcattattctttataatttcgttggccaattctcagccaccgttagcccatacatcagaataaaattttccgcccaccaatgtagcttcagccgaagggtcttttgtgtcgtctatggagaaggcggcttcagcctgggccacagctttaacatgatcgcaaccagccttctccaggatagctgcaattcctcgagcgccggagaaagcacaaatatccccacgatcgctcaaaaatctcttcaaatgctttcgggcttccccgcttatccaatcaataacgccctcggggtcgcctcgcatgaagttttcttcagaagaataggcgcctagtttggcaaagctggtttcaattttttcacgcaatccaaggatttctcgaagcacctttccttggaagctcctcaacatttttctctagtctagctttggaccattcactagtttcttgactagccttggcaactgcaaagttctcattggcttcggcaagttttttgcgaagatcttcaatttcggctttataagttttggattgagtgttaaactttgcttcatcttctttcactttatccactaatgaaaataaaattttgtccttctccaaggcttcgtttctcagtttaatgacttctgatcgaaggttgccaagagctatcgtgaagctttcatcctctgcattcttttgcgcccttagggcgttgctaagaattaaaccctgcgaaaaagaaggataaaggtttagcatgagaataagactttatttccaagttcatagactttaagttcacaatttttgtaccttcaaactgttgtatgcaaggctgtccgcgaggtcatctttcgacatggcggagtggccaacctcgagcttcagaaatcccatacttttagccatctcccagtagacagatatctctttgttgtccgagagacagtataagaaatcatcttcatctgtaccattgaacaccaagacccccttcgggtatttcagttttcgggcatagtgtttggcttctacaatctcttcttcagatagcctttttcccgaagcatgtcgaataataaaatcaagattttcggacagtgcttcgagagcaggagatttagcttcttcggctacttctttatccatcgctatgccaatatctggagattcttgtttagccctttcctcagttacagcgggcttcgtctcagcaggcatcgaaggccgacttcggtttcagtatgagacatagcaccttcggcaaccttttttataggagcaggagtcaatgctcttgtctccatgatggtgtctaacatgctggccattcttctcctcttgggagttgtggcgggagctttcgcaaccttcgacaattctgcttctaccggcgggctcagaatttctggcagcactattgttttttctaactctggcttcttggccaccccatcttcggctttgactggctcaactataggcaccttcagcactatagttgattcctcaacgctctgagcggcggaagcagcttgttccgcttcggcagcggaagatgtctcttcaccaaattttcgcactgtggccgtctcaatgtacctcggccgatgcgtcagaaccttgatcttttttccctttggcacagcagagatggtcgaagtggtagtcttcctcttttttccctgccttcatgaggggtagtagtaatcagggtagatgaagccaactaaatcgaaaactgaaagggaaatagggtttaaccatttcccataaataattttggtggttgaatgcccaacacaaataattggactaactagtttgctctagattatatattctacaggtgcataaaggttcaacacaaacaaataaaagatcaaagttagggttcaaaaagaaaggagcaaagaaacccaagtgtgccctggtctggtgcaccagactgtccggtgtgccaccggacagtgtccggtacaccaggaccgtacaactccgaactcttcaccttcgggtttctccagcgccgctccgctataattcaccagactgtccggtgtgccaccggactgtccggtgcaccagcggagcaacggctaccagcgcaatggtcgactgcaacagacacctgcaaacgctacagtgcgtggacagtgcgcgcagaagtcaaagtagctgccagaggcacaccggacagtgcacagtacctgtccggtgcggcaccggactgtccgccgccaaaagaagacaaagctccaacggtcgtctgcgcccgaaccctaacggttgggtgacgtggctggcgcaccggactgtacggtgcgcccatcgacagcagccaaccccaacggttgttttggtggttgagggctataaattgtggcggaactgcccgaattattccaacttaagtgcctaagccccgacttagaggctagaccacacttaaatgggaataacccgtcaatccctcggatctagtccgacacggccactgacaggatcaagtaccacaatctcactcgatggtgagtcacagagcaaatacaataaagcataaaaccatgcatgtaagagtattaaaattattacatcaccatcggagttttgcaaaagtagtcatcattgttcgaagtgcagcggaataaaactaacggtaaataaacagagagatggggaagcatgtcccatcactcctcatgctcctcctcagccaaggtagggtcccactcgacagtccaacccggtggcaagatggacggccaagtcactccagcaaccatgtcctctagagaacctgtaaaattatgccacaagcaaggctgagtatactaatactcagctagacttacccggtgtgaggagtctactcctctacctctagacatgcagttgtttggctgtggggtttggttgccaaaagcactagctgagtttctaaatcaagtttttaaccttatcaatttaagtgtgactctcttaaggctaaaggtgtactatctactcatacatggtagcaaacatttttagcaatcaacatttttgtatcatctcatcacaattccacttgttactcaatgtagcagcatggatcaagcagtctcattagctgcgagaagcagacgattcgaatcgagtttttaaaccttgcaaggtaaacctaaacacacgacatgtaggggcactccgtccccacacacatcaaccgtccccatcgattccccgtcagcagatcagggctcatcgccttagcgtacaatgcctcactgaccccaactgccgtcgtgcagtgaccgcacttgtacccaccataaccggaatgggagaccacgtctcaggtcgcgtgaggggcaaaatctactgctgggttcaatcaggtactaggcttaccgatttaccatatttctcggtatgtgtttagtacgttcaaacgcttgactcacgataccacaccttaatccttattcaaattttcatcccgtggacaaccaatccccatggattgttgcccacaaaccaacatcaatatgataagaaagtggatacagccaattcctgacctcgcgcgagtgctagaaaaatcactcgacttctaccgagatcctaattaataaagcagctactcgacttagcatactagtattcatctcaatggggttcctgagatcatgcaactagggtttcaaacaactcctacacttaagtgcacaatcaatcctacaatcattaagtatagtaaaatagcataaataacaggttatgcataaaaccggggcttgccttccaaagcagtggcaggcaggtcctctggtgcaggctctggtgctggatctggggctacctcctgagcagctccttgctccggcacgaggatgtaatctccgtcagcaaggttacagtctatcgaaatgcaatgaacatgtaggtcatgattatgcaggatttaataacattatgctaagagaagaaaaactaagttaatgagtaacttagggtttccgggtcatatgtggcttttaatggttgatgcttatcacttctaggtttaggttttgctagggataggcatagggaatttgtattgcctctatatatttcagtggacaagttaataagggttttaggatgacactagttcctcttattcatttttccctttcttatttcctatttagggtttctagtgtaggtttgaactacaacagtggtctaatattttccaaaaattctgtaaaaattatagtgggttgccaagggtcattatagcctattctaggaatttggggtttaaaatagaaaggctatgatttagacaaaaatgacaaaagttgtgtaaaatgggccactttgcactacacctctcaattagggttgggttctgccctaagggttatttttgttggcatttaacagtaataataggcttctgtgcaaaaaaatcatagttaagggatggtcatttagttgtgattttctaaagttaaatgccaaaaaggcactttctactacatggttatttgaaaaatgtcaaacagcagatttcatatttttcctaagcttttaataacaaaatattaattatcccaagggttggggtgttttcaccttgtgtttatttttgtagggtttttctatgttttccttgttttcttaaaataaaagggatcctacttattttgtactaaaccagggtataatagatttttctagtaaactacattgaataagtactctaacaaaaataggggtgccctctagttcattatttaaatcaccttttctatttttcctaaccttaagcattttgtaaattaaatggcaaaaactagcttaatgggttggacagagaagtttagcatttttaaacaggtcagtaggtgaatataaacttctccaaatttttctaaccctagccaaatagtgcaactatttttatccctattatttagcttttggtcaaaacaataattaaatcagaaccctaaagttttctgtagtacataggggttttatatttttcctaagtagtttacattatttagagtctgacaaaattggtttgaccaaatttggatgaactaaacagaagttatgaattattaaagtttctgttcaaatttaaaataagattaataaaggtttcctagaaaagcagttcacaccgaggaccctggggtatttccaaactaactctctcagttatacccccgcgctactactcatttgagtctctgacatttcacaaaaccccctagacttctttccttctcccccgcgatccttccctatgtttaaacagtacccgcaagaaagaaaagggtggcgcggcttaccggcggtgagataggtccggcgaggggcggggttggctcagggaggctctggcggtcacagcgatgtacggctcgacggcggggatggccggaatcgctcggtccacgtgcgcaggcgggtgtcttcgtcggcggcgggtgtgccggccaaatcacagcgatctggttcaatccaagggtacggtgagcttcacggggtgacgtagagaccgtgtgcacaaggaatcggaaaagggttcagtggattacccggtccacgcactccggcggggttgtgaactccggcgaccgtggactggcctctccggcgaagcaagcttccattcctcgctcggggagcttcactgaggtgtgctcagtcgtctccgggggtcggacggggttgggaaaggctgggttggccggtctacggcggcaggggctcgggtggccgcggacgcgccgtgcacgggcaaacgacggtgagctgagctccggtgaggtttgagcgtgcgcggaagagtgtggtcgacgcctgagcgggttttataggcgcgggtgcgggccatggcgtcggctggccgttggcacgacgcggggcgcgcgcgggcgtgctctggcgtgcacagagcgcatcgaacacgtggagcttttcttctgcccgtgttccacagctcacccaagtcgcaaacgtgcgaatcttggcaaaaatccggtgcgagtcttttcctggcacctagggctgtctctcactcgtgagttgccatggcagatatggcctaggtagggagatcttcggtcgccaaatcaggtatgtcactctgcccacctcgcgacaaaaccatgccaaggcatgtcaaacgtcaagatctcgggctcagctttttccagtgggtgccctaggtggtatgccacatttttggtatagaacttaggtggttttggtgccagcttcgaggtgaacacggttgatctttagtgtaggtgtagtttttaacttagagagaagtagagagctctagctctctctctacttagggaatggatttggggtttctccaggggtctttttgcaatatttccttcccacaattgctggttataaggttacttaaagtttggttaaagattactcatggtttgcacatttgctcactgtcggtgttttgggtccgaccgcacacccggggttgcccctcaaggtgttttaggagtaggacggtgtcgccgactgtagcaaaatggttcgtgccagatgcacgagggacaatggacagtgtttacaggttcgggccgcttagagatgcgtaacaccctacgtcctggtgggtatgctttgtgtaatgggtaacaaggtagttctctaaagtgagaacgtggagagttaaggtgggaggctgagtaatgggatcgatcgttctgaaggggtgccccctaggccttatatattcgaccatggggcaatacatgtggatatgataacaatgtgtacctaaaagatagtgaactgtttgagtctatcttcatatggttctgccgacctatcctcgcatagttccgttgcatggggctccagcgcgggagagtcggatctttgttgtggtcgcttgctcaacgttgtgggtcgtccgggcttacaccaatccggccttacgtcaacctgctttactgattgtccctccccaggcccatgaaggaatggccttacgatttattgggcccttgggcctctcgtgaggtcttttacccttccagtggacccgggggatatatgtcccccacaagccccccatctttgggttgattttgaggtaatcagcccaaagatcccaggtccagcttgtagtctttatttatgataagagatgctttccaagcagtccagtaaaaatgattttttactgtctccttctgcttagatcactcgtagactggagccttgcttcatgtttgtgccttagaggtcggcatttctttttgtgggaccctggacttcgttgggtgcaccggaggtgcaccaaatgggtgtagcccccgagcttcgagtagattttggaaaataatcttctcgaaggtcttcatcagaaattatctttattttactcttgttctttggttgagagccagccttgtctttaatcttgtctcatgccttagaagtcggcactatcttggcttgaaatggtaatccatggggtgcaccgaaggtgcacccaatgggtgtagcccccgagcttcgagtggatttttgaggataatccactcgaaggtcttcctttcgtgtctttttgttgaaggttatcctttctgccttagaagtcggcatgatgccatccacattatgctttagaggtcagcattatgtcatcaatattatgcttcagaggtcagcatgtattttgtcttttgcagccgagttcgcaatccaccaatgtcttgctaggtggtgcaatttatttgctctgcgactgattggacatttgatggacgttccctggctagtcttcacgtcgcttctgtcggtcagattttgtacttccccggctacatttggctttcctctgatccttactgatatctcatttttgtcttgaggtattcattgcatgccctgcacagatgtgacagttttgaaaaatatactcataattgctgggcgtccccccccaatgggtgtggacaagggacggcttggtacgctgagtgttttagccagctgcttctgagtagtaatgtgatgcgacggcgggcgtaatcatatcatccacgctgttgactggagtcccaatgggtgttgcgctgtgtgaaacggcgtcagccgcctgacgtgtcttcagacgagttgaagtgtgtattgaatgctttgtgactgttcagtgaccgtggttggaggtgagcggttgccttcttcttctataaatagtgcctttgcctctctggttttttcacatctcttgctgttatccactgcttgctttcttctccttctcgcgcttccaccatgggcaagaacaacaagcgcaagcgtgagccgactcctccatcaaaggacttcggtgattcggagtactcagaggaggagttctcctctgagtccgaggggtctccggctcccattcctctgcgtgagtcgtctgacgatttagacgactcccaggggcttgcgacggaggtctggacttacatccgggccgtcgagcgctccgggctcgagggctcggatgagtcggagtactcctcggacgaggaggactcgtccgaggaggacggtggcggcgatggcgaggacgacgacgatgacgacgaaggcggtggcggcggtgacggtgacggcggcggcaggggcagcagcagcggcagcaaggatggcgacggcggcagcagcaggggcggcagcggcggcggcggcagtagcaagggcagcaacaaggccagtggctaaatgccactggtttttagatattagtatagattagaagtagtatagcgaaataatatagtagtattagtagtgtagagtagtatagtgtagcgtagtagtagtagtagggaagtatcgactcataatgagttgatttgtaagtactgttacttccccttaatgaagaatgatattgccttctctgtgccgattgttctgcttcgtaatcagttaacttctgctgtgatattcattgctcatgatgctctctggttgtagcataacttagagttcttgaatcattcctccgcccaccttatttgcgaagttgatttccttggaatagtaagtaaataactcgagcatcatattgacgcttttagaggtagctgccgagtgacttgaagacgacgtcggagttttagagataactgtcgagcgaccaaagacgacgtcgacgtgtcagaggtaactgccgagcgaccgaacacgacgtcggtgttttagaggtaacgccgagtgacttgaggatgacgtcggagttttagagataactgccgagcgattgaacatgatgttggagctttagaggtaactgtcgagcgactgaacacgacgtcggagttttagaggtaacgccgagtgacttaagaatgacgtcggagttttagagataactgccgagcgactttgaagacggcgtcggagttttagagataactgccgagcgactgaagacgacgtcggcgttttagagataacggccaagtgacttgagaatgacgttggagttttagagataactgccgagcgacttgaagacggcgtcagagttttagagataactgccgagcgactgaagatgatgtcggcgttttagtgataacggtcgaattagaacgggctgcgccggccatgttaagggtaatagccgagtgatgatgtgggagtgaccgtcgggtgacaatgtggcacgcgggtgttttggaagtgactgccgagtgacaacgtggcacgctggtgttttggaggtaactgccgggtgctgactgggcgctttttgaaacagtatctggctcaggaatatccataagtactgcgcttttagccgcctctgctttccgtgccctagttcttgctttcctgcctccaaatcctctctgcaattcggctcttgctccgtccgccagtagaattgagatggtgtccaagcggaaagtctcgagttcatctgccgcggtgattcccccaatcgaccccaacagtcagttgcctttcgcaggtaaccacatgtctgttgtctccgagcccgaccttctccacctcgtgtccatcggggtccttcccccgagggagttgtgttcttggcggatttgtcatggggtcactgtcccgacagaggatacccatgagtctgtaatttacgttccttttcttcttcgcggtctcggtcttcccatttctccctttttccgcggcctccttgatttctatcatcttaacctgacccatttgaatcccaattctattctgcaaatttccattttcattcatttatgtgaagcttttcttggcgtgctgccacattttgggttgtggaagtacttgtatcactgtcgccctgggatggccggggggcagcattagttggttgggggtgctagtttggagatgtgccgtgggaggaagactgagtatctggaaatccctctcaaagacagtattaagggatggcgcttggaatggtttattgttgagaaccatggcaattctctcccttcacggtcgggaagacagccggatgttcgtactccgagttggactgaatcccccactgatcaggaagtggctgaggcaggggctttgctagctgaagttggactgctgaaggagaggggtctgactgctgaggctgtggttgctgatttcgccttcaagaatattcagccgttgaaagacagggcatacccggcttatctgtatcgaggcctagctgacacgactcgggttaccaacagaagaattccctctgtagacttggtgaaccggcttgagatgattcttagaggcaaggtatcaaatgttggtgccccagtggcatactcagcctggaacttgcctcctcccaaggccttcactctttttgtgtcgaatccaccagtcactgacggtagtttgggcattagagtgcgaccgtctgctgaagaagttagcgtcttggttgcctcgcttggggaagttcctgatagtgaacggcaggtccactttgaggtgcccttggatcctagcgatgcagagataagtgctatgcttgatttgctggctgaggactcttctgatgctgctcctgctaggacattggtggtggcgcctctcccagaggctagtacaacctcagatgttcagaagcatgtcagtgttcgcccgagacgtccttgccgagtcaatcaacttgatcctcctgctgatgagcagaaaaagaaaaagagacgcctccggcgagtatctagtttggatcgggacgttggtacttcggttcctgctactgaagaagcgcctgtgcctgaatttactgacgccgaccccactgggtgtgctccatctgctgctgatcccaatgggtgtgctccatctgttgctgatcccaatgggtgtgctccatctgttgttgatcctaatgggggtgttgcctgtgctgctggtgaagacgatggggaggaagaagatgaggcccctctgactcgaaagaacagtcggcagtatgtcgccagtggtgaaagtagtggagttccttctcctgctttgtctgctctcattggtctgcaagaattgaccctggcgaattttgatcagactcttgaggatatggttccagaggatttgttatctgagccggcagatgatggtgtgatggaggtttgtgctgatgtgctcgacgctggattgaggtcatcccatgcctcatcgaccttagagcgcggtctcgagggtcaggagactgacttggatcgtcctggtcccatggaagtaactgagggttcatcagccttagaggcggctattgcggagaacttggttctcaaggacggtgttgacacttgcccagcccccgaggatgttgccggagatgactcggttcaggtgggaagcgcaagccactgcccagcccccgagggtactgccggagatgatctggctcaagtgggcagcgcgaactgtgacccagcccccgagggtgtccgagtggggtctccctcttgtacttccatggacgttcatgcgggatcgcctccgcactccggctatatggtggtagcccaagttttggaccagggagtcgctttagagggcagcgtccccgctgaccaagttttgggctctgttgacggcactgtattggtccttgctggttcgttgcaagctgctttgggtggcgaccttatgcccggtcatcaattgatctctcatgatttgggagtcccttcgttcttttccaacctccaggtgcttgtgatatttttagcttgatttttactccgcatgaactgctatcattacactcatctgttctccttatcaggctttggtggacgggatggctagccagctgaggttgcagggtgctcctgttccagaaggagctttgtctcttgcacgttggaatctagtgttacttcgacatcgtgtctctgacttggaggcgaccaatgctggttagtgcttttttgattctctttgtcttcattattgaactgccttacattctgaccccttttgtttgattgtctcctgctagatatgactcggcagatttccactcttgaagaaaaacattctcgagatcaggctgaactggtccagcggtgctctgattttgaagaaaggtattctcaaagccagactgaactagctcaagtctctgctgccctagatgacgccaatgtgttgagctcttcccttcgcactcagcttgattctaaaaaggtgacttatggaactgtgccttgcgttattgtgttcctattgcttgcttgatgtttgaaggaattgatttttgtttgcaggaagagaaacgtatccttgctgcttctcgcgacaatcttgacagattgtatcgcgactctagcaactcgctgaccatcctggagaggagtcatcgcttcaccatggaggagttagacaaccatcgttgtaagctgcaggaatctacggatgaggtgatccggctcaagcaattgatatcggcgaaggatgctactatcaaagaactccgtgcttccaagaaatccatcgcccaggagctagaaaccgctcagttggctgccaaggttgctaaagaaacttccattactctgagagcccagcgtgacagagccatggataaggccattcgggtggggcgaatcttgatgaggagacctggcgtggttgttcctgaagatataagggctgacgtgaatgctgctcctgattcctcaagtcgcccttcctcgtcggttgcccctgagaaagatatcacgaaatagagaaatattttgcgtgctttgagcgcgcggttagcatggtcagacatttgttagagaacatcagtttagcacttggatggtattgttattctcatattgtttcagaattcaacagtacgcaaatttacagtagtaaaatgctgtgtgatggttttgaaacttgtttacgggatatagaagtcatccctatatgagtaatcgtaagcgcgtcagatcgccttaagttgccgctgacttaagtcggttgcctttgttaatagggcatagtggtcaccctgagttatgtaagcgcgagcatgttgcaccggcttaagtcgctgccgactttagccgattgctccattggcagggcatagtggtcaccctgagttaagtaagcgcgagcatgttgcaccggcttaagtcgttgccgacttaagtcgattgctccgttagcagggcatagtcatcaccccgagttaagtaagcgcgagcatgttgcaccggcttaagtcgttgccgacttaagtcgattgctccgttagtagggcatagtggtcaccccgagttaggtaagcgcgagcatgttgcaccggcttaagtcgttgccgacttaagtcgattgctccgttagcagggcatagtggtcaccccgagttaggtaagcgcgagcatgttgcagcggcttaagtcgttgccgacttaagtcgattgctccgttagctgggcatagtggtcaccccgagttaggcaagaatgcaagtcaatcatgaacaaactgagtatctttgaagcctttttttattgatggcatatttcccattttacagagtacatcgacgtcccgatagcctttgaaatacggctagggataaaacttcctgaggtgttctatattctaggagttcccaatttctgtgtcgtccatctgagtgagacgatatgatcctggccgagtgacttctgctactatgaaggatccttcccataagggtgataacttgtgccgtccctcccccgttagaattcggcggaggacgatatctcctactgagaaggatcgctgtcgcacggctttgtcgtgatagcgccttagagtctgctggtaccgtgctgattggattactgcatttagccgttcttcctcgagtatatcgatgtcctccctcctagtagcttcggcttctgctatgctttcgaagatcaacctcggcgctccgaacttgagatcggcgggtaacactgcctccgacccatagaccatgaagaaaggagtgtttccatgcagagctcggctaggttgggttcttaggctccaaacgacgtagggcaattcccttatccattttccagtgaacttttcattcttatcgaagacctttttcctgagtgcctccatgagcgtgtagtgagccgacagtctggcaatacgctcggctgcatttttgtcatctggttcctcttcattctttatatacctgatgattggccttctccagtcatcagagtctgactctggttgattcacgatattacactcttctgcttgatccattgagatgctcggctgtagtatttcttgcacaaatactccaggtgggacctgagttcgactggatcctagcttggacaatacatcggctgccgtgttccgatctctttctacatgatgaaattccagaccctcaaacttatcttctagttttcggatggcagagcagtactttcccattgaatcgcttgaacaatcccattctttgtttatctggcttatgactaccagagagtctccgtacaccatcagtctcttgatgcccaatgatatggcaatgttcaatccatggatcagacttcatactcggctgcattgttggaggctggaaacagcaactggagggcatatttgaggtgctcgcctccaggtgcggtgaagagaattcctgctcctgctccctgcagcttcagcgagccatcaaaatacattcgccatacttctgcagtctctgggttatctggtacttgctgttcagtccactctgatacgaagtcaaccaatgcttgagttttgatggcagtgcgaggtcgaaattcgatgtcatgagatcccagctcacaggcccacttggctattcggccaatggcttccttgttgtaaagaatatcccctattggaaaaccagtgactattatgactttgtggtcgtcaaagtagtgacgtagcttgcgggcaattagaagtactgcatataatagcttctgaacttgaggatactttttcttcgagggacccagaacatcactgatgaagtaaacgggatgttgcactgggtaggcatgtccttcttctgctcgctcgactaccaacgcggtgcttaccacgtgagtcgtgcaagagatatacagcagcagatcttcagctggttgagttgacgtggctcgtcgaggcggctttagtactggtggtgtcgtcaagaatttcttcagtgcatctagagcttcctgtgcttccgatgtccactgaaacttatccactttcttgagtagcttgtaaaatggtaaacctttttctcccagcctggatatgaatctgctcagagctgccatacatccggtaagtcgctgaaccttcttttgtgatcgtggtgcttccattttcatgatggctttgatcttattaggattagcctcaattcctcggtggctgacaataaatccgagtaactttcctactggtacactgaaaacacatttttcgggattaagcttccatcggtaccaccgtagactgttgaaaaccagctgcaagtcctcaatgaagttttccgagttctccgttttgattaccacatcatctacataggctcccacacgcttgccccagtgatcagctaagcatgtttgaatagctctctgataagtcgctccagcgtttttgaggccgaacggcatggaggtataacagaaagcaccaaacggagtgatgaacgcaggtttttcctcgtcttcctttgccaaactaatctggtggtatccggaatagcaatccaggaaagacagcacagaacatccagcggtggagtccaccacctggtctatcctcgggagcccgaagggatcctttggacaatgtttgttgagatcagtatagtcgacgcacatgcgcgaatccactttattctttttgagtacaagaacagggttggctaaccactcggggtgtaacatctctctaatgaatccagccgcgaccaagcgagctagcttggcgcgaatggcctctctcttgtcgggtgtgaaacgacatagtttttgtcggatccgccttgcctggggatagacctttagtttgtgctcggccagttctcttgggactcccggcatatccgcaggttgccatgcgaatatgtctcggttatcttgtagaaactggacgagcgtgtcttcctatttgtcgtccaggccggagctgatgatggcagtcttgcgttcatcggcgaacaccaggttgatccttttagtttcttcagtcggccgcatagaggtcgcggcttgggcttcgttcatcggcgctgtaaagtcttcctcaggcttagagttcgcctgcgccgaagaagtcgccggcggtttggtggtgagggccgcttggatggccactcggaaacactctgcggcgccttggaagtcagcgcgcacagttatgattccttgtggtcctggcatcttcagtatcatgtacgtgtaatgcggaatggccatgaattttgccaatcctggcctcccgatgatggcgttgtaaccgcagtcgaagttcgccacttcgaacctcaggaactcggttctgtagttatccggagttccgaaggtgacaggcatgtagatgtggcccagtgggtattctccttcagtcggcacgatgccgaagaaaggagtgtcggactcgtggagctctttgaggtgaactcccaagacttggagtgtccgggggaaggtgacgttgatgctgctccccccgtccaccaacaccttcttcaccctgctctctcggatcaccggatcgacgaggagcgggtatttgcctgggtggtcgaagttgagccattgatccgcccgagtgaaagtgattgggtgctccgaccaccggtacggagcgggaggaccggtggtcgccaccaatatctggcgatcgttgagcttttgttgtcttctattctcctgtgatccatgtccgccgaagatgacgttgacctccctgtcaacgcgcaggaacgctcctcctcctccctcctcccgctgctggggttgtcgtggttcttctggccctccccttggcggaggaggaggtagagcagtgttttggtgagaaccccacactcactttctcccccctcttaaccatggcttgggagatagggttcaagagaggtctagggttttccctcctcttgcccaaggtagtaagtgcacaaaggtttgagtaatacttcttaggtcattagaaatcttggttaacacatggtctccaaggttcttatgttctccttaagttattactacatgtgatcacagtccttagcaccaaggtgtgctctcgccatggtaacacctgaggtgttacagccctcccccttaaaggaatctcgtcccaagattttaggcagagtcctctagagggtgctacgaggcacgcgggtgtgctactctttcttatactcaagtttctcttgttgactgctcttcgaatgtcattctctttgcaacttcagaaggaagccctttttaagttaaatccaaaacttagactatcctggttatctaagtttttcttataattgtattcaaagggcaggtgggggtggggttttggggtacgtaccgactcctttgggcagaaagtcggggaagtgggagcgtagaaaatcctcagtctcccatgtagcttcttctgctgaatggtgactccactgaactttatacattctgattgaccttgcccgtgttgatctctccttttgatccaataccttgactgggtactcttgataagataagtctggttctatctcaagatctggttcaggtagcacttcagtgggtaggcggacacatttccgcagctgagatacatggaacacattgtgaactgctgacatgtgaggtggcaattccaattgataggctacgggtccacaagcttccttgatctcgtagggtccaatgtagcgaggagctaacttgcccttaatcccgaatctctggacacccttggtgggtgataccttaagataaacatgatctcccacttcaaactgtagaggcttccgcctcttgtcatgatagctcttttgcctggcctgagcagcttctaagttcttcttgatgattctgacctttgcctctgcttcaagtaccaaatctggcccaaaaatttccctctctcctgcttgagaccaattcagcggggtcctgcatcttctcccatataaggcttcaaaaggtgccatctttagactggactggtagctgttattataggaaaactcagccaaggaaagacacttgtcccaatcttttccgtagtgcagtacacatgcccttagcatatcttccaaaatctggtttaccctttctgtctggccatctgtttggggatggtatgctgagcttcgtatgacatgggtcccaagtgattcctgcaattgttcccaaaatcgcgccacaaatggtgctcctctatctgagactatagtccttggtatcccatgcaaacgaactacctggtcgatgtagatctctgcatacttctctgtcctgtgggtggtgtgtactggcaagaagtgagcggtcttggtcaacctgtccacaataacccaaatggaatcatggtgcctggaggtattgggaaatcctacgataaagtccatgcaaatgtcctcccatttccaagatggtatgggaaggggttgcaaagggcctgctgccttcaaatgactagctttgatcctctggcaggtgtcacactcggatatgtacttggcaatttccctcttcattctggtccaccaatataaagatctgagatcatgatacattttgttgctacccgggtgcatggagaatttggaaaggtgagcttcatccaatatcttctttctgagctcagggtccttgggaacaaccaatcgatctccaaaccatagaattcccttgctgtcctgccggaagcacttgtatttctctgccttctgcttgatcatttctttgataacctcaacacccttatcctcaatctgtgccctgactatttgctcttgcaatgtgggctctatcgagatataatttaaggcacccgaagaaacaacttccaggttcaacttgcacaactcatcacacagggtggtaactcttgcatccatgttcatacaattgcactgggcctttctgctcaaggcatctgccacaacattggctttaccaggatggtaatgcacctctaaatcataatccttgatcaactccaaccatctcctctgcctcatgttcagatctgcctgagtgaagatgtatttgagactcttgtgattggtgtagatgttacagtgagctcccatcaagtagtgtctccatatcttaagagcatgaaccacagcggccaattccagatcatgtgtagggtagttctactcatggggtctgagtgctcgggaagcataagcaatgactctgttatcttgcatcaagacacaacccaatcccgtaccagaagcatcacaataaacttcaaatggcttggtgttgtcaggttgagccagcactggggctgttgtcaaatgctgcctcaaagtgtgaaaggcatttgcgcactttttggctccaatcatacttgactcccttcttcaacagttcagtcattggtttggcaattctggagaaatccggaataaatcgtcgataataccctgccaaacccagaaaacttcgaatttgcttcactgtagtcaggggtttccaatccattacctcttgcaccttctcaggatcaactgatatcccatcctgagaaattgtgtgacccaagaatttaatctccttcagccagaattcacatttagacaacttagcataaagacgatgatcgcgcagtcgctgaagcacgatgtgcaggtgctcagcgtgttcgtcttcattcttggaatagaccagaatatcatcaatgaaaacgaccacgaacttatccaactctggcatgaatactgagttcattaggtacataaaataagccggggcattggtcagcccaaaagacatcaccaaaaactcatacagcccatatctggttgagaaggccgtcttgggaatatcactggttcgaatcttgatctgatggtaacctgagcgaagatctatcttggagaacaccttggctcctaccaattgatcaaacagaacatcaatgcggggtagtgggtatttgttcttgatagtcaccgcattgagagggcggtagtcaacacacatcctcaaactctcatcttttttctttacgaacaaggcgggacatccccaaggcgaagtacttgggcgaataaaccccttgtccaacaactcttgcaatttctttttcagttctgccaattccacgggaggcatcctatagggtctcttggagataggagcagtcccgggttgcaattcgattgcaaactcaatgtctcggtcaggtggcatccctggcaattcatctaggaaaacatctgggtagtcacagactactgggatcttttccactgaggattctatcataacgaaggcacaggaacgggtacaaccttggtcgggtagatataaggtgatctcgccatccaaaggggagtggatttctatggctctggctgcaacatcaatcaccgcgtggtgtcgtgataaccaatcagtccctaagatgatatccacactatccaatcccattatcaagagagtggttttgaaaatgaaactacccagcttaattggtacgtgtctattgatctgataggtggcaaccctgcctcctggtgttgagattgtaatgcccccattggtgtggtgaaaaggcaaatgacacttggcactaaatttggtactgataaaactgtgtgatgcaccagaaccaaaaagaacaatagcaggataattcaaaactgtaaagataccagtcaagacgggtgctccctctcgaatatcagccatggtggtgaagtttagcctgccctgcctcacttgcaccttctgtctcttgccttgattctgattcacattctgcccctgcctctgctggttccgggggcaattcttggcataatatccggtgttgccgcaagtgaaacacctgttgtcatttgcctggcgatactgctgctgctgctgattgtttctctgagctggaaactgggtgcggttgggtgcctgctgctgctgctgcggtcggattacccatcgcccttgctgctgctgggggcccctgttctgagtgtcggacacaatcctgaagcgctgtggctgagctgagggtcctgccacaggggtcttcctcttcttttctgcctgtcgagctgtaatgcagtcctcctgggagatagccatgttgaccaattcattgtagctgttggccctgacagtgttgagacggtcacggagcttagtgctgagccccctcctgaacctgtctctcttcttctcgtccgtatctgcatgatacccaacatactggcataagtcattaaaagcctgggcatactgcaacactgtcctgttgccctaagtgagtgccagaaactcattgagctttcggtccataatcccggctggtatgtggtgtcccctaaaagctgccttaaactctctccattccaactctcggtcctctggctgcatagcaagaaaatggtcccaccaagtccttgcgggtccgcgaagctgctgggtggcgaacctgactttagtgacctcggaacaagctccatggagtagcgggaatttggattccactactctcaaccacacatctgcatcaagtgggtcctctgcccttgtgaacaatggaggctgggtactgaggaactcctggtaggtagctgtcgcggggtgacgctgatggtccccaccaccataatgctgaggtggcggctggcgctgagctagctgccttaagatctcattccgctaagccatcagctcctgcagagtgggaggcggtggcggcggtggaggaacgcgctcattctggccacgacgcttcctcccggccatctgaaaaaccacatatatacttaacaccatatttccaagttcaaggtttaatcgcggcgaaagagtcaaaaacaaattgatagattccgacttaaacaaaaaggatttcaaaaggcataaactttccttccaaatttaaaactaacagtatccatcaatcatgccttcaaaagagtttatcacagttacatcaatggtcccaaaaagactcaactctatctagcctagtaccccaagggtgcaaaagctaagctagctgcgaggagtcctaccatcaccgacgtctaactctatcccggacacctagtgagcgaacgaggcaacactcgactcgggggaaggtggtctccctgagccagcagtgtccacactagaggcaggctcctctcgtccctcgatgtcaacgtcctcgttggcctccatatcctggatctcctggtgatgcatatccaagtgctcattagcctcagcaagctgctgctgagtgttaatgagctgatcctcgagaacctcgatggtgttctccctggtacccactaattcctccagctcttggatctcattggatagctgctccacctgcaagtccttttccaccatctcagtggacaaatcaaccacgagctcctctctgttgtccagggtgatctttgttgcctccaacaatgccatcagatgggacatcgcctcaccacgcatcacttgcaaacggtacagggcattcatgcaccgtacagtcaagtgcgcagtctgacctgggtagatggcccagatgtccttggcatgctccacccgatccttccacattgggtcgtcctccctttcggcggggaacaagccaatggggtgggtagacaactccaagggatggaatccgcagaaagtggtcaacccgtgcagagcaatcgcctctatcgtgtcctcagcccggtatccaaaagactcagagtccaatgaacaccagcctggctgtaggggatgaggctccagagtcatcctcaccctaccgcggggcactcagtgcttttcgaactgctgcaccgcgtactgaggaggcgtcatgtatccggtcccctgaagtacctcccacaaaatgcggggaaagccctctcgtgcaagcccgtcagtgtgggacagtgcatttccgtcgtctgaggatccgtgggaagccatctgtgtacggttaagcgtaagtaaaagaaaagaattataaaaagaacaagaaaaataatactcagcctttctctagttaaataaaatggtactggggaacttagttggttatcatcttgtttttaagtctttactcaaatatccatttgtttaatttaagaatgcatgcatgctcgtcctgaacgacctcaccaatgtaaaggggatagggaagaactcccatcctttaaggtggcctgtagggcctaatcacttagccacctagctacccttctatcatcctaaggcttcacgtcctaggtctatcctgctcgtcctactatctatccaacattgtttctatcaagttttactttggaaaaagatggtttttgtattttattgattcctctatggtggtacaagctccgataccagctgtggcggaactgcccgaattattccaacttaagtgcctaagccccgccttagaggctagatcacacttaaatgggaataacccgtcaatccctcggatctagtccgacacggccactgacaggatcaagtaccataatctcactcgatggtgagtcacagagcaaatacaataaagcataaaaccatgcatgtaagagtattaaaattattacatcaccatcggagttttgcaaaagtagtcatcaatgttcgaagtgcagcggaataaaactaacggtaaataaacagagagatggggaagcctgtcccatcactcctcatgctcctcctcagccgaggtagggtcccactcgacagtccaacccgatggcaagatggacgaccaagtcactccagcaaccatgtcctccagagaacctgtaaaattatgccacaagcaaggctgagtatactaatactcagctagacttacccggtgtgaggagtctactcctctacctctagacatgcagttgtttggctgtggggtttggttgccaaaagcactagctgagtttctaaatcaagtttttaaccttatcaatttaagtgtgactctcttaaggctaaaggtgtactatctactcatacatggtagcaaacatttttagcaatcaacatttttgtatcatctcatcacaattccacttgttactcaatgtagcagcatggatcaagcagtctcattagctgcgagaagcagacgattcgaatcgagtttttaaaccttgcaaggtaaacctaaacacacgacatgtaggggcacttcgtccccacacacatcaaccgtccccatcgattccccgtcagcagatcagggctcactgccttggcgtacaatgcctcactgaccctgactgccgtcgtgcagtgaccgcacttgtacccaccataaccggaatgggagaccacgtctcaggtcgcgtgaggggcaaaatctactgccaggttcaatcaggtactaggcttaccgatttaccatatttctcggtatgtgtttagtacgttcaaacgcttgactcacagtaccacaccttaatccttattcaaattttcatcccatggacaaccaatccccatggattgttgcccacaaaccaacatcaatatgataagaaagtggatacagccaattcctgacctcgcgcgagtactagaaaaatcactcgacttctaccgagatcctaattaataaagcagctactcgacttagcatactagtattcatctcaatggggttcctgagatcatgcaactagggtttcaaacaactcctacacttaagtgcacaatcaatcctacaatcattaagtatagtaaaatagcataaataacaggttatgcataaaaccggggcttgccttccaaagcagtggcaggcaggtcctctggtgcaggctctggtgctggatctggggctacctcctgagcagctccttgctccggcacgaggacgtactctcagtcagcaaggttacagtctatcgaaatgcaataaacatgtatgtcatgattatgcaggatttaataacattatgctaagagaagaaaaactaagttaatgagtaacttagggtttccgggtcatatgtggcttttaatggttgatgcttatcacttctaggtttaggttttgctagagataggcatagggaatttgtattgcctctatatatttcagtggacaagttaataagggttttaggatgacactagttcctcttattcatttttccctttcttatttcctatttagggtttctagtgtagttttgaactacaacagtggtctaatattttccaaaaattctgtaaaaattatagtgggttgccaaggttcattatagcctattctaggaatttggggtttaaaatagaaaggctatgcgttagacaaaaatgacaaaagttgtgtaaaatgggccactttgcactacacctctcaattagggttgggttctgccctaagggttatttttgttggcatttaacagtaataataggcttctatgcaaaaaatcaaagaaagttaagggatggtcatttagttgtgattttctaaagttaaatgccaaaaaggcactttctactacatggttatttgaaaaatatcaaacagcagatttcatatttttcctaagcttttaataacaaaatattaattatcccaagggttggggtgttttcaccttgggtttatttttgtagggtttttctaagttttccttgttttcttaaaataaaagggatcctacttattttgtactaaaccagggtataatagatttttctagtaaactacattgaataagtactctaacaaaaataggggtgccctctggttcattatttaattcaccttttctatttttccaaaccttaagcattttgtaaattaaatggcaaaaactagcttaatgggttggacagagaagtttagcatttttaaacaggtcagtaggtggatataaacttctccaaatttttctaaccctagccaaatagtgcaactatttttatccctattatttagcttttggtcaaaacaataattaaatcagaaccctaaagttttctgtattatatagaggttttatatttttcctaagtagtttacattatttagagtctgacaaaattggtttgaccaaatttggatgaactaaacagaagttatgatttattaaagtttctgttcaaatttaaaatcagattaataaaggtttcctggaaaagcagttcacaccgaggaccctcgggtatttccaaactaactctctcagttatacccccgcgctactattcatttgagtctctgacatttcacaaaacccccagacttctttccttctcccccgcggtccttccctaggtttaaacagtacccgtaagaaagaaaagggtggcgcggcttaccggcggtgagataggtccggcgaggggcggggttggctcggggaggctctggcggtcacagcgatgtacggctcgacggcggggacggccggaatcgctcggtccacgtgcgcaggcgggtgtcttcgtcggcggcgggtgtgccggccaaatcacggcgatctggttcaatccaagggtacggtgagcttcacggggtgacgtagagaccgtgtgcacaaggaatcggaaaatggttcagtggattacccggtccacgcactccgacggggttgtgaactccggcgaccgtggactagcctctccggcgaagcaggcttcgattcctcgctcggggagcttcactgaggtgtgctcagtcatctccgggggtcggacggggttgggaaaggctgggctggccggtctacggcggcaggggctcgggtggccgcggacgcgccgtgcacgggcaaacgacggtgagctgagctccggtgaggtttgagcatgtgctaaagagtgtggtcgacgcctgagcgggttttataggcgcggatgcgggccatggcgtcggctggccgttggcgcgacgcggggcgcgcgcgggcgtgctctggcgtgcacagagcgcgtcgaacacgtggagcttttcttctgcccgtgttgcacagctcacccaagtcgcaaacgtgcgaatcttggcaaaaatccggcgcgagtcttttcctggcacctagggttgtctctcacccgtgagttgccatggcagatatggcctaggtagggagatcttcggtcgccaaatcaggtatgccactctgcccacctcgcgacaaaaactatgccaaggcatgtcaaacgtcaagatctcaggctcagctttttccagtgggtgccctaggtggtatgccacatttttggtatagaacttaagtggttttggtgccagcttcgaggtgaacacggttgatctttagtgtaggtgtagtttttaacttagagagatgtagagagctctagctctctctctacttagggaatggatttggggtttctccaggggtctttttgcaatatttccttcccacaattgctggttataaggttacttaaagtttggttaaagattactcatggtttgcacatttgctcactttctcccccctcttaaccatggcttgggagatagggttcaagagaggtctagggttttccctcctcttgcccaaggtagtaagtgcacaaaggtttgagtaatacttcttaggtcattagaaatcttggttaacacatggtctccaaggttcttatgttctccttaagttattaccacatgtgatcacagtccttagcaccaaggtgtgctctagccatggtaacacctgaggtgttacataaatacccccaaccacctccactccaaccatccaagcattcatcactctccattcaatacaagagcaaagtgcaacactccaagacacaaatcaaagccaccgatccgatcaaagtccccaattcatttctagtgttttaggacttgtgagaggatcgttcttgtgtttctttgttgctcttgttgcttggttggctttcttctttctctcattcatactctcaaagccttgtgagcgaagcaagagacaccaattgtgtggtggtccttgcggggtctaagtgacccgagaaatcaaggaagaaagctcactcggtctaagtgaccgtttgagagagggaaagggctaaaagagaccaggtctttgtgaccacctcaatggggactaggttctttagaaccgaacctcggtaaaacaaatcaccgtgtcatctgctttattttgtttgatttgttttcccctctctcccggacttggattttattctaacgctaaccccggcttgtagtgtgtttaaagttgtaaattttagtttccgcctatccacccccctctaggcgactttcaattggtatcagagccatgtacttcattagagtctaaccactcgaagtgatgtcgggaggatccgccaagagggagatggaaacggccacaaggcacgggaaggctccaccaagggagcctaacaccaaaggaagggaggaatcacctccccgcgtcaagtcgcatcggagtggcgatatgtcacacccggatttaagggacaaagccgggtgcatctcatacatgtgccaaagaagacaacatatataataacagagtgtatagagataaatgtcacaatataatcagagtatttattacatagcagaagtcttacaaaatataagataaatataacaggatctaaaatctatccttggcgccagaaagctgactgggagacgccacctagatcaagtcgaaagcctcagtgctaggtggctcctcttcgaccacatgttcttctcctgtggggggtgtgagacagcaagagtgagctcacatacgttcatagctcaacaagtcgtggggaataatgtgcatgaactcaccaaaggtgggagttcatgtgaagtgtaaggctgatcaacaaagtaagggctgaagctgagcattgcttttataagttggtcaaaattttattagcaattactaagagtaagtaaataccaaaccttagtaataataaataaagtaatagtaaaataatcccaaatgcgatgcaaatgtcaaattaaatttaagttccataaattaatcatgtgagggtccgagctgctcatgatcgtgagcacggctagtataccagttttacactctgcagaggttgcgcatctttacccacaagtcatgttacccatctgccaagagatggccaatcccatacacctctaccgaggaggcgaggcagggtaacactacgaggcctttacaaagttccactagcttcagaaatcccgctacagtttataggaagctccagtgcaggaatccctcgcctgaccgccatcgcagcaaaatcaacccaaggacctccctacactaaccactcccctacttcccttgcccctttcgggtaaggaagtcatccactagctttcctagttaatcggccaagggcatcccattaaacccttgtggtagcactgttttcccgggtggtcgctccatgttcccattaacataatgatcttgttgggaacttgttctcaaatgctatgaattaagaacaaggcaacacaaaatgttaaatattaacgcccttcgtccttcgaaacattatttcccttaggacataatgatcttcagatgaaggtcatgaaggacataccttcgaacatcgaaggtatgaaggtaacagaaggaaacgaatacaaaagataacataaacagtcgtgtaacattatcaactcatcttcattatattatcatggagaaataaaacaatattgaattacatttgataccttcgacttgatagacagcaaaggtacaagcgtgatgcaaaagcaaatgccaagtcagcgtgaacagtacgggagcactgttcatctatttataggcatgggacgcagcccatgtaaaattacacccatgcccttcatatttgctaatgactctatagtgatccatcgaggtctaaatagccttttcccttttaagtcggttttctttcctgctgtcatgtcgaagctcccttgcgcgtagcttcggcgctacatcaaccttcgtatcctttgtgcttctcctactgtggttctgattcgaatccgaaggtacctgttcatgtattacaactctggaaacattgttaaatcatgtttttgaggaccttcggaagacgaaggcccccaacagtagcccctcgcaaggttaatttgttagaataacaaattcagattgtgatatggacgaaggcctaagctgaaggtccgaaaaaacaccttccctttgctagaatagcaatagttaatgacagacggggccctccaacttggagcgcactaggcgtataaataagaacccaccccgagcacatttgatacgctattctgccacatgctttgcttgctcaattttttagctcttgtctaccaacgcttgcttggttttttagactttctaagtttcggctttaaggacatattttcaccatttccgaagagaagatgtcacaagacaaaaaagttgttgctgagacgaagctgagcgaagaggaaaagctccttgaggagaagactgctggatttattgaatcaatagcaaagacaaatatagaaaagattactaaggagattctagaaggcttatctgaagatactgatgtgacagcgacagttatgatgcggaaagtgggggcgaagactccgaagatcggccctggcgaccaagtcatgcagtttttgggaaatcgactatcagacagagtcatcttgataatatgagaggaaggtattttcgagatatgtctattatgagggctgacaacggagacaggactgttcctgttcccgaagaaaatgaagtcgtgatctaccgaagcttcttcaaagctgggcttcagttccccttaagcagatttgtggttgaagttttaaagatatatcagattttccttcaccagattactttcgaagcaattatcagaatggggatcttcgtctgggccgcgaggagtcaaggtttggagccaagtgcaaaatgtttttgcagcatgcacgaactttcgtatgagacaaagccctggggtaaagaatagtatcataacagttttggttgctatagcttcgttgctcattctggctcaagttgcccagtgccaactttttggaagagctggcccagagactggatgaaagaatggttccatgtgaagaatgatttaaaggcgagagaagacattacagagatcatcatgcgccccatttggtcccgcttcggccttcgaaaaccaaaggtagaaattgatgaagcagccgaaggatgccaaagggccttcggcacagtttgctctttcatcgggacaagggatttagtccaagaacatgtggcctacaggatatggccattgatagacaactgggagatgccaaaagagaccatcagcaaccctagcgaaggtggtttggttcgattgaaatatacctttaggtttagagaccaatttatcgaaccagacgatgactggctgaaatgtgttgaaaatactagtgatgaactacttggagcatactccaagtctgaagataatgcattatctgcggccttcgggagccgaaaaaagaaaagactaaatagggtttttgacgctattggatttgtgtaccctgactatcggtacccaccgtgggggcagaaaagaaagggtgcaacttctgggaaggatgttgcttcagttgctccaagcgagcctgcgccgaagaggaaaaaggtgaagagtcttactcaccgaccgtgctacattgaaccgaccacagtgcctgagtttggcggtgagacctctttggctattgaagccaaaggacctgctcttacgcagaggattgaagagccggctgcaatgccgaaggctgacaaaattgaagaactgagaaccgaggagacgaaaatatcagaagttctaagcccttcggtaggagtggaggcgccgaagacacaaaaagatctggcagcaacccccaagagaaaaaggatggctagtgtattagatgtgctggagacgataaaaacttcaagctctactccaagaaaaattgccagggcttcgaaaacacagattgaaaccgagacaaagccgaccgaagccgaagctttaatgagctgggccaatgccgaagttgggccttcagagcctaccaaggagaaatcctcgaaaattggagaaaaggcagcggaggaagaagctatagaatagattttgcctgaaaaagttgtcgctccttctcccgaagctttgaaagaaaatattgaatatattattcgtcatgcttcgggaaaaaagctttctaaagaagaagaacgagaagctcaatactatgcccagaagctgaaatatccaaagggggcattagtattcaacggcagcggagaagaggatttcttgtattgtctcctagacagcaaggagatttctgtctgccgggagatgagcagaagctttggattcccgacattagaagacgggctttcagtactgtcaaaagatgaattggccgacagtttagcatataatactataaaggtgtgaaaatcaattttttgtacttaaaaacgaatttttttcatttgcttatactcaatattgtacttcttttgcagggcctgatccttagcaatgccctcagggcgcagaaaaatactgaagacgaaggatgcactatagctctgaacaaccttcgttcagaagtaattgaactaaagaacgaaggccttgaaaaagataaaatattaatttcattggtgagcaaaataaaagaagacgaagctacttccaaagcccaagctgaagcccagaaatgtgaaattgaagaccttcggaaacagctggctgaagccaaattaaaatgcgctgttgctgaagctgaacgagatgccagtgaatactggaaaaattattgggaaaaacagctgcagaactttgctcatcaaaagaaagatgttttgaaaaatctgtagaatgcgtgaaaaagaaaaaaaactagcttcgccaacgttggcgcatattccagcgaagataacttcatacggggcgaccccgaaggtccagttgagtggatcagcagcgaagccgaagcttttgaagaaattttgagcgaccgcggggacgtctgtgtcgtctctggtgcgagaggagttgcgactattttggagaaagcagggtgcgaacatgtgaaaattttggcccaagccgaagctgctttctctgttgacgatacgaaggacccctcggccgaagcgagcttaattggcagaaactttttcactaatatctgggaaaatgacggccgagggatggcccacgaaataataaagaagagcgaaaaagacactcatgacgctagagaagcaacgaaagcagctgaaaaaactgcggaactcgaaaggcggataggtattacttaatagcttttaactttgttgtttatttttgtgacttcgaactgatttacgttttctaccgtagctgaactatctcttcccccagagcccttcgagtcactggccgacccagaggcaaaggaatcaaaagaaattattagtatggctgaaactattatggacgaagtcgttacccaactgctaaccgaagctgcagataaagttttgaaagaagaagaatagctattataaaaacattgctagaatattaatgtaacatttgttggactatgcttgtaatatttggtgctcatgggttttgaatgtaatatataaatggctttgtaattcatttctttgcgatgcatgaaacttttatgtacataccgtttttgagccttcggcgaaaaaacaccttcccttcttttcatgcttcgtaaagaagagcttttatgcttcgtaaaaaatcctccaatcgtggcaaaacattaatgcttcgtcaataataggttttttcctcctcatcagagtgcttcgtaaaaaatcctccaggcgtcgccaaaacattaatgcttcgtcaacaatggattttttcctccacatcagagctgatgaaactgtatatcttcaaaacttattttgtgccttagcacaatttcacttttttgaagcattctccgaaggtcaatattgtgtccccttcttgtgccattgatgcaatatgatgtatgatgttatgttatgcgaaatgttgtgatgatgttatgttatgcaaaatgatgtttgtgccgaagacacacattcacatccccatagtggaatacacaatctctttgccgtttatttttcgacttcaccgcttatttttcggtgtatcatcgctgacttttcgctgtaagttctgcattcccttaggaacgtcttttgaacttcttcgccttctatttcggcggtattcgcgttgacttttcgcgcttcgccttatatttcggcggtatttagctctgcattccctttggaacgacttttgagcagaaaacttacattgcgctcccttaggaacgactttttgtagcttcggcaaacttacgctgcgttccttagaacgactttttgtagcttgggcaaacttacgttgcgttccttagaacgactttttgtagcttcggtgatttcatgagtctgtggagaagatatatttaactatggcaagaacgaagctattacaggaaattgaaaacgacaaaagaactaggttttcaataattgttccttattaaaaaagaaaatgacaacgaatgtaaaaactgtttcaagagtaggatatctcttagtagatatgcttcgattttggcatagtactgttgactgtgcgagcttcggactcctccctgaaatctcgctgctgatgggtctattgactcccttctggctactggcctcgtgaatatgcaggttgtagtggtggcggaggtggaggctgtggccaggatgcctatggctgactaaccgaagcaacagacactgcaggatggttacccacatactcgggtatgtagggtgagtgatacgaagcagtatgcatgacctgcttcggctggttctgctgagctacggtttttgctatttccttttgtttctgaatggtgacatggcacatccttgtagtatggcccttgtcctcaccacagaataagcaataaattttcctaggtcgatccccaaaccttcctccgaagcccctggcgcctctgcctcttggagttggcggccgaagatagctttgttgctgccctgaagcttgcgaggaatattgtggcctctgttgttgacttcctctgtcgtcactctgggtggagtggattgacctgacatgccttgggtggattctccctccaaagcccctggtcatcttagagaacctgtaggcttcctcccttctttgaggaaagtcattgtcagcgtggatgtattcatccatcttttgaagctgcttatccaaagtctatggaggctttctagcaaaatactgtgcagtaggtcctggacgaagccccttgatcatggcctcaatgacaatttcattgggcactgtaggcgcttgtgctctcagatgcaagaaccttcggacatatgcctcgagattttcctcatgatcttgcgtgcattgaaacagagcctgagctgtgactggcttcgtctgaaagccctgaaaacttgtcaccagcatgtctttgagcttctaccatgaagtgatagtccctggccgaagagaagaataccatgtttgagccacattcttaactgtcatgataaaggacttggccatgacagctgcattgcctccgtatgaagatatagttgcttcataactcatcaaaaactgcttcgggtctgaatgcccatcatacattggaagctgaggtggcttgtatgatgggggccacgggatagcctgcagttctgctgccaagggagaagcatcgccaaaagtaaaggtatcatgattaaaatcatcataccatccatcgtcgttgaacaagccctcttgatgaagctccctgtgttggggccttcgatcttgctcgtcttgagcaaggtgacgcacttcttcagtggcttcgtcaatctgcctttgaaggtcagctagccgggccattttctccttcttcttttgcacttgttgatgaagcatctccatgtttctgatttcttggtccaactcatcctcctagggtgttggactagtggccttcttcttttggcttcaggcctctcgaagagaaagggtctcttgatttgggtccagtggctgcagggcggcagcccctagcgctaaaactttcttcggtggcatgacgaaggtcgatgcttgccgaaggtggtcgaaaagagttcaccggaggtgggcgccaatgttggggacttgttctcaaatgctatgaattaagaacaaggcaacacaaaatgttaaatattaacgcccttcattcttcgaaacattatttcccttaggacataatgatcttcagacgaaggtcatgaaggacataccttcgaacatcgaaggtatgaaggtaacagaaggaaacaaatacaaaagataacataaacagtcgtgtaacattatcaactcatcttcattatattatcatggagaaataaaacagtactgaattacatttgataccttcgacttgatagacagcaaaggtacaagcgtgatgcaaaagcaaatgccaagtcagcgtgaacagtacgggagcactgttctttatatttgctaatgaccctataatgatccatcgaggtctaaatagccttttcccttttaagtcggtttcctttcctgctgtcatgtcgaagctcccttgcgctagcttcggcgctgcatcaaccttcgtatcatttgtgcttctcctactgtggttctgattcgaattcgaaggtacctgttcatgtattacaactccggaaacattgttaaatcatgtttttgaggaccttcggaagacgaaggcccccaacagatcttaacatgaacaataataataaacagataataaagatgaaatcatgaatagtgtatctccatacccaaaaccacaataagcaatagcaagtactacccaaaaatattcagtggcaacaaggtataaagatagccaaaactggggtaacctattgaatcccatcaaaattaccctatgcagatcattataagtaataagaacatggctaggaaaaagtaagtgatcaagggcacaacttgccttcaatgagctcctgctcagctatacctgctgaacctcaggatccacagtggcttgctcatctactcgcatcaacacaatacatacatagtatagcaaaaattaacattgcaccaaacatgtgaataaaatacacaataaaaatctacacattataataaggacctaggaacaggaatcattaattttggagttatagattttgaattattaatttccaatggtttaatgtgcttgaaaaggaattacacgagaaattaattttcttactgttttcatgccaaaacagagactctaggtgatagatattaaatttacaaaattctagaaattggaatggatcaatttggactaaaaatgaattttctatgcattttacaagtttctagatttgtttttgtattaaaaacgaatttctataattatttctctatttttaatcatctctggactgggcatcaattttcagaaaggccagggatctcggggctaaaaatactaagacacagggcacagggggatggaccgcgagttgatacccaacttctgtggggtctcttatgcaaaacgctatcgtgaaggggtatccgtagatgtgggtcgttggattagatccggacggtgcagatgattctatcatcatacagaacccgcatgttacgctagccgttggatcggtgatctgcggccccgatttaaaatacccaagctagatcctacgcgtccgatcatgatccgacgcccccgagtctccctagccgaatcgttacggtgaaagtaatcacagccgcccatcacagatcctacggtgcccgacaaacacaccatctaacccaaccagtcggcggcgcaccagacggaacccggtggcgccatcaccggcgagcgcgcgattcaagcccccagcgcatgattcccaaatcaaactaatgctacacgatgtaggtgcatgggcgaatcggtatgtggacttcttaccgacgacggtgaagcagggacacttggccacggcgcaaagcggtcccgcggcggagatcgaactacggcgagcaatccaagtcgctccgaggctccgcagttcgaattgaggactctagcagcttcacggtttcccggcgaacgcacctgaccacacgtacggatacgcgcgctagtgcgtaagggaatcaccggcggcggcactattccgagcggacgcggcgaaggtttgtggcggtggcggtgtgctcaggggaaaggttcgtgcgagaggttagggaggaacgggtcacggggttgctaaataaggcccgagtggtggccgatagctccgggagatgggcgcgagctggtcaatcccggggagtcgcggcgggcattctgttgcgccatcgagcggagtccacagaggtagttgctgacttgcgggccccgtgtgacagccagtggcgcaaggcacggggatgagtcacagacccgtgggtccggcaagtcattgactgcgagagcgacgttagcgtgggggagacggtggctgacgtgcggggctaggtagtcggcgcccggtggtgacgggactttgcggacgacttcccctagtgggccaaaacatggtaagccggcccaagtgaggttttatcccttttttcttatttttttccttatttcaaatttcaatttgaattcaaatgttgttgtgaagttcatgcttaggtgaattgctcaaattcaagcaccatcatgaacaggtgcatttaattatatatatatattccttatatttgtatagtatttctctcttctcactctaattttaaccctaagtctaaattggggttgattctacattccaagtcattcttttgtttccactattattgttattgttatctaaatgcacaagcatacaaaaatatccaacatgatgcatattctctttttttatcatttattttaattaataacccttaattatatatatgctctttttatgatgcaaataaggcacataaaatgaagaatttactatccaatccttttattcaattttgagtattacaaatcctaccccccttaaaaagaatctcgtcctcgagatttaagaagctctaggaaaaaaatggggaaaatctatgtgaagctcttattctctttcccaagtagcttcatcttcaccgtggtggctccattgcactttgcacatctttataaccttattcctcgtgacacgagtcagtgtatcaataatcttgatgtggtactcagcataagtcaggtcatcttgaacactaaggtcctccattggtaactgctcttcaggtaccctaagacatttcttcagctgagatacatgaaagacatcatgaacatccgcaagatgatccggtaactccaattgatatgccacctctcccactcgctttaagattaagaagggtccaataaagcaaggggacaactttcccttgactttaaatcttctcatacccctgagtggtgacaccttcaaatacacataatctccctccttaaactcgagcagtcttctccgggtatcagcatagcttttctgccttgactgtgcagttctcaaattctcccttatttgatggacatttctgcttcttgtataatctcaataccaaacaactgcctttcaccagtttgatcccaatacagtggagtcctgcactttctgccatacaaagcctcaaacggtgacatcttcaaactggcctggtagctattattataggagaactccgcataaggcaaactcttatcccaacttccaccatgtttaagagcacaagctcttaacatattctctagtacttggttggtcctctcagtcttcccatcagtctgggggatggtaagccgaactaaaattcaatcttgtatccaaggactcgtgcaacttcttccaataccgagaggtaaactgtgatccccggtctgacacaatcttctttggtacaccatgtaagcagacaatctgtgccatgtacaactctgccaacttggctcctgaatacgtggtcttcactggaattaagtgggctactttagttagcctgtccacaatcacccatatagaatcatatcctttcgaggtgcgaggcaatccagtaatgaagtccatatcaatctcttctcacttccacttgggtatctttagtggatgtagtagtccagctggcctctggtgtttagccttaactctttgacacacatcgcacatagccacatgtgcagccacatctctcttcaatccataccaccagtatttctgcttcaaatcctgttacatcttggtactcccaggatgaatagaataatccgagtcatgggtctcttttaaaatagtctcacgaaggctttcaatatcagggacacatatcctgtccttgaaccatatggtgccttgctcatcttctgtaaactctggacctctaccttccgtaataagatccttaatttcttgtatcttagcatcaccaatttgtcctttgtggatttcttgctccaaggtaggttacacatcaatagtaactccttcaatgtgagtaactatccccaggttaagtctcctgaaatcctcaacaatctcatcgggtagctgggcaacaacagctgaatgaacatgctcctttcgactcaaggcatctgcaaccaaatttgccttgcccgggtgatagtgaatctccaaatcataatccttaataagctccaaccaatggcgttgcctaaggttgagatccttctgagtgaatatatacttcaaactcttatgatctgtgtatacttggcacttagttcccatattgtagtgtctccaaatcttaagtgcatgcataacgactgccagttctaagtcatgagtggggtggttcaattcatgtttccgcaactgacgagacgcataggcgatcacatgtccttcttgcatgagcacacatcccaatccttggccacatgcattacaataaatgtcaaatctgaaagggaaataggcttacaccttttcataattgattttggtggttgaattgcccaacacaaataattggactaactagtttgctctagattataagttttacaggtgccaaaggttcacaacaaaccaataaaaagaccaagaaagggttcaaataaagagagcaaaagacaacccaaaggcagccctggtctggcgcacaggacagtgtccggtgcaccagggagttcaactctgaacttgccaccttcgggaattcaggaggccgctccgctataattcaccggactgtccggtgtagcaagggactgtccggtgcaccaagcggagcaacggctccaagtgccaacggtcgtctgcaacggtacaggaacagtgaacagtgttaactgcacacgcagaagtcaaagcaggcgtcagaaggcgcaccggacagtgaacagtgactgtccggtgcaccaccagaaagtccggtggccccacttgtcagagctccaacggtcggaacccaacggcctggtgacgtggctggcgcaccggacagtgtccggtggcgcaccggactgtccggtgcgccatacgacagcagcctccaccaacggttcttttggtggttggggctataaataccccccaaccaccacacttcaatgcatccaagtttttagccttcaaacctcatacaagagctctagacttcattctaagacacaatcaaagagatcaaatcctctcccaagtccggaatcactccaaagaaattagtgactagagagagagacatttgtgttcatttgagctcttgcgcttggattgcttttattcttccttctttcttgtgttcaactcacttgtaatcaaaacaagagacaccaagttgtggtggtccttgtagtggacttagtgtcccatttgattgaagagaaaggctcactcggtctaagtgatcgtttgagagagggaaagggttgaaagagacccggtctttgtgaccacctcaacggagagtaggtttgcaagaaccaaacctcggtaaaataaatcaccgtgtcatcggctcttattcgcttgtgatttgttttcgccctctctttcggactcgtttatatttctaacgctaacttcggcttgtagttgtgtttaagtttgtaaatttcagattttcctattcaccccccccccctctaggcgactttcaattggtattagagcctggtacttcattaagagcctaaccacgcgaagtgatgtcgggagcatccgccatgagggagatcgggaccggcaacaagtccgcaagctcggcgagaacacactcaagggagtccgcccacaagcacaaggaggaatcctcttcctccatcaaatcccaacggaagggtgacaagaagaagaagatgaagaaggtggtctactacgagaccgactcttcgtcaccctccacctccagctcggaatcggcatccgccacttctaaacgccatgagcgcaagaagtatagtaagatacctcttcgctaccctcgtatttcaaaacccactcctttactttccgtcccattaggcaaaccacctatgtttgaaggtgaagattattctatgtggagtgataaaatgaggcatcacctaacctcactccacaaaagtatatgggacattgttgagtatggagcgcaggtaccgaagaagggggacaaggattatgattcaaaggaggtcgaacaaatccaacacttcaactcccaagccactactatactcctcgcctctctaagtcgagaggagtataataaggtgcaagggttgaagagtgccaaagagatttgggacgtgctcaagaccgcgcacgaaggagatgaggtgaccaagatcaccaagcgggaaacgatcgagggggagctcggtcgattcatgcttcaccaagaggaggagccacaagcgatgtacaaccggttcaagaccttggtaaaccaagtgcgcaacctcgggagcaccaaatgggatgaccatgagatggtcaaggttattcttagatcactcgtttttcttaaccctacacaagttcaattaattcgtggtgatccaaggtataaactaatgtctcccgaggaagtgatacaaaaatttgtgagctttgaattgatgatcaaaggctccaagaaaatcatcgagcaaggcgctacctcaacactcgaggtgcaatccgtcgcattcaaggcgaaggaagaagaaaagaaggattctacaccaagtaggattcccatcgacgcctccaagctcgacaacgaggaaatggcgctcatcatcaagagcttccgccaaatcctcaagcataggagggggaaggattacaaaccccgctccaagaaggtttgctacaaatgtggttagcccggtcattttatcgctagatgtcctttgtctagtgatagtgacaggggcgacgacaagaagggaaagagaagagaaaagaagaggtactacaagaagaagggcggcgatgctcatgtttgccaggagtgggactccgacgagagctccaccgactcctcctccgacgaggacgctgcaaacatcaccgtcaccaaaggccttctctttcccaacgtcggccacaagtgcctcatggcaaaggacggcaagaagaagaaggtaaaatctagatcctccactaaatatgcaacatctagtgatgaagctagttctagtgatgatgaggatgatttacttaccctttttgccaacttaaacatgcaataaaaagaaaagttgaatgaattgattagtgctattcatgagaaggatgaacttttggatagccaagaggacttccttattaagaaaaacaaaaaacatgttaaggttaaaaatgcttatgctctagaggtacaaaaatgtaaaaattaactagtgagctaagcacttgccatgacactatttctagccttagaaatgaaaatgccaaattaattgctaaggttgagaaatcaaatgtttgtgatgattcaattgttaatcttagaaatgataatgctagtttaatcactaagattgacaaattgaatgtatctctttctagccttaagattgaaaatgaaaaattaattgctaaggctaaagatttaaatgtttgcaatgatgctatttccaatcttagaaatgagaatactattttacatgctaagattgttgaactaaaatattgcaaaccctctacatctaccgttgagcatgtttctatttgcactagatgtagagatgttaatgtagatactattcatgatcaccttgctttaatcaaacaacaaaatgatcatatagctacattaactgctaaaatcaatgagcatgacttagaaattgaaaattttaaatttgctagaagcatgctctataatgggagacgccctggcattaaggatggcattggcttccaacagggagacaatgtcaagcttagtgcccctcctaaaagattgtctaactttgttaagggcaaagctcccatagctcaggataatgagggttacattttataccctgccggttatcccgagcacaaaattaggagaattcactctaggaagtctcactctggctctcatcatgcttttatgtataagagtgaggcatctagttctaggcaatcaactcatgctaaattgcctaagaagaaaactcctattgcatcaaatgaacctaatgtttcatttaaaactattgatgcttcttatgtgctcactaacaaatcaggcaaaatagttgccaaatatgttgggggcaaacacaaggggtcaaagacttgtgtttgggtacccaaggtgcttgtttctaatgtgaaaggacccaagactgtttgggtacctaagaacaaggcctaaaattgttttgtaggtttattcatccgggggctcaagttggattattgatagtgggtgcacaaaccacatgacaggggagaaaaggatgttctcctcctacgagaaaaaccatgatccccaaagagctatcacattcgaggatggaaatcaaggtttggtcaaaggacttggtaaaattgctatatcacctgaccattctatttccaatgtttttcttgtagattctttagattacaatttgctttctgtttctcaattatgcaaaatgggctataattgtctttttacggatataggtgttactgtctttagaagaagtgatgattcagtagcatttaagggagtgttagagggtcagctatacttagtagattttgatagagctgaactcgacacttgcttaattgctaagactaacatgggttggctctggcaccgccgactagcccatgttgggatgaagaatcttcataagcttctaaaggaagaacacattttgggactaacaaatgttcattttgagaaagacagggtttgtagcgcatgtcaagcagggaagcaagttggtgttcatcatccacacaagaacaccatgacgactgacaggccgcttgagctactccacatggacctattcgacccgatagcttacataagcatcggtgggagtaagtactgtctagttattgtggatgattattctcgcttcacttgggtgttctttttacaggataaatctcaaacccaagagaccttaaagggattcttgagacgagctcaaaatgagttcggcttaaggatcaaaaagattagaagcgacaacgggacggagttcaagaactcacaaatagaaggcttccttgaggatgagggcatcaagcatgagttctcttctccctacacgccacaacaaaatggtgtagtggagaggaagaatagaactctgcttgacatggcgaggaccatgcttgatgaatacaagacttcggaccggttttgggcggaagcaatcaacaccgcttgcttcgccatcaaccgtctctaccttcaccgaatcctcaagaagacatcgtatgaactcctcaccggtaaaaacccaatgtttcatattttagagtctttggtagcaaatgctttattcttgttaaaagaggtagaaaatctaaattttctcccaagcctgtagaaggctttttactaggatatgattcaaacacaagggcatatagagtctttaacaagtccactggactagttgaagtttcttgtgacattgtgtttgatgagactaacggctctcaagtagagcaagttgatcttgatgagctagatgatgaagaggctctgtgcgtcgcgctaaggaacatgtccattggggatgtatgtcctaaggaatccgaagagcctccataagcacaagatcaaccatcttcctccatacaagcatatccaccaactcaagatcaggatcaagatcaagaagatgaaaatgaagatcaagaagatgagccacctcaagaggagggcaatgatcaagggggagatgccaatgatcaagacaaggaagatgacgacggtccaagaccgccacacccaagagtccaccaagcaatacaatgagatcaccccatgaactccatcctcggcgatattcataagggggtaaccactcgatctcgtgttgctcatttttgtgaacattactcctttgtgtcttctattgagccatacagggtggaaggcgcattaagggattcggattgggtgttggcaatgcaagaggaactcaacaacttcacgaggaatgaggtttggcatcttgttccacgtcctaaccaaaatgttgtaggaaccaagtgggtcttccgcaacaagcaagatgagcatggtgtggtgacaaggaacaaagcctgacttgtggccaaaggatattcacaagtcgaaggtttggatttcggtgaaacctatgcactcgtagctaggcttgagtcaattcgtatattacttgcctatgctacttaccatggctttaagctttaccaaatggacgtgaaaagtgccttcctcaatggaccaatcaaggaggaggtctatgttgagcaacctcccgactttgaagatagtgagtaccctaaccatgtttataaactctctaaggcgctttatgggctcaagcaagccccaagagcatggtatgaatgcctaagagattttcttatctctaatggcttcaaagtcggaaaagccgatcctactctattcactaaaactattgcaaatgatttgtttgtatgccaaatttatgttgatgatatcatatttgggtctactaacaaatctacttgtgaagaatttagtaggatcatgattcaaaaattcgagatgtctatgatgggggagttgaagtattttctaggatttcaagtcaagcaactctaagagggcaccttcattagccaaacgaagtacattcaagacatactcaccaagtttgggatgaaggatgccaagcccatcaagactcccatgggaactaatgggcatctcgacctcgacacgggaggtaaatccgtagatcaaaaggtataccgatcgatgataggttctatactctatttatgcgcttctcgaccggatataatactttccgtatgcatgtgtgcaagattccaagtcgatcctaaggaagttcaccttagggccgtaaaacgaatcttgagatatttagtttatactcctaagtttggcctttggtaccccaggggatccacttttgacttaattggatattcatatgctgattgggcaagatgtaagattgatagaaagagcacatcagggacttgccagttcttgggaagatctctggtgtcttgggcttcaaagaagcaaaattctgtagctctttctaccgccgaagccgagtacattgtcgtaggccattgttgcgcgcaattactttggatgaggcaaacccttagagactatggttacaaattaaccaaagttcctcttctatgtgataatgagagtgcaatccgcatggcggataatcccgttgagcatagccgcactaaacacatagccattcggtatcactttttaagggatcaccaacaaaagggggatatcgagattgcttatattaacactaaagaacaattagccgatatctttaccaagccactagatgagaaaacatttaccaaacttaggcatgagctaaatattcttgattctaggaattttgattgatgttttgcacacatagctcatttctatacctttgatcatctctctttcatgtgttatgactaatgtgttttcaagtgcatttcatgctaagtcatagattgaaagggaaatggagtcttcggcgtagacaaggcttccactccactccatcgatttattcatccttcgtcgtcgctccataccccctcttcactttggtataatccttcactcctattttgtttgccaaagggagagaaagtaacaaagggcttatatttcactcacaagtatctgtttttggtgattcatgccaaagggggagaaagtattagcccaaagcaaaaggaccgcaccaccaccaatttcaaaaatttagtctttcaatttgtatttaaagtagtgttttcaaattggtatcttatttttgatataatttcaaattggtataccctcttcaaaattaatatctaaaaccctcttgaacactaagaggaggatttcattaagggggagttttgtttagtcaaaggaaaagcatttgaaacagggggagaaaatttcaaatcttgaaaatgcttctcaaaatcttattcatttacctttgactatttgcaaaagacgttgaaaaagaatttccaaaacatttgcaaaaacaaaacaagtggtgcaagtgtggtccaaaatacttaaagccatccatcatatctagtagaaataattattggtttcattccaagcaacctttgcacttacattatgcaaactagttcaattctgcacttatatatttgctttggtttgtgttggcatcaatcacaaaaaagggggagattgaaacggaaataggcttacaccttttcctaattgattttggtgtttgaattgcccaacacaaataattggactaactagtgtgctctagattataagttttacaggtgccaaaggttcacaacaaaccaataaaaagaccaagaaagggttcaaataaacagagcaaaagacaacccaaaggcagccctggtctggcgcaccggattgtccggtgtgccaccggacagtgtccggtgcaccagggagttcaactctgaacttgccaccttcgggaattcaggaggccgcttcgctataattacaggactgtccagtgcaccaagcgaagcaacggctccaagcgccaacggtcgtctgcaacggtacaggaacagtgaacagtgttcactgcgcgcacagaagtcagagcaggcatcagaaggcacacaggacagtgaacagtgactgtccggtgcaccaccggactgtccggtggccccacttgtcagagctccaacggtcggaacccaacggcctggtgacgtggctggcgcactgaacagtgtccggtggcgcaccggactgtccggtgcgccatacgacagcagcctccaccaacggttcttttggtggttggggctataaatacccccaaccaccacacttcaatgcatccaagttttcagccttcaaacctcatacaagagctctagacttcattcaaagacacaatcaaagagatcaaatcctctcccaagtccggaatcactccaaagaaattagtgactagagagagagacatttgtgttcatttgagctcttgcgcttggattgcttttcttcttccttctttcttgtgttcaactcacttgtaatcaaaacaagagacaccaagttgtggtggtccttgtagtggacttagtgtcccatttgattgaagagaaaggctcactcggtctaagtgatcgtttgagagagggaaagggttgaaagagacccggtctttgtgaccacctcaacggggagtaggtttgcaagaaccgaacctcggtaaaacaaatcaccgtgtcatcggctcttatcgcttgtgatttgttttcgccctctctttcggactcgtttatatttctaacgctaacttcggcttgtagttgtgtttaagtttgtaaatttcagatttgcctattcacccccccctctaggcgactttcaaaatcccttctgtagatctggcataatcaacactggtggtgacatcaatctcttcttcaattgatcaaagttgtcttggcatttctcatcccacttgaactctcttcccttctctagaagcgaggtcatgggcttagcaatcttagaaaaatcttcaataaatctccgataatatcctgcaagccccaagaaactctgaatctcaataactgtagtggttgtgctccacgccactatctccttgactttagcaggatccactgatatcccttcactagaaaagatatgtccaaggaatggcacctcgccaatccaaaactcacatttgctatacttggcatagagttgattatcccttagcttttgtagcaccagccttagatgttcttcatgatcactttcactcttagaatagataagaatatcatcgatgaacaccacgacgaatctgtccaaatactctataaacaccttattcatcaaattcataaaataagctggtgcattagttaatccaaacgacataacagtgaactcatataatccatatcgggttgagaaagccgtcttaggaatatccgatggtctaatcttcatttgatggtatcccgatcggagatcaatcttcaagaataccctagcacctctcatctgatcaaataaatcctcaatacggggtaatggatacttgttcttcatagtgacaccattaagggacctttaatccacgcacatcccttgcaatccattttcttctgtacaaacaaaactgatgctctccaaggtgaagactcggatgaatgtacctagcctcttgcaactccgttaagtgcttcttttaactcttctacagacatccttatatgtccatttagaaataggagcagttctaggtaagagatctatgacaaactcaacttctgtatctggtggcatccctggtaactcctctggaaagacatcttaaccacacggatgttgtcaccaacaaacttcccatcgactaagaatgccgctagttggtggcggtagttactgcaattccaacttcaaatctttctcctttgtaactggtgagttctatggttcctttagcacagtgtataaattgcctttacctttcttaaccacgacataccaaggatcacatctatagtgttctcttctaacactataggggtagcccatctgggttagaaacacagggggacgaaagaaaggattgtagacaaggcagtgattacgaagcatgttactttgagggatttattagctaagtgtgtcacctactaaagctaattcattaccttatggtggtacatgctaagatgctcgtctatactattttaatcaatcaaagaagcaaatcaggcattgatcatcagaacaatcaaccaacatttttaatagagaaaataattttaatttttgtcttaggtctcctatctcttaaaaagatcataaatgtaggattccaaggtgagaaatccatcttgtctcagagtagaaaaggtaagaatcatcagagtagaacagtagaaggtgagacaggatcaagataagtatagaaagaatcagagtaaggtaagtaggtaagggttttcttcatttctatctaggtttcgtcctacagtcaacatttcctctgataccacttctgtcacacccggatttaagggacaaagccgggtgcatctcatacatgtgccaaagaagacaacatatataataacagagtgtatagagataaatgtcacaatataatcagagtatttattacatagcagaagtcttacaaaatataagataaatataataggatctaaaatctatccatggcgccagaaagctgactgggagatgccacctagatcaagtcgaaagcctcagtgctaggcggctcctcttcgaccacctgttcttctcctgtggggggtgtgagacagcaagagtgagctcacatacgttcatagctcaacaagtcgtggggaataatgtgcatgaactcaccaaaggtgggagttcatgtgaagtgtaaggatgatcaacaaagtaagggctgaagctgagcattgcttttataagttggtcaaaattttattagcaattactaagtgtaagtaaataccaaaccttaataataataaataaagtaatagtaaaataataccaaatgcgatgcaaatgtcaaattaaatttaagttccataaattaatcatgtgagggtccgagctgctcatgaccgtgagcatggctagtataccagttttacactctgcagaggttgtgtatctttacccacaagtcatgttacccatctgccaaaagatggccaatcccatacacctctaccgaggaggcgaggcagggtaacactacgaggcctttacaaagttccactagcttcagaaatctcgctacagtttataggaagctctagtacaggaatccctcgcctgaccgccatcgcagcaaaatcaacccaaggacctccctacattgaccactcccctactacccttgcccctttcgggtaaggaagtcatccactagctttcctagttaatcggccaagggcgtcccattaaacccttgtggtagcactgttttcccgggtggtcgctccatgttcccattaacataatgatcttaacatgaacaataataataaacagataataaagatgaaatcatgaatagtgtatctccatacccaaaaccacaataagcaatagcaagtactacccaaaaatattcagtggcaacaaggtataaagatagccaaaactggggtaacctattggatcccatcaaaattaccctatgcagatcattataattaataagaacatggctaggaaaaagtaagtgatcaagggcacaacttgccttcaatgagctcctgctcagctatacctgctgaacctcaggatccacagtggcttgctcgtctactcgcatcaacacaatacatacatagtatagcaaaaattaatattgcaccaaacatgtgaataaaatacacaataaaaatctacacattaaaataaggacctaggaacaagaatcattaattttgaagttatagattttgaattatgaatttccaatggtttaatgtgcttgaaaaggaattacacaagaaattaattttcttactgttttcatgccaaaacagagactctatgtgatagatattaaatttacaaaattttagaaattggaatggatcaatttggactaaaaatgaattttctatgcattttacaagtttctagatttgtttttgtattaaaaacgaatttctataattatttctctatttttaatcatctctggactgggcatcaattttcagaaaggccacggatctcggggctaaaaatactaagacacagggcacagggggatggaccgcgggttgatacccaacttctgcggggtctcttatgcaaaacgctatcgcgaaggggtatccgtagatgtgggccgttggattagatccggacggcgcatatgattctatcatcatgcagaacccgcatgttacgctagccgttggatcggtgatctgcggccccgatttaaaataccccagctagatcctacgcgtccgatcatgatccgacgcccccgagtctccctagccgaatcgttacggtgaaagtaatcacaaccgcctatcacagatcctacggcacccggcaaacacaccatctaacccaactagtcggcggcgcaccagacggaacacggcggcgccatcgccgacgagcgcgcgattcaagcccccagcgcactattcccaaatcaaactgatgctacacgatgtaggtgcatgggcgaatcggtatggggagttcttaccgacggcggcgaagcagggacacctggccacgtcgtgaagtggtcccgcggcggagatcgaactgcggcgagcaatccaagtcgctccgaggctccgcagttcgaattgaggactccagcagcttcacgggttcccggcgaacgcacctgaccacacgtacggatacgcgcgcgagtgcgtaagggaatcaccggcgacagcacttttccgagcggacgcggtgaaggtttgtggcggtggcggtgtgctcaggggaaaggtccatgcgagaggttaggaaggaacgggtcacggggttgctaaataaggcccgagtggtggcgagagctccgggagatgggcgcgagctggtcaatcccggggagtcgtggtgggcattctgttgcgccatcgagcggagtccgcggaggtagttgctgacttgcgggccccgcgtgacagccagtggcgcaaggcacgggggtgagtcacagacgcgtgggttcggcaagtcactgactgcggcagcgacgttagcgcgggggagatggtggctgacgtgcggggccaggtagtcggcgcccggtggtgacgggactgtgcggacgacttcccctagtgggccaaaatgtggtaagccggcccaagtgaggttttatccctttttttcttttcttattttttccttatttcaaatctatactgctctttaagatgatagtgtaggcgtccacacgttctatggtgcacggttctgcctctgtctccgcgacgcacgccgacatcctctccgcgagacgcacgcctccctctcctccgccccacgccatcggcgccgcaatcatcggatccgccctagccgcgccccattccatcctctccacagttgtgctatcatgccccgcccgcgtctgcctcatcatccccgcccaccctcgaatcttgcgccgctcccgagcttcgccgcgtcatcccctcatttcccacaaaaccccgtcgatccatacgcgaggaggaggacgacggccccgagcccgttctcatctgcctgggaaccctagccgtcgcaggctctgtccgcaactgtaccctcctatcagtgctctgcctccaccccatctcccctggcctcccggttcttgatttctttccccttcggtagggtagcttctcagatttcgtgacgaggatcacactgacgccgggagctcaacttctcggatttcgcgtccaatcctttcatggcggcggccccgccgttcttcaagcccagaggaacccgtcatcctcctcaacttcgacgtcgacagcaacgcccagaggaactcatcgatggcgcctcccggtagcctattctcgcagcacacaccgaccgccacggcgaacgacgcgaagaa

SEQ ID NO: 1186 - DNA, 3232 bp, Zea mays
  Intron number 1 from transcript GRMZM2G358467_T01 (locus G RMZM2G358467) derived from phytozome v7.0 (chr-ID 7; pos 1 55359295 to 155362526 reverse strand)
cgctatccagcccacgccgtcacgcactcacgcaggttagtcggccgctctgtgcctgttccaggctcaagaccacagtaccacaccctcgttgagatcacgcagtcgaccccgaatcatgatttgcgagtagttccatcaatcaatcaattcaatcgaagtcaaggcccgcgcgcctgctagcgcttaactgaagcagtagcgttaaccttcattcacagcataccacacaccgtattccgtattgtttgtaacgcccaagttgctatatgatattttcaggatcaaaagcaataggatatctgtcacggatatgtgtgagccataatatgtaggggtttttattttctccatgtagtacttttgtgatttgctaaacttggtgggatcagccctataacatgttctgatagattcattttctgctctagctacaccagtccgctaattaactgactgaaactgaaatagtggtgttcctctctggcactcttccttccgtttcgttaaaaacctacaaggattcatgcatatgtacccttaattcggttgctctatcagtaatcaattagcatgtatggccctagtgagctccctgagctggaagaaaaacatattgttacttttgctctgttactttgattttctccttactctaaagacaattcctgtgcttctgttgacgaatccacagacaaatcttgtagcattttagaaattgaaaaaagaggaacacgaagaccttcgttgggccagccacgggagctgctgtgcttgatcttggacgaaacaagtgaatggtcttcagcgggtttcagacacttgcagtcgcttcctattcttctacgattaccttctattaccggcttatgttgtgttgcaaaatgcgttctgtagtatcgctttagtggtcctttgggaaccctcctattcggtaactctaattaccgacagggggtttgtactttgttcactctactccctcttaatgaaaaacgtgcaatgacacggtcacgaaaaaaaaatcttgtagcattttctaggagatttgtcctggtattttttaaaacagagaatgttaggtcatctggcttttattcaaggacttttgcctgagttggaccactagattggcaggatgttaaatcccacctccactaaccaagtggccgatctgtcgatcctcaggtttgatccttttttagttcaagttcgagcacgggttgcatgatgatccacactacatagtacatgtttatgccaatttgtgacatctttggctttgggttgaggtgaagcaaacatttttttagttacatgaaaggtttgtattcttttgaattatagaattggtagaggcagccgcaggaaatcgatgacaacctatcgtcacgataatggctgtacggcgtcaccgaccagttgtcattggcagtgcctgctaatagaatcgttggcaatcaagcatgccttgctcttccttgaaccctttatttatagtccataaatgactcaaccttccaaaggaaaatatagaaactctaaaggtagaaagacttaaatatagaaagataaggttattaatctgctaacctgaacctagacagaggctgactcaaccttccaaaggaaaatgtagaaactctaaagatagaaagataaggttattgatttgctaaccctgaacctagacggcgtcggacataaatccggtccagagccataacagtatgcataaaactgacacagaaaataggtgatccaaatcatatacaaccatggtgctctcttagcttcacaacacattttattcttttatcatcacaccattttgatttgattattatttttctcttgatgttgtgtaatgatttgtttttatcatcaccagaatgtgcaggtagaactattatttcaagcacttgtaaaccacacatactctctaaagggcacaataaataacccacaaagccacaatttttattccttagctcaaatacatacatacaacaggaagaccaaggctattattacaactcatcagataaccatcaagcctcaggtttaacaacacaatattattagggcaatatgcgattataatatgctccacacagcattttatttagttaatagactactgctcgacaataggcttactatttgtcttgattttttaagtgtctcgtgattcttcctgtagtttgcatcattggagtgtttaaactggtaggtcggtgtccttgtcgaagggaaatggctccaattttggctgtgctacttctaggatttcttcaattggtatctctgcctttgatctttccaatggtgcaactggatcgacatttggattataatcctgatttttttatatatattctgtcagcatgtagctcaaacataaatgtgtccaattatgaatgtctagattttcaagggtgttactcaccaggttagcatgcattctcctgacaaaagttttgaaagtggtgtagttctgttcctggaacagttcatcagatactcggaggtaggtgaatccgtgcaacttgtgttctggagggccattcttgttgatgccttgaggtcttgcattcctgaggatggtgttgtaagctgttgcatcatatcggttgagtgcattttcacatgccaaatttaggccctctctccatccagcactcagcacctgccattttttatagtttgcaccagaatattttgttaatgattgaaaagtgccttttgtgttccgtaaaaggagaatacagacaagtgaaaatggcttaaacctgttgaaccagttcctcaggtgcacttttcgcctctgaactctgttcactgtccctcatctcagcacaagtgaagttcatgctagcacgatgccttgtgagcatgtgtgctatggttctgtagccatctctgtcatctaagttgtagtatccggcagtgagctcagctgcatggtttggaacgttgtaccaccagtgtatgccagagacctgcaaacgaatactagtgcatctgtgatatctgcgtttttcacccgtagatcagttcttagtttgtgtcgtagcctatagtaaaccttgtacctttattatgttacaatatgcaaagacatctaccttgaaatgggggggggggggggggttaagctaggtgttattcaccatggtacttactttgattgccagctgcaccttgcatcccaggaagaccttgtttgctt

SEQ ID NO: 1187 - DNA, 1875 bp, Zea mays
  Intron number 3 from transcript GRMZM2G173597_T02 (locus G RMZM2G173597) derived from phytozome v7.0 (chr-ID 10; pos 124331478 to 124333352 reverse strand)
atcgcctacaccatcacggcctccatcagctgcaggtacgccgcttgcatcctcctctacacggacatggtagttggcacacgtggttcgtcaagatcacaccacgctgagatcataatttctatctatttttgtactttagataagtgattaagtaaaactaaaatatgtataaaatatttaagggtatgataaataaaaattaaaagcaaaatatatatatatatctaatattgacatatatatagagaatgagatataacacatttccaaaagtctttttaaatttcacactttaaattatcatttggagagtcattcgtataaaagtgactttatatatcttttcaatctttaacaactttttctttatcttgtttgcactctagagagttattcacgtttttttaactttgtctaacgagaaatctagaaaaaggatggttatatttggataatcatttagataagttgtttggaattgattttgtaagaaaaatctctatttatgttaattaggaataatatagagagtccattggagtgcttttacatagtatgatatagtagaagagaaaaaaatttagacgaatttgtataagagatactactagagggtatggttagaccaccgcggacctcgttcaccagttctctgccctgcgttattatgcttccccgccgcggtctttgttgttgcgtgcttagccatagccgtagctcctcccgcatagagtgatactgcgccgcagcccgcagtgcatcggccgatcgcagcccccaagccagcatctcgcctctcggacgtaccaattgtgtggtggaacacccgcgcgcggagttctcggacgggagcaactgcgaaggcggcgcaccactcggtcgaggtgctcgacggccacccgctccgtagtctatggccaggtggagatagcctaatacgcccttcgcgagttcgcgtgcccacctttggaccttgcctctcctacgtgtctccgccaattactgcgcgggacggcgtgcgtcgtgcacgcgcagggaccgcgtggaccgtggacgtgcgcggcgcacatcagcacggcggtgatcggctccggggtgctgtccttggcatggagcgtgccagcgtggcgcagctaggctgggtggtcggcccgtcgggcatgttctgcttcgcgctcgtcatcacccacgtctccgcggcgctgctcgcctcgccaacggctaccggcgcggagaccccgagaagggcaacggaaccgctcctaaatggacgccatctacgtgtacctcggtatactataccgctacgccatataaacgtatacctgccgtctcactacttgctagctgctactagaacgaaacacagcagaagctacgaacgaactacgagagagaacttctcaattgaaaaattgcttcgtggtgtggttgtatggccttgtttcttcatagtgaataacccgtctactgtgtgctgctctgtggcgacatgctcaggcaagaagcatacctgggcttgcggctcgctgcagtacgtgagcctgtacggctgcggcgtcgcctaccatcaccaccgccactagcataaggtagccgctgctggccggtaacaaaatttcccagtctctctctctctctctcaaaacttcctcacagctcaagctgcctgcagtcgtgtgcttccttccctctctttttagcgagcagggcgctgacgatggttgcttctgttgtccttctgccggttaaatttctctgaatatttttgttcttaactgcgcgtgctttgcttgtgtgttccatacgtgtcgggctgctctgctgttggatgtcgcagggcgatcctgaaggcgaactgctaccacgagc

SEQ ID NO: 1188 - DNA, 4474 bp, Zea mays
  Intron number 7 from transcript GRMZM2G137696_T02 (locus G RMZM2G137696) derived from phytozome v7.0 (chr-ID 4; pos 1 61436353 to 161440826)
agctgcaaaaggtatcaataagagaacttaataataattttttctctcgaaaacgcaggagaattgcgcatcattatattaagaagagaaaaaggtcttagatggccaaaacagtacaaaaaatagcctcacggcggccaagcacaggcatacacataaatgtgcatgaagaaccacactactacaaaccagcagcaaacaagcactcccagcgctaaggccagagcctcctaatgtctgctgccccagccattccccacatatgagcatcttgatagatatgttgcaggacaatgttgctgtttggggaggcaccatcgaacacacatgcattcctatgtttccacaaccaccaggccacaaggatcactattgagttgaacccctttttctggagctttggcaccctgctttcagcctccctccaccattcctggaaaacaaaaaagcagccccagggaaaagagactgcaaccccaccttgcttaggacttgaaaccaaatatccctagcaaaaacacaggaaaccaaaatgtgatggactgtttcttcctgttgatcgcaaagatggctcaaacaaagaatttgcaatgcggaggagcccaacttctctaaatcctctcagctggctcaaacaaagttgacccagctagaaaccgtctatatgcagatttggcagagtattcccccgaggatgtgggtagacgtctgtgcctatcaggaacccctggatgaagatgtgacaattgcatatttgggactttaaacatagcgctttgcaatattgccatccaaaagatttatttcgcaaaatagggactacaaacatcttctaattgattatactaccagttattgtataatcttccttttattactttgttccctgtattttgtatctaaggagaccaaattaccttgtgcatgcgatttgtctccatgccgccatggacgaccgaccggctaccgtcctacccacagccgccccatgccctgtccaggccccgggctcacccctgctgcgccatctgccgagctcgaccctgcacgctggccgaggccactgccgcgccgaccaccgcgctgggcgagatcgcgctaggtaaggtcgtgctgggcgatgtcatgctggacggggcgcctcgtctgcatcatagcccatggacacaccgaccatggaaaaactgtatcgttgtcctggtgtttcatgagcattacgtgagcaataagagttgtttgcatcctgcaagttgcaaatactagcttcatgctggtgagtgctgacaagctgcaagttgcaaatactagcttcctgttggccagctattcacttgatcctggtgagcgcgagagcgcaggcgagctgcgtataattacatagggctacaagcggctaatcagggaaaaatacatgaaattagattagaaaagctagactataggctaaatggtagtataatcgagtagaagatgtttgtagtcccctttttgcgaagtaaatctttcggatgacaatatcacggagcgttatgtttagagtcccaaatatgcaattgtctcggatgaagatgaaccccctgaatcaagtcccaaaccctgaagtactcaaatagaacctgctccggcagacttccagagataccattcacccatctattatcaatcaaagcttccttgacagttctgcaattctgaactcttttgggtatacggcttagcagggaaggagcaatctgcttaaaggattgcccgtggagccagcgatctgtccagaaaagagttgaagcaccgtcgccaacaatggaacacacacaggctgagaaaagggctgctgcggatgtatttggatgtcaaactctgtccagggtctgtccggttgtgtttttttaagccagaaccacctcaagtttagagcccaccctagaacatctaagttgttgagacccatacctccttggttcactggtttgcataccttagcccaacccactgcacaatgacctcctttgatgtcagttcttcctttccaaaggaatcctctccgaattttatctatagcctttttttctcgaaaggacagcaagaggattgccgaatatatttaaagaaggagaatcagtacaactaaccaaatacagggactactggccaacaaagtcccaactacaaccattacaaaaaaaaagaagagagagaaagaaagaaaaaaacaaaaaaaatccctaaaagaccaccattagagaactctctgatcaaaagatagagaaagccgcattgtattgtaagacatcctccttgatttgatgggagacgacaagttgatcattcccggaatttcgaaaaattctcctatttctttctttccatatattccacaaaaaatagaccactagcccgtcaaataacctttgtcttggtttatcaattctgagtctacatcttctccaccaagtatgtatctgaccatcttggtttaggtttgctaaagatttgagattggtccaatgtaacaaagtccgctaaatgctttttgagtaactacaatctttgcacaggtgactcagagtttctggatctatgtgacaaagaggacaaataggattgtgatcccatcccctcttctgcaaattgttagctgtgaggatcttttcatgcaggagcgtccacgcgcggaaaaacgacatttaggcttggcttttgccttccatattgcttcaattttaattctagacatgcttccattaaactgagcttggtaggcgctacgggtagagtattcgccattggcagtccagcgccataagatttgatcttcatttgcaacgtctctttccacgtcattgatggcttcccaaagtgccatcaattcttgaattttagtaccttcctgaaccgaccagatattggatatctatctattttcctctagtcccctattgaccgtgatattcttatgtctcgttttttttgaaaagagatggtgcaatgtgacgaggtgtcctcccagagatccaactggatttccaaaacaatgccttattgccattgcccactgtgaccaccgtagaggcgtgaaataagtcttgatcagttttatcacagggaatgtccagacccacccaggctctatcctcatttttccagttgtaccacatccaacgcaaacgtagtgcccgtgtgaagcgttctaaatctaagatcctaaggcctcctagagacttgggcctcactgtgacttaccatttgattagacaataaccaccactcgaattttctgggccatcacccttccaaagaaaactttgccggatacgatcaatcctctgaatgacccatttttgcggtgggaacactgttaagtggtagataggttgagatgacagaacagtctttactagggtttctctaccagcttttgatagccttgacaacccatttagggcactgaagtgctataaaatagtagatagggactgcataaagcactgatttaaccaaggtcgcgctcccgctgggttaattaacacagctttccaaccaggtagcttatcagccaccttgtcaatgagctccagaaaaaacacttctaggcaacttcttaatagaaaggggcaaacccaaatacttgcctggtaaatctacaatgttgcaggggaatagatcttgtgcaacactgaggtcttgctcaacacaacgaataggggtcaggttgcatttgtttatgtttgtgacaagaccagaagcctccccaaagatcctcaaaatttctttgaccactatgacttcgttcctgttgagcttcaaaaagaccacgacatcatccgcataaagagagactctgcccattaccctgtcttagaaggggctgcaatagacccaactcattggctttcaagaacagagagtgcaacacatgcataactagaatgaacagcattggtgaagaggatcccctgtctcaaaccaagctgagatactctttgcataagaaacagaataattcaatcttactaatgtttaaagcaaaaatcttgggaagaatggtgcaacaaacacaaaaaccttgccactgtaacacaacctgacactgtgatgatctaaacattttttttcttttcatgaatgttttttgctttgttttttttggacagtcttacttgattctctcagggctgtaattgttctaaagtaatatgtgcaggccatgattctccagcatggcttctagatgattatattttattgcaaaattaattgttcaataatttcatggaagcaggaaaaaaactaaatcctagtatacactaaattccatagcagggaacaaaaccatcactttacattcattttatctatgttgtggaattgctcagtataacagtttgatttaactcatggttgatgtgttattctgttctcaattcagtgcatgtttggtttttcagattgtgaacaagtgggagacaaataaaca

SEQ ID NO: 1189 - DNA, 6153 bp, Zea mays
  Intron number 1 from transcript GRMZM2G034868_T02 (locus G RMZM2G034868) derived from phytozome v7.0 (chr-ID 3; pos 1 42950411 to 142956563 reverse strand)
tcatcagctcagatctagcagcttcgccttctcaggtaagggctccgctcacatcttcatatccctgctactaggttttcttcgtttatcctcgctcggattcttgcagatctcgctcaccttgtagatctcgctcagattcgtttgttctcgccagacgcgcccacttcgcagccgccgctatgcctatgctaccgcatgggcctctgcgcctgggaggcttgcggctgccaggcttaagtcacggggcagcaggagttcagtttttttaggcctttgaaacaaggctagcgcatattagcatcgagagtcaggagagtacgaatgggaagtaccgtcataaaattatctttgctactagcaataggaagcaccgtcataaaattaactctggtaataaaatcgattggatatatattgtttctaggaaactaggaaggatcccgtgtagaaagtgtggatagatagcctttttcatcggatcatttggttttttcttaaaatatttctttcaaaacagtctcacttttttcttaagttgtattggtgctccctaagatcgaaagcaggaatactacttttctgcaaaatcacaaaaatgcacacatttgggacctttcctaagctgtgtcttcgagcaaccaaaaagctgatgttagtttattttcatttttttgagagaagaaaattctttgcttgatgcttaatcagagatgaaaatattgatcattttttacatgtgcgctgatcatttttttactggactgctgtcaggtataattggagtgctgtcataagtggagtgttgttagttacatgtgtgctgatcattctaatcacattgttcgtcgttaatcatgtgaagaaaatattcaaagttataacttgaatttttgttgaatctggcaattgtatggcctagaatttattgttcattagtcagaaagactacttaagttcgttagttcaggtcttgctgatttactttgcagcaacatggtatataaacctgatgcattctctgatgaacagactttatacaccatcactcacattctgatgaacagactttaattataatggctagatgcacttattgttttcgtttgtactctataaatcaattacatgtttccttagtggaagaccacaagtctagactagtagtctagtattggatcccttgggactgaatgatctctttatgattttggtttcagcttacatgagcacatattgtgtggcaacaacttcattttgccatccaagaacatgttagcagcaacatcttcatattgtttacatccgtccatgttgtatcattagacaaccaatttacataactacatccttgaatggtaaagtagcttgtaggatacttgtaaaaaaggaattaaacccaatttattctagtgtcaaagttcataatgaagggacttgtactatgtttatatgttatattgtctatttgtacgtgtgaatggagatgatcttatgtgatgggatgatggatagattaactttgatggatattagatgatatttaagttaaactttgttggatattagatgatcaagtccggtgcatgtttttttagatttttagtgatatttcattgtgttttttatttttctaaatatttcctatttttctttgatttttgtgattttctgaagtattttgtctcaaaaggggtttttagtcccttggttgccaaacagtggccgagaaatacacccgagtggaaaaaatcctactagggaattgaggtgtcatttaaaatccccttggtagattaattccctaggttttttatccatttgttgccaaactagcgcttagggggttgaaatccctacaacggtgccccatttaaacttctctacacgctacagttttagtggaggctacagaaaataaacagatgtgggtgtgtgacagtgagctccctgccctcggtttacgtgtacggcagtgtttttagttgggaaaaaatgataatagagggtgaatatgtatgaaaaataatattttatgattaatagtggggtataggggaagaatttagagagacccgctgtacatggtggaaatataggggaagagagatagctgacgtggcgggatagtgaggtatagagagagaaatttagaggagacgattgaagacaatctcacaccagtcgactagtcgagtgtggtagtggtctctttcaacaaatcagagagttacgggagggaggtgcgatggcgaaaataaaaaaaatatccattcatcggtggatgaggaatgatgccaccatatttagattgcgcatttcttatatttaaaccctagaaattaaaatatgacctagatttaaagtatttagagcacaaaatttttgcagctctaacaattgagttctacatcaatgttatttaagaaataaaaagttagaaataatatctaaatatatcatgttgtttaaaaaataaaaaagttaaaaataaaatacaaaacgaggatatgcctccagcatatatagtcctatatttaaaacctaaaagacttatttaattaatttttgtgaaacagaatccatattaaaactggtttttgatgttagagtctattattttaaaatacaactccgtttacaatttgaaatgctcctacgagcaaagatacacaatctcttcggcttggcgtttcgcggagaacagcgcgtcagcgcctacggcttctgcttgtctctcccgttccactccaaaccctaggggcgaatctccggctaatcggcggcgggcgcagccacgctgtctgtgcagggcttgtgcggccttaggacgcaggggcgttgcttggggctcccggtgggtggctacgaagggctgtggcggcccgcggccaggggcaagtcggcagcggcaagcaaccggggtgctgggcgtgggtgggctgctgggacgcctgcggcagcggtaaaaagtcgagcctcgaccgtcctgaggcaggagcagagcagctgagctggtttggtactctgttgattctccattggagacactaggtgtgccaatttgtaagttaatttggtaaattggtttttccgtttcaccctattataccgattgcaattggtgaatgtttgtgaaactataacagatgctgatattaattcactgattgcgtgttacttgaatatgttaaataatttgtgaaactgtgacagttctacatgtttaacaattccttaggcaatttcaattctatgaaatttatcatgttcatttatgtattatatttatattgtcatgtgatattatatttaacaaatattaggctttaggttttaaatttcttttgacagcccttcacatttcgaaaaaccaaccttaaatctgtgggcccaccatttttgtgtgtgtggcaggggtggtttgtgggcaggggtttgcacccaacaacaacaacaataaagcctttttgtcccaagcaagttaggataggctagagttaaaatccaatacaagtcaaggttcaggcaatagatattttttgtgcactcctgttcaagtataaatctttggttatattcaatcccccaagtctccttttactgtatcgttccatgttaacttcggctttctccctcctctcttcccattgctatcatgccttagaattctactatgcattggtgatcctggaagtctggaggtctccgttggatatgtccaaaccatctcaaccggtgttggacaagcttttatttttctaattggtgttacccctagcctatcacatatatcatcatttcagactcgatttattcttgtatgcctgcaaatccaatgtaacatatgcatttcgtaacacatctcttggacatgtcgtctttttataggccaacattctgcaccatacagtatagcagatctaatcgtcgttctataaaactttccttttagcttctgtggtaccctcttgtcatatagatcgtcagatgtttgatgccacttcattcactctgtttgattctatggctaacgtcttcatcaatatccctgtctctctatagcatagggggtgtttgggactgctccactccaagaaatttagctccactccatgaactcgaccatggagtagctccaccgtggagttggaataaaaaaacactttgacttagcattttactctagctccatgaatgatagatttttaggggaaatctctcttatatccttgttttaaagacccatatgtaggtgacccaactctatcgtttatctgtcccatcccactcacacagtattctctctcgatggaacgatgcgaggcatgaggtagcagtctccatcctcactgacgcagatcgaggagcggcggggtgggctacccgattgttcacgaggaggtgtgtggggatgagcccaccgatcgaccatgaggagaggtaggggtgagcccaccggctggccgcgaggaggatctgcgggggtgagctgcctgctggcgtggaggaggcgcgcggtggggggagccgctcgagcccggccgatggcgaggtcttgggcggcggcggcgatgggaggcgaggcgattcgaaacagatggatgattcttttctgcaaactagcacgggagggagtgtgtaaacgatggcaatgcggttaattaccccacaactccatgaggaggtacaaaacaataattttttagcacctattttgctgttctaccaaatcagtggagttggtgaggtggagttgaatatatttgacaaattatttgtggattagacttgcaaaacaagtagtggagtagtctcaaacactccataaataccgaaaggtatccttcccggtcactacttgaccttccaaactagtcgaagtcacatctcatatattcagtttttgttctactaagtctaaaacctttgaatcctaaagtctcccgtcacaactctagttttctatttactcttgtccgactttcatcaactagactacatcatttgcaaaaagcaaccgatggatttcttcttatatgtcttctgtgactttatctatcactaatgcaaaagggtaagggctcaaagttgattcttgatgtagtcctattccaatcgggaagtcatctgtatctccatcacttgttcgaacactagtcacaacattgttgtacatgtccttgtagagtccaacttatttcgttggaactttatgtttgtctaaagcccaccacgtagcattctttggtattttgtcgtatgcgttctccaagtaaataaaaaccatgtgtaggttcttcttctgatccctatactggttattcacttgtcttattaagaaaatggcttctatggttgatcttctaggtgttaaaccaaatgggatcatagagatcctcgttattcctcttaaacgatgctcgataactctctctctctctctctcgtagcttcatagtatggctcatcaacttaattccttggtaacttgtacaactttgaatctctctctcttatttttgtagattggtatcagtatatttctctactcgttaagcatcttgtttgattggaagatatggttgaacaacttggttagccatactatagctatgtctccgaggcatctccatgcctcaattgggataccataagtgtctatcatcttacccccttccatctttttcaatatctctctaacttcagattcttggatccaatgcccaaaacgtttattggtattaaagtgtcatctaactgaaaggttgtgtctccattcttcctattgaacaatttatcaaaatactctcgctatctatgtgtgatctcatcctctttcaccaagaggtgctccatttcatacttaatgcacctaacttggctgaagtcccttatcttcctcttacagaccctagttctcatatatatgtcattctctccttccttcatactcaaacattggtaaaggtcatcgtacgtccaaccctttgccacacttacgacacacttttttgtcttctttgctcccttgtacttttatattttggggttgcacccaaaatatgaaaatggttcaattgtttcagtagtaggtctgttctcgtacttctttggcatttgtaccaatacattgcctttcttgatgcagtg

SEQ ID NO: 1190 - DNA, 1220 bp, Zea mays
  Intron number 2 from transcript GRMZM2G152552_T01 (locus G RMZM2G152552) derived from phytozome v7.0 (chr-ID 1; pos 2 12949660 to 212950879)
ccaagtgccccgtcaccgggaagaaaatccagggggtgagtgattgattgttagcgcagctctactcttcttctgtctcggttgtgtgattcgttggtccttggtaccgaggtggggaactggtagcgtgtttgtgctatccatattgaagtaacagattgaagtaattggtgtgaattagtagatcttaattagaagggcaagcctggtccagttgtaagaactgtctgagtcaccagcgggtttgaacccttgcttcggtttatcccttccccagatcgcacatgagttgagcctccggccctccctttattttagtagattttaattgattgcttacatggtttactgtgttttgccctgtgatgccacattgtgcttgtataggtctattggacgatgtctgtagttaaatgggcctttatatctagctctcgtctaaattttttccttgcgtaaatggctgtgtcatgtgaaattgaagtacttggtacctacatttgggggaacatattactgttactgcatgttattttgctgtttacaaatagtgttctttcttaccacatactccctccgtcccaaattaaaatttgatttaggattttaatagattcatacaatagctaagttgatttgcccgttttccctgttgagtaaatactattgtcatgtcattttcttcagaatcacttcctaggacttctgtttgtttgaggttgaagttttaattagttctatcattctgtgttatcttttcttctcttttatgtaaagcaccagtttccaccatcatcgtgctcctccgcatttaaatggtaaaatactaaaattatgcataaatggtgatttgaaccatggttgttggctccaaacccacaaccacacccgcctagccaacaaaacacacatgtctttctttgtgtctttgtgttttatattctataatcaacataaaagggaactgtagcaatatacgtgcattttgctattttttttcttctatgtgtgcttgcactatttatttggttgtttccatggcataatattctccatagtaatcatcatctggtaatttccctccctacctgaacaatgccctcagtgtcaccaaaactgggtattcatctgtcattggatatttccacctaatattgtttaatgctattgtttccatatttccagatccctcacttgaggcctgctgagtacaaaaggtc

SEQ ID NO: 1191 - DNA, 7323 bp, Zea mays
  Intron number 4 from transcript GRMZM2G158860_T02 (locus G RMZM2G158860) derived from phytozome v7.0 (chr-ID 4; pos 1 78053803 to 178061125 reverse strand)
ttctgcacaggtcagttgggagaattagaatacacagaataccagaagggggggggttggagggagcatggcatagatcagtggtcgtgttggacttgagcatgattgatagcaagcacacaagcaggtagagaggtttgggttgcagtgtggtattgatgagtacaaaggaggaaaatattacaagctcaaacaacagagagcatcaagacctaactccctcatctcatggctatggtgggagttctagcctaaggctgtctccagcagtctccctattccaccatctatctcacctcctatttcaaaccctactctataaacagtgcggtctacagtgcaaaacaataatttgcatgaccatatgcacggtctgctgagcatggcctcatggtctcaatccacctttatacgtgccttctagatgaagagtggccatagttagcttggttacctctaattggaacttctatggtcggatctaattgaatgcccctggttggaatctaatccccttaaatgttgcccacccctctcttttatagtctaggcctccaaggggaggaagagattacatgaaccttgtaccccatcagctaagacacaactaccctactcttatcttatttagtgcccatcttttggtcgtggtgtagacgtaatagagatatcctttttttcggttgtcatacctgcgacaggtatgtcatgtctacgggccccgtgccctgggccgtttagtatgatgtggttggtagtcgttgtagccttttgtacttcatggtatactttgtgtgcgcacgcgtggctactggatcaacacacataccatatagtggtcttgattatcctgcagcctaactcgtgctacatcatgcttatcgggcttgtaatgtcacttatcacacatttaatgtgttgtacccaagacttatccattaagctatctctgaggagtagtatgcaggcccttagatgtggtacccttttcctggggttgtgccatcctcgatgggccttgatcacattttatatttttgataggattacacttagcttttctaagtccttagctccctcgggacctaggactttagagtgccggaggcccgaccgtcctcggagtacgaggtcgaggactctttggggatcctaggcctaatggagagcctgatctagtgctcgggggacggactgccccgaacaaacgttaccatattatcctaggacatagcgggccctagggacttaagcctatcagtggcccgagaaacgaagagtctgatgacttgggcctataagttcctggggatatgacgagcctaatgctgtctccagcagctttcccatcccatcttcagttttaaactctaatctgtaaccagtgtgctctacattgcaaaacagtgtttcacacgaccatatgcataatctgctggagatggcttaatgacttaatctctgatcagtgccctgcgacacacggtgtctcagggacttagaataatttacccttggaggttctaagacgctagaggctcgggcctcatagcacctaggtggcctgaaaggcttgagccttatggcagctgaggagtcattccatctagacacttctataatatctagtgtcggacctcttccttggctagggccaggggaggttcctaggtgtcgaggccccaggagcagtggtctcgttatagtcgaccccgtcgtcagtctcctgagctagatccttgaatgtgtgtcaagggcggtattgcccaaggtaggaggaccttggctacgtagatcgtagccttgacccgtggttgccggcagggttatgcccccacgccgagctacccgtcgacaggagaagttctcctggtcgccggtttagagaagagaggaagagacttgataggtaattcttgattgattcccaagtgccaccatacatggctatatatagccggcggcttacacaaatggagaaggttctccttgattgaagatctaatcaaaataggaaggatactaatcagctagctactttctctcctagccaatctccttctatgtttgctgcatgcacaatcaatcaggcggtcgccttctatttttgctgcatgcacaatcaatcagatggctactttccatcctagccactcacctgctgcgcatgtgcctttgctgcctgctcagctcggcgcacatcgcgggctctcctacgcctggcgtatgtgtggccgtacatgacatctctccgctcctcgagaagcagctcgtcctcgagctgaaaggttgggaatttgtcggtgaaagtgtccatgtcctcccaagtcgcagatgcaggcgactgatctttccactgcaccagcacctggcgtacaccgcggttgagccgggttcggatggccctagctggctccaaggtgactgccccatggtgaagtgggggtagtggcggtgtaacctgcggtggtgtgtcgtgatactttttgaggacgcccacatgaaacacgtcgtggatgcaagcgcgggctggaagctcgaggcggacagcgacctcgttgatgagttccagcacacggtagggcccatagaaccggggcttcagcttgccggtggagtcagtggcgagggaggcaggggagcggtgtcggagacggagcagcacccattcgcccacctgatacgtgacggcgcggtggccctggtcataatacttcttctggacagcctgtgcctgttccagccgatggcggacatcagcgaggaactcttcgcgctcctccatggttcgagccactgccgcaacacgtgtgtcccccggttcataggaccggatggaccgaggctcacgctcgtagacgatcttgaaaggcgtgtcgcagagagagctctggtaggcggtgttgaagacgtactccgcccatgggagccattggagccactggcgaggccgatcgctcgttaggcaccgcaggtacatgatgattaccctgttcgccgactcggactggccgtccgactggggatggaaagccgacgtcatgtggagactggtccccatcaaccgcatgatctccttccagaacttggaggtgaatacgacgtcgcggtccgacaccaaggactgcggcaccccatgaaggcatacaatctctgtgaagaatgcctgagccacggactctgctgagtaggggtgtgccagtggaataaagtggcagtacttgctgaatctgtccaccaccgtcaagatgacggacttgccgcgcactcggggcagggcttcgacgaagtccagcgccacatccgtccagactccctgcggaattggtaggggaaggaggagtccggccgggtgtaggtgctctgacttgtggcgctggcaggtagggcactcccggacataatcttggaccacctgcttcatgttagggaaatggaagtcatgtcgaaggcggtgtagcgtgcgctggaccccttcgtggccctcggcatgcacagctgcgagcagttcacggagcaggggtgaagaagggggtaggtagagccggcccgcgtactggaccatcccgtcaaccacctcccacggcgcgcgcttggtgccggcctgcacctcgtcacgaatggcagtgagtgctggatcggtgagttgtgcctgacgaagacggtccaggacgtcgaaacgcggtgccgagagggccagcagcgccccatcgtctggcgtgtcgcggcgggagagggcatccgccaccacattggttgactccggcttatattcgacggagaaatcgaagcccaggagcttgccgacccaatgatgctgcggaagcgtcgcgagccgctggtccagcaggtacttgaggctgtagtggtcggttttgacgatgaaccggcgtccccaaaggtacagcctccaatgtcggaccgctaggacgaggccgatgagctcacgttcgtaagccgccagcgcttgatgacggggtgcgacagcccgactaaagaacgcgatgggatggcccccctggaccatcaccgcgccgaaaccatgggacgatgcgtcgcactcaacgacgaatggcttggagaagtccggcatggtgaggacgggggccgaggtgaccgcgtccttgagggcgacaaacgcctccgcggctcctgcgctccaagagaatccatccttcttcaacaaggccgtcaatggtgctgccacggtaccgtagtggtggacgaacttccggtaatagcccgtcagtccgaggaaaccccgtaccgcccgtgctgatcgcggcgtgggccagtcccggatggcctggactttggccgaatccatggcgacgcccgcctcggagatgacgtggccaaggtagccgaccttcgccgcgccgaacgcacacttggtgcgttttaggaacagctggtggcgttggagctcctcgaggacggcgcggaggtgtcgaaggtgttctccccagctcttactgtagatcaaaatgtcgtcaaagaacaccagaacaaaccaacgaagaaacggtcgcaacacgtcattcatcgaagcctggaacgtcgctggggcgttgcacagcccgaacggcatcaccaggaactcgtagaggccgtcgtgggtgcggaaggccgtcatgtggacgtcccccgggcgcatccggacctggtggtagcccgagcgtaggtcgagcttggtgaagaacttcgcgccgtggagttcgtccagcaactcgtccaccaccggaatcggaaacgcatccttgacggtgagcgcgttcagcgccctgtagtcgacgcagaaccgccaggagccgtccggcttcttgacgagaagtactggtgaggagaacgccgagtcgctgcgtcggacaatgccttgctcgatcatggcggcgcactgccgctcgagctcgtctttgtgtgccgccgggtatcggtacgggcggaccgccacaggcagcgctcccggtttgaggatgatgcggtggtcacgggagcgcttgggtggaagaccgcgtggctcggtgaagacgtggttgagggagtgaaggagggcgtcgaggaggggctcctgggctggctggagctgtagtgtcggcgttggtggcgccgtgactgcgcggacggccggcttgtccgaggatgcgaggccggtccagcagacagcgcgtccctcgtgctggaactgcatagtccgcgcggcgacgtcccagacgatgggcccgagggttcccaaccactgtgtgccgaggacgaggtcgaaacctgccaagggcatgacgaagaggtcgacgtggaacgtgtcgccatgcaccctgatcggcgcgtcgcggatgacccccgggcaagtgacgcgctcgccgttagccacggtggcggtgagccttgggcgcggttggatgtgcatcccggagcggtacgctgcacgctcgccgatgaagttgtgcgtggatcccgtgtcgaggagggcgaccagcactgcggtcccgaggaacgctcggacctgtagcgtgtcgaaggttggcactccggccacagcatgtagggagtagatggggccctcctccgcggggacaacatcgcccgcggcgtcgactgccatctccagttcaatgccttcaatgtagaagaggcggcgacaggtgcggttgtggccgcgggagtactgctcatcgcagttgaagcacaacccgagccgacggcgttcctgctgttcttctacggagagacgacggcccggttgtcgctcgcgtgcggctggcgcagcacccgccggtggtgccggtagcgcaaggagtgggggcgcctgctgaggtttaatggcggccggtagagcgcgatgcgccggcttggccggggctgctgccatcttgtcgagctccatcagctccacttgccgagcgaggctcatggccgcagtcagcgtctccgggttgtgaagccggacggcgtggctgaggggtggaagcagacctcctgtgaagagctggactcgctgggcttcatcgagccgcccaacgcggaagagcaggctctggaagcggttggagtattcctccaccgtcccggtgcgtcggcactccgtcagctcgaagaggggcgccgagcgcagcgctggtccgaatcgcagatcaatgagatctttgaaacgtcccccacgacggcgtgccttcgtcctcctgaagttgcatgaaccattcctgggcgacgtcgtcgaggttgtatgacgccatcccgacgcgctcctcggccatggtacgctgctgacgaaaatatgactcacatttgttgaggaagaggcgcgggtccgacttcccgtcaaaacggggaaaatcccacttctggaacctggggggccgatctggttcacgaggaggctccatgcgattgccgccaccaacgccagatgacgaggatgccttgtccttcaaggaagccatctcgatcttcatctccttgatctccatcttgagctccgaatgccaggatttcatcatctccatgaggtcggccatgaagggctccgacatggtgttggagtgaccggtggaagtggtggaggctgagggcgagggtggggttgcaatctgtctagtggctgcggtggtggaagttgatggttgtgaagacgaggatcgtcggcttcgtgataccaggttgtcaagggcggtattgcccaaggtaggaggacctcggctacgtagatcgtagccttgactcgtggttgccggcagggttatgcccccacgccgagctacccgtcgacaggagaagttctcctggtcgccggtttagagaagagaggaagagacttgataggtaattcttgattgattcccaagtgccaccatacatggctatatatagctggtggcttacacaaatggagaaggttctccttgattgaagatctaatcaaaataggaaggatactaatcagctagctactttctctcctagccaatctccttctatgtttgctgcatgcacaatcaatcaggcggtcgccttctatgtttgctgcatgcgcaatcaattagatggctactttccatcctagccactcacctgctgcgcatgtgcctttgctgcctgctcagctcggcgcacatcgcgggctctcctacgcctggcgtatgtgtggccgtacatgacaatgtgtcttggcgacagccgggaatatggccttctccgggtgccaacaataatgatatatcaatttgattttctacatcagattcttttccattctcaagtatttcgtcatgtttgttttatctgtatattgaacatgctcattccctgtgttactagagatataaa

SEQ ID NO: 1192 - DNA, 18560 bp, Zea mays
  Intron number 1 from transcript GRMZM2G340325_T01 (locus G RMZM2G340325) derived from phytozome v7.0 (chr-ID 7; pos 1 11708896 to 111727455 reverse strand)
gaaggcggccaagttggcgagcgaagcggaggcccgtgagtatatggcaattgcagaagttactaaggaagccttatggttgaaaggtatatattcagagttatgtggaattaagtcttgcattaccatctattgtgatagccagagtgccattcatctcaccaaagatcagatgattactgagaaatccaaacatattgatattcgttatcacttcattcgtgatatcattgaaaaagggttggtgaaggtatgcaaaatcagtactgataataatccagctgatatgatgacgaagcatgtttctgttgctaagtttggtacggatcgttttagggtttcacctctataaataactttgtaagccgtaggacatatctatctcaattgtaaatctcctgcgatctgtaaccacccgaaaatagtgagaagttgccggccagcgcccgtggttttttccccttcactttagaggggttttccacgttaaatccgtgtcttctctgtgattgatcctatttgtgtcgcattcatttataacacggcgttttgagcaagctccgtgtcgaccggtgtgtcggtgttttgggtccgaccgcacacccggggttacccctcaaggtgtttctaggagtaggacggtgtcaacgactgtagcaaaatggttcgtgccgatcgcacgagggacagtggacaagatttacaggttcggtccgcttagagatgcgtaacaccctacgtcctggtgagtatgtttggtgagcgtggttacaagagggttctctggattgaagacacagagagttgatgtgggtggctaagtaagatagggtcgatcgttctgaaggggtgccccctaggccttatatactcgaccgtggggcagtacacgtggatatgataacaacaagtagctaaaaggtagtgaacctcttgagtttatccctacgtaaccctcgccaacttatcctcgcatggccccgttgcatgggggcttcagcgcgggaaagtcgggtctctgttgcgatttactcactcgacgttgtgggccatccgggtttgctccaatccggtctcacgtcgctctgctttgttggttgtttctcctcaggcccacgaaagaatgaccttacgatttattgggcccttgggcctttcgtgaggtcttttactcctttagtggacccgggggatatctatcccccacaagcccccgatctttgggttaatttagaagtaatcagcccaaagatcccaggtccaacttgcgggtgttttgaagaagaacgtcttcctgctgtcttctcttgctccgatcactcatttgaccgaagcttagtttcatgcttgtgccttagaggtcggcatttcaattttgtaggattctgaacttcattgggtgcaccggaggtgcacccaatgggtgtagcccccgagctttgagtagattttagaaaacaatctactcaaaggtcttccccagaaattatctccatttgtgctcatgcatcttggttgagggttggtcttttaatcttgtcccacgccttagaagtcggcactatttcggcttggaatgataatccatggggtgcaccagaggtgcacccaatgggtgtagcccccgaccttcaaatggattttttaaggataatccattcgaaggtcttccttttgtgcctctttgctgaaaattatccctttcgtttgtagaaattggcatgaagctatttgcattacgctttggaggtcagcattatgtcatcaatattttgctgcagaggtcagcatatattttgtctttagcagccgagtttgcaatccatccatatcttgctaggtagtgcaatttatttgcttctgcgactgattggacgtttgatggacgttctctgtccagtcttcacgtcgcttctatcggccatatattgtacttcgctggctatatttggctttcctctgatccttactgatatctcatttttgtcttgaggtattcactgcgtgccctgcacagatgtgaccgtttttgaaaaatatattgataattcctgggcgtccccccccaatgggtgtgggcaagggacgacttggtacgctgagtgttttagccggctgcttctgagtagtaatgtgatgggacggcgagtgtaatcatatcctttgcgctgttgactggagtcccaatgggtgtagtgttgcatgaaacggcgtcagccgtctgacgtgtcttcagacgggtggaagtgcttattgaatgctttgcgactgttcagtgaccacggttggaggtgagcggttgccttttccttctataaataacgctgttgcccctctggttttttcacatctcttcgttgttctttacttgcatccttctcttctctcccgtctgcttccgccatgggcaagagtaacaaacgcaagcgcgagccgactcctccgtcggaggacttcggcgactcggaatactcggaggaggagttctcctccgagtccgaggggtctccagctcccgtctctcccccgacgtcgtctgatgattcagacgactcccaggggattgccgcggaagtctggacgtacatccgggccgtcgagcgctccgggctcgagggctcggatgagtcggagtactcctcggatgaggaggactcggacggcggcgaggacgaggatgacgacgacgacgacgacggtggcgacggcgacggtgacggcagcggcagcgacgggggtagcggcggcggcgacgggagcaagggcagcaccagaggcggcagcagcaagggcagcaccagaggcggcggcggtggcagcagcagcaaggccagtggctaagcgccactggtctttagatattagtatagtgtagttagaataatgtagtagtaatgtagagtagtatagcgtagtatagtagtagtagtaatgtaatgtagtaatagtagggaagcatcaactcgcaaagagttgatttgtaagcttattgtcttcccttaatgaaagaatgacgttggcttcctcttgatgactcgctttgcttgattataaaactgattcttttgagatagtagatgaataacttgggcatcatactgacgcttctagaagtagctgctgagtaatcttgtagtcggtatcggcgttttagaggcaacgccgagcgattgaaggtcgacgtcggcattttagaagtaatgccgagcgatcgaacacgagatcagcgttttagaggcaacgccgagtgattgaaggtcgacgtcggcattttagaagtaatgccgagcgattgaacacgagatcagcgttttagaggcaatgccgagtgattgaaggtcgacgtcggcattttagaagtaatgccgagcgattgaatacgagatcagtgttttagaggcaacgccaagtgatagaaagttgacgtcggcattttagaagtaatgtcgagcgattgaacacaagatcagcgttttagaggcaacgccgaatgattgaaggtcgacgtcggcatttttagaagtaatgccgagcgattgaatacgagatcagcgttttagaggcaacgccaagtgatagaaggtcgacgtcggcattttagaagtaatgccgagcgattgaacacaagatcagcgttttagaggcaacgccgaatgactggaggttggcatcggctttttagaggtagtgccgagtgaccgaatatgaaaacagtgttttagaggcaacgccgagtgactggaggtcggcatcggctttttagaggtaatgccgagcaactgaatatgaaatcagcgttttagagtcaacgccgagtgactggatggtgacgtcggcattttagaggtaatgccgagcgactgaatatgaaatcagcgttttagagtcaacgccgagtgatagccggccgcatgagttattttgaggatgataaccgagtgatgagttggcgcatcggctttttggaaataactgccggatgaccacgtggcatgctggggcttcggaaataaccgccgggtgatgactgggcactttttgaaacggtatctggctcgagaatatcccataagagctgcgcttttagtgtaacacccggttttaaaggacaaagccgggtgcatctcatacatgcgccaagaagacaacatatataataacagagtgtatagagataaatgtcataaaacatcagagtatttattacatagcggaagacttattacaaaataaagataaatataaaacgaactaaggatcgtcggcgccaatgtcgactgagaaacgccacctagatcagatcgaactcctcgcctcgtggctcctcctgaaacacctgttcttctcctgtggggggggtgtgagacagcaagagtgagctcacatacgttcatcgctcaacaagtcgtggggaataatgtggcataaactcaccaaaggtgggagttcgtgtagtgtaaggctaatcaatggaataaaggctgaggctgagcattgcttttataagttggtcaaaattttattagcaattactaggtgtaagtaaataccaaaccttaataataataaagaacagtaatagtaaaataatcccaaatgcgatgcaaatgtcaaattgaatttaagttccatatttaatcatgtgagggtccgagccgctcttgaccgtgagcacggctagtatactagttttacactctgcagaggttgcgcatctttacccacaagtcgtgtatcccatgtcgcctgggtttgcaaggcccttagacactaccgaggtgaatggctagggatccactacgaggcctttacaaagttccactagcttccgaaaacccgctacagtttatgggaagatccagtaaagggttcctggctgatagccatcgcagcaaaatcaaccagggacctccccgcactgacctctcccctactgcccttgcccctttcgggtaaggtagtcttccactagctttcctaattagtcagccaagggcgtcccattaaacccttgtggtagcactgttttcccgggtggtcgctccatgttcccattaatttaatgatcttaacatgaacaacaataataacaagataataacagagtaatcatgaataatgaatctccatacccaatccacataaagcaatagcaagtactacccaaaaaaatattccaggggtgaacaaggtatagaggtaatcaaaactggggtacataaaggttcccatcaaaattaacctatgcagatcattaaaattaataagaacatggctgggaaaagtaagtgatcaagggcacaacttgcctgtaatgagctcctgctcagctatctctacttgttgaacctcagtttccacagtagcttgctcgtctactcgcatcaacacaatacatacatagtatagccaaaatcaacatcacaccaaacagatgaatgaaatatacagtaaaaatctacacattaaaatgaacccataggaactggaatcactgaatttggagttatagaatttaagttatgaatttcctaagatttaaggtgattataataggattagatgataaatttattttctaacagagttcatgttaaaacagtgattctaaatgacagagaataatattacaaaattttagaaattggaatgactcaatttggagctaaaatgaattttctatgcattttacaagtttctagatttgtttttgtattaaaaatgaatttctaatattaatttctctgtttttaatgctctcgggactgggcgtcaaataccagaaaactcaggggtctctgcgcaagatatcatagacacagtgaatagtaacgtatggacggcgggtttattatctaataagcgaagggctctttagcaaaacggccaatgaagcggtatgggcgagcctcggccgttggattagacttgggcgcgccagattaaatctacatctaagcgaaccggtacgccatccggcccgctggatccggaatcgatggtagcgattgaaaatagcgaaacccgatacggatcgtggattcgacgatcaacggcacagattaaatgacgcgaagcggtatgggagtcctgatctgggtcgaccatccccgcatcaacggctcacgctggttcgaacctagaccgtccgataagatcagacggtcccactgccccctaccctgagctaccgggtcacggcggcgccgcccacaccctacggcggtccttcgccgtcgtgcgccctgctccggcccccagagtcagtcccgactcgatttctagtgcatatccatgagcgatcgacagtgaacacgatgggagggtcattaccggcgttaggaaggttggtgaagctgctcccgcgcgcagtgcttccgcggcgacaacaccgcgacggtgagcaatcgccgccgccagggtcgacgaaatccgaggtcaccgggccgcccttctcccgtagcgaggccccggtcctatccccgaagcacggcgaggcacccgagtactaaatcgtggacgcggcgccgatggcgatggtgcgggttgcgctgcggtggtggatcctcccgatggcggagcagagcaatacggggcgagcgggggtttgcggaggtcccagagggtcttatcccccacaacgccgcgagctcggacccacagttccgcttttcccgcggggtggcgagcgacccggtcgtaacggcagccgaagcctccgcgcgatttctgttacgcgaaggggacgatcccgacaagtgggaccgaagaaccagtgactcaagcagcgggcgcgggtgatacactgaccgagcggctgacagagcgggtcccgcggcgcagcgagagagcgaagcgcgacgcaagggaggctgacgagtggagcccacccgtcggcgcaagctcgtgtcgaaggtggcccgcgcgggtggctgacgggcgtgcgggggctgagtccaggaatgggccgagcgcgggattccccccccggtgggccgaattcgtggctcagggcccaggtaaggtttatttctttttctttttatgtttttctgctttctttcttttaaatttgaatttgaatttagttttcaacccttgtgcacatttgttgtcaaatcatattctggaatatgaaatacaaatttttggaatatatttacattattttctttattttcataacatttctctacttcttttaaaccctagttttcaatgtggcttaatcaagcttccaataattattaccttatcatttttttatcattacggttttatttaatgcacaacacataaaactccaacaaatgcactttttctttattttagcataattgttttatctagtcactctcaattacataggtgctctttttatgatgcaaatgaaacacacaaaatgaggaactctcttcattacacttggtatacaacttgagtattacatttagccgcctttgctttccgtgccctagttcttgcattcccgcttctgaatcctctctgccattcgcctcctactctgtttgctggtgaaaatcgagatggcgcccaagaggaaaactgcgagctcgtctgctgcggtgatccctccaatcgaccccaacaaccagttgcctttcgcaggtaaccatatgtccatcatttccgaagctgaacttctccacctcgtatccatcggggttcttcctccacgggaactctgttcttggcggatttgccacgggactactgtcccgacagaggatacccacgagtctgtagtttacgctccttttcttctccgcggcctcggccttcccatctctccctttttccgcggcctccttgatttctaccacattaacttgacccatttgaaccctaattccattctgcaaatctccattttcgttcacttatgcgaagcctttcttggcgtgctgccgcatttcggtttatggaagtatttgtatcattgtcgccctgggatggtcgggggacaacatcagttggtcggaggtgccagtttggagatgcgtcgcgggcggaaaattgagtatcttgagattcccctcaaggacagtattaaggggtggcgtctagagtggttcatagttgataattatggaaattctctcccctcccggtcgggaagacagccagacgttcgcactccgagctggaccgagtctcccacagatcaggaagtggctgaggcaggtgtgttgctaactgaagttggactgctgaaagagagaggtctaactgctgaagctgtggtcgctgactttgttttcaagaacattcagccactgaaagacagggcctatccagcatatctgtatcgagggctagccgactcaactcgggttaccaataggagaattccttctgtagacggtaagccgacttgaaatgatcctcaggggtaaggtgtcaaatgttggtgctccagtggcatactcggcctggaacctgcctcctcccaaagctttcaccctttttgtgtcaaatccgcctgtgactgatggcaatttgggccttagagtgcgaccctctgctgaagaagtcagtactttggttgcttcgcttggggagattcctgatgacaaacggcaggtccattttgaggtgcctctgaaccctagtgatgcggatataaatgccatgcttgatctgctagctgaggattcctccgacgctgctcctactggtacgttggcagtggtgccccttccagaggttgatacaactttggatgtccagaaacctgtcagtactcgcccgaggcgccctagccgaaccagtcagcctgagccttctgctgatgagcaaaagaagaaaagaagacgcctccggcgagtatccagttttgatgaggacgctggtacctcagttcctgctgctgaagaagtgcctgcaactggtcttactgacgctgaccccaatgggtgtacccaaactgctactgatcccaatgtgggtgctccatctgttgctgatcccaatgggggtgctgcttgtgttgtcactatggaagatgaggaggaagaaaatgaggctcctttaactcggaaaaacagtcggcagttcatcgccagcggtgaaagtagtggagttccttctcctgctttgtctgccctcattggtctgcaagaactgtccctggccaactttgatcaaactcttgaggatatggtcccagaggacttgctatcaaagccagtggatgatgatgcaacggaggcttgcgctgccatgcctgatgctgggttgaggtcatcccgtgcctcgtcgaccttagagcgcgatctcgagggtcgggatgctgacttggattgtcctggtcccatggaagtggctgaaggcccgtcaaccttagaggtggttactgcggagagtttggacctcaagaatggtgctgacacatgcccagcccccgaggatgtcgccggggatgacttagctcgggtgaagagtgtaagccactgcccagcccccgagggtgctgccggggatgatccggctcaagtgggcagtgccaactatgacccagcccccgagggtgcccaagcagggtctccttcctgcacttccctggacgttcacgcgggatcacctccacactctggctgcatggtggtagcccaaactttggaccagggagtcgctttagagggcagcgtccctgctgatcgggcgtttggctctgttgaaggcactgagctgattcctactggtccgttgcaagctgcttcgggtggtggccttgcgcctggttatcagctgatttctcctgatttggggatcccttcgttcttttccaacctccaggtactgtgctgtattttagcttgttctttatgttgcatgaacttttgtcattatgttcatctgttcttctcatcaggctttggtggatgagatggccagccagctgagattgcagggtgcttccgtcccagaagtggcttcgtctcttgcgtgttggaatccagtgtcacttcatcgtcgtgtatccgagttggaggcaactaacgccggttagtgccctttttcttctcttcgcctttgttgtggactgttttaccttctgacctcgttttgtttgattacctcttgctaggaatgactcggcagattgcaattcttgaggaaaaacattcccgagatcaggctgaaatggttcaacggtgcgctgacttcgaggagaagtattctcagagccaaactaaactaaatcaggtctccgctgccttggatgacgccaatgccctgagttctcttcatgctcggcttgactctgaaaaggtaacttacaaaactgtgccttgccttgctatgctcctattgcttgcttggtttctgaaggagttgatttttgtttgtaggaagaaaaacgtatccttgctgcttctcgtgacaatcttgacagattgtatcgtgattctagcaactcgctgtcaatcttggagaggagtcaccgctttacaatggaggaactggacaatcaacgttgtaagctgcaagaatctgcggacgaagtgacccgccttaagcaattgatatcagcgaaggatgccaccatcaaagaactccgagcttccaagaaatccattgcccaggagttagaggctgctcggctggctgctaaagttgccgaagaaactgctgctactctcaaagcccagcgcgataaagccatggacaaggctattcgggctagacgaatcttaatgaggagacccggcgtggttgttcctgaagacataaaggctgacgtgaatgctgcccctgattcctcgagtcgcccttcttcgtcggtcgctcctgagaaagacattgcgaaatagagaaacattttgcgtgctctgagcgcgcagttagcatgatcgagtatttgttagaggacatcggtttatcattcgaatgacataattactttcttattgtatcagaatttattgattcgtaaatttgcggaaatgaaatgacgcatgatgattatgaaatttgtttgcgggatatggaagtcatcccctgaattacataggcgcgagtatgttgcactggcttaagtcgccactgactttagccgattgctccgttagtagggtatagtggtcaccccgagttaagtaagtgtgagcatgttgcaccgccttaagtcgttgccaacttaagttgattgctccgttcgtagggcatagtggtcaccccgagttaagtaagcgtgagcatgttgcaccgtcttaagtcgttgccgacttaagtcgattgctccgtttgtagggcatagtggtcaccccgagttaagtaagcgtgagcatgttgcaccgccttaagtcgttgccgacttaagtcgattgctccgtttgtagggcatagtggtcaccccgagttaagtaagcgtgagcatgttgcaccgccttaagtcgttgccgacttaagtcgattgctccgtttgtagggcatagtggtcaccccgagttaagtaagcgtgagcatgttgcacctccttaagtcgatgccgacttaagtcgattgctctgttttgtagggcatagtggtcaccccgagttaagtaagcgtgagcatgttgcaccgccttaagtcgttgccgacttaagtcgattgctccgtttgtagggcatagtggtcaccccgagttaagtaagtgtgcaagtcaatcgtaaacgaacagagtatctttgaaatctctctttattgatgacatatttccactttacagaatacattgtcgccccagcagttttgaaatacagttagggataaaactttctgaggtgctctatgttccaagagttcccaacttctgtgccatccatctgagtgaggcgatacgatccgggccgagtgacttctgctactatgaagggtccttcccataagggtgataacttgtgccgtccctcccccgttagaattcggcggaggacgaggtctcctactgaaaagaaccgttgccgcacagccttgtcatgataacgccttagagtctgctggtaccgtgctgattggattaccgcattcagccgttcttcctcaagtacatcgatgtcctccagcctggtggcctcagcttctgctgtgctttcgaagatcaaccttggcgccccaaacttgagatcagcaggtagcactgcctccgacccgtagaccatgaagaaaggagtgtttccatgcagggctcggctaggttgggttcttaggctccaaacaacataaggcaattctcttatccactttcctgcgaatttttcattcttatcgaagacctttttcctgagtgcctccaatatcattccgttggctcgctcaacctgcccgttggctcttggatgtgctacagatgcgtacttgatctgaatgctcttttgctcgcagaagtcgaagaattctgaactggtgaagttggatcctaagtcaatgatgatgctgtttggtatcccgaacctgaatattatgtcttgtatgaattccacggctttagcagaagttaaagaagcaatgggcttgaactctatccatttagtgaatttgtcaatcgccaccaatacatgagtatatcccccttgagctttcttgaaaggtccaatcatatccagtccccagcatgcgaaaggccaggttactggtatggtctgtagttgctgtgctggcatgtgctgttgctttgacaagtattggcaagcttcgcacctctgaactaactcggctgcatcgttcttcgctgtcggccaatagaatcctgacctgaaaaccttcccgactagtgttctggatgctgcatgtattccacattgccctgcatggacctcctccagaagttgcttcccagtggacgggagaacgcacttcatgaggatgcctgatgcgccccttctgtacaatatctccccaatgagtgtatagtgggccgactgcctggcaacgcgctctgccgagttcttgtcgtctggttcttcttcattctttatatacttaataatcagccttctccagtcatcagagtctgactcgggttgatctatgatgttgcactcttctgtttgatccattgagatactcggctgcagaatttcttgcacgaagactccgggtgggacctgagttcgactggatccgagcttggacagtacatcggctgctgtgttccgatctctttctatatgatgaaattgcagaccctcgaatttattttccagctttcggacggcagcacagtattttcccattgaatcgcttgaacaatcccattccttgtttatctggctgatgactaccagagaatcttcgtataccatcaatctcttgacgcccagtgatatggcgatgttcaatctgtgtatcaaagcttcatactcggctgcattgttagaggccgggaacagcaactggagggcgtacttgaggtgttcgcctccaggtgcggtgaagagaatccctgctcctgctccctgcagcttcagcgagccatcaaaatacattcgccatacttctgcagtttctggattatccggtacttgttgttctgtccactctgatacgaaatcgaccagtgcttgagttttgatggcagtgcgaggtcggaactcgatgtcgtgggatcccagctcgcaagcccacttggctattcggccaatggcttccttgttgtgaagaatatcccctattggaaaaccagtgactactatgactttgtggtcgtcaaagtagtgacgcagcttgcgggcagttagaagtactgcgtataatagcttctgaacctgaggatactttttcttcgaggggcctagaacttcactgatgaagtaaacaggatgttgtactggataggcatgtccttcttctactcgctcgactaccaacgcggtgcttaccacgtgagtcgtgcaagagatatacaatagcaaatcttcagccggttgagtcgacgtagctcgccggggtggtttcagtactggtggtgttgtcaagaatttcttcagtgcatctagagcttcttgtgcttctgaagtccattgaaacttatccaccttcttgagtagcttgtaaaatggcaaacctttttctcccagcctggatataaatctgctcagagccgccatacatccagtaagtcgttgaaccttcttttgtgaccgaggagcttccatcttcataatagcttcaatcttatctggactagcctcaattccccggtggctgacgataaacccgagcaactttcctgctggtaccccgaaaacacatttttcgggattgagcttccatctgtatcgtcacaggctgttgaaaaccagctgtaagtcttcgatgaagttttccgaattctctgttttgattaccacatcatctacgtaagcctccacacgcttgccccagtgatcggctaagcatgtttgaatggctctctgataagtcgctccagcgtttttgaggccgaacggcatggaggtataacagaaagcaccaaacggagtgatgaacgctgttttttccttgtcttcttttgccaaactaatctgatgatacccggaatagcaatctaagaaagacagcacagaacatccagcggtggagtccaccacctgatctatcctcgggagcccaaagggatccttcggacagtgtttgttgagatcagtatagtcgacgcacatgcgccaatccactttattctttttgagtacaagaacagggttggctaaccactcggggtgtaatacttctctaataaatctagctgcaaccaagcgagctaactcggtgcgaatggcctctctcttgtcgggcgtgaaacgacgtagcttttgccggatcggcctcgcctggggataaaccttcaacttgtgctcggccagttctcttgggactcccggcatatccgcaggttgccatgcgaatacatctcggttatcttgcaggaactggacgagcgcgctttcctatttgtcgtccaagctggagctgatgatggctgtcttgcgctcatcagcgaaccccaggttgattcgcttggtttcttcagtcgaccgcatagaggtcgcggcctgagcttcgtttgctggtactgcgaggtcctcctcaggcttagagttcgccagtgcagaagggaccgttgacggcttggtggtgagggctgcttggatggccactcggaaacattctgcggcgccttggaagtcggcgcgcacagttatgatcccttgcggtcctggcatcttcagtatcatgtatgtatagtgcggaatggccatgaatttggccaatcccggccttccaatgatggcgttgtacccgcagtcgaagtttgccacttcaaacctcaggaactcggttctgtagttctccggagttccgaaggtgaccagcatgtagatgtggcccagcgggtattccccctccgtcggcacgatgccgaagaaaggagtgtccgacttgtggagctctttgaggtgagcccccaagccttggagtgtccgggggaaggtgacgttgatgctgctccccccgtccactagcaccttcttcacccggctctctcggatcaccggatcgacgaggagcgggtatttgcccggatggtcgaagttgagccattgatcttcccgagtgaaggtgatcgggtgttctgaccaccgatatggggcgggaggaccggtggtcgccaccagtatctggcggtcgttgagcttttgttgtctcttgttctcctgcgacccatgtccgccgaagatgacgttgacctccctgtcgacgcgtgggaaagctcctcctcctccctcctcctgctgatggggttgtcgtggttcatctggtcctcccctcggcggaggaggaggtagaggttggaatggtcggccatgcccaacggagtgcttgaagtcccggcagttgcgaagagtgtggtgcatgtccttgtgatatgggcactgggcgtcgaggatgtcgtccagcgttcgctcgcctccgcgaggtcctcctcgggcgcgagaggcaggtggtccggcggcgtgtacttcttcgcgaggcctcttctcccagcgtttgtcgggtggctggttcgcgtcgcgtcgtggtgctgccggtgcaggctttgctcctctgatgaggtcctgagctcgctcgtcggcggtgatgtagaggtcggcttcccagaacagctcctcggaagtagtcggtgccttctgtaatatggctcggacaaaagccgagtcgttggatcccctgtagaagtcctcgatcacggccgcctccgtgacctcggggatgcgatttctcatggtctggaaccttttgaggtacgaccggagagtctcatccccccggcgcttgatggatttgaggtcccacggttgcgctggcttgtcggagagggactggaagttggcggtgaaacgtcgactgaagtctccccagtcgtcgatgcagtgtcggggtaaatgtcatagccactgtagcgcgtcttgcccaaggacgatgggcaaatatgcggtcataacgtcctcagatgccccggcagctcgagcagcggtggtgtagacggctagccaaccccctggatcctgcttaggttcatatttgtcgacattggataccttgaagttgggaggccattggatggccctaaggcgcggagtaagagcggacactccgcacatgtcctcctgtcgtcggggacgatgtctgtcccggggagaggagttgtgattgtggttcctcgaccgtccccgagtggtaccgccagttgaggccattgccgactcagtcctggtggcctgactctgagtcgggatgccatgaccccggtcgtactcctcccgacggcgaatctcgttctcatgccgccgttcgcgcgaagcattgatggagcttcgcgcgtctcggcgactgttgatggtgtgtcgtagatcgtttggcgggtgagcgagcggtagaagatggttggctgcctgggtgaacaggcgtcggtatccctcagcgtcgggagtccgaggaagtccatcagctatccgagctagtacccctccgacttcgcttgcgtgttcatagcttgggcgaagtcgggattcaggttgcgcccgaagagtggattctcccgacgttgtcttgcgtcttgctcagcttgttcctgagcccgtcggcgatcacgtcgtcgggagttccttcgttctctgaagacgcgttcttccggagtttctcctatctccgagacctcgtcttgcgagacaggctgctccggatcccgttctccggccgcgtgatgtcgtcgaacgttcctgcgccgattcctccgtcggcgggattctcgttgaggcggttcttctccgggtgcggtcagctcgtcgtcggagacggtaggcgattccactctcccgatgaagaggacgtcgaggtagaatggagctgctgtcgtggcgactttctttccgttctcctttgaggccggaggaacggaaagaacgacttgcttttccctggtctccttcttcttcgcgatccgtgtccattcttttgtcgaggaagtagacagcggagtcttccgggttagcgagccctcggcccccgactttccggagacgatctttttccgaagagctggaggttgcacctccccggcattttcggagttcgttggaggagacttctttttcggcggatccgcgatacggtgtagaattccctcttcgtccgctacagatgagattgtcccgaagcagaatacggatccgggacgcatggtgatcttgctgtagaaagtgatggccattgagctagcttggatcgtcgacacaccccctacctggcgcgccagctgtcggtgttttgggtccgaccgcacacccggggttacccctcaaggtgtttctaggagtaggacggtgtcgacgactgtagcaaaatggttcgtgccgatcgcacgagggacagtggacaagatttacaggttcgggccgcttagagatgcgtaacaccctacgtcctggtgagtatgtttggtgagcgtggttataagagggttctctggattgaagacacagagagttgatgtgggtggctaagtaagatagggtcgatcgttctgaaggggtgccccctaggccttatatactcgaccgtggggcagtacacgtggatatgataacaacaagtagctaaaaggtagtgaacctcttgagtttatccctacgtaaccctcgccgacttatcctcgcatggccccgttgcatgggggcttcagcgcgggaaagtcgggtctctgttgcgatttactcgctcgacgttgtgggccatccgggtttgctccaatccggtctcacgtcgctctgctttgttggttgtttctccccaggcccacgaaagaatgaccttacgatttattgggcccttgggcctttcgtgaggtcttttactcctttagtggacccgggggatatctatcccccacacggtggacctccatgggaagtgtttcaactgtctatctagcacccactttgttgctgagtgcagacaccctactcgctgtttccactgtcgtcttcttg

SEQ ID NO: 1193 - DNA, 4964 bp, Zea mays
  Intron number 2 from transcript GRMZM2G046824_T02 (locus G RMZM2G046824) derived from phytozome v7.0 (chr-ID 8; pos 9 9591190 to 99596153 reverse strand)
tgttgtttcttgtggtcggccaagattccagtgcggtaagtttagttcacacacttgttttccttgctacattacatgttgtgtgcattaatctatttagaattctgtgtatttgtccggtcagttcattactctaatagcccattttgctaactaaagattacattctagttagtggatatgattgtccttgaaaaataataggaggaaggtatatgagaaagaagaacagttggctccgtttaacttgctcccattgtggtgcttaaaattcgtggaccaagtagccaataggtcatatttctgggtgttaccttgctaccagaagtgcttttggtgattttgatttgtcaagtgcaacctgttgtgcgataaggcacatttttagcaactaaagttgattcccagatttagcaaataaaagacatacaagaaccacgataaggttgcagtaaacaagatgaacatttaatcagcacattaggatagatttatgctactcacaatgtcataagcaagcatcatggcaattgacacaataagcaggtaaatataactagaaaaaatgctacagaattatcctctaatgattctcagtacgggttgctaaaccaatggccatccaaggcttaaaaggcttttagaatccttgaccaagtatggtatcatccattttatcctagaatttagctcaactagttcacagttgatcaattacacacatcatgaagtatacagatcactttgcaatgagaaagtgctcaacagtgataaatgatcattgaacagatttattcactagtaaatcagcctatgctgccatacatgaatgtcactgaacccattcatcatcgagaatcacattcaaacctgcagttacaattcagcctttgatcaataataactgcttgttcgaggaataacgtgctaaacaggaaattagcattagatattgcacatataatgacatgtaggtgagtgcaacacacttacatagtccttgcagtgaagcaggacagagaggcaaagcacatttgcgcgtgtcccagaaaattattcaccccttctataccaaggtagtgcaggtgttatctttggagacatggtgctgctgtgccaactgcagggtacgctaaaactggcgcccaagtagcaggagatcgctgctactcagagcgccccaaactgcagtctaaaagtgataaacaactgcagtctctatttgaaggctcaaatttggctaggttctgtttatataatagggaacattgctgcctcattcactctggcaaattttgttggagttattcataatgcccttattctgttttcttcttttccctgagaccaacatgaaagaaaggaaattagtgcaagcttaattcactcagctgagaccaacgcctggattggcagatccatattttgtaaatttcttgagtcaatgtctgggagtgggagcaacctgtatgcatcgtcatcattaacttcaagtatcatgcttccacgcattgctgatactgatactgagtgcacaattgtttgatcacaaggagagagctgaacaggctgccaacctgagttattatataaagattcttttagggttatttactctgataaaaagttagtaagattctctgtttaaatctttatgtgattattaaactgacccaagcgaatccatgttaaatatttctacataacccacattttagttttgatatacatcctagtgaatccaaacattacatttagattttagtagttgacaatgaatttctttggtcatgtgatgctctgcttgaggacacctaatctcacatttttctcgtctttgtttactgtccatcaaaatcctgttggttggtggtgataatcgcaaacatttttttagaaagaaacaaaattcttagactctatgactcctgtaagaccaacaataattacattatgtttgacttatgcagtttgatcccaatggaagacagtgcttgaccatggaaggctacaggaaaattggacaaataatgaggcgcctggctgatcgccattgcaatgggcaaatactggttgtccaggaagggggttaccacatcacttattcggcatattgtctgcatgctacactggaaggagttttggatctggaagccccgctgcttgatgacccaatcgcttattatccggaggatgataaatacactatgaaagtcgttgacatgataaagagctactggaaggaatcggttcctttcctaaaggaaatttagaggaaataatgttcgcgccctcaatgttcaaattgcaggaaactccacattcctggacatcttcaattgaattgggaagaacattgcacgtctacgttttcaggccgtttaagattatctgattgacagtttcacgcctaacattgtacaggatagattaagaacattgtttgctgctgctcttgaatttctgcaatcaggatctcgtcagcctatttttgataaacagtcgatcttttttttttccctgagatgcttttggcggcagtagaaggtaggcggtgcttgagagtgacagagggccatgtaaccaggggataaatcttgattgactagtccaagcaaagggtgatgctcgctaccagaacttgaatgtgtttttttttcccatcaggttcatcctaggcatctgatggtactacaaattgcagcatgccgggacagtgaattccagtgcatgaatgaagcatatatgcgctggcaggaaaaaaggcccaacgttgatgccaaagaatcgtaatctttccggaaatgacctggaggaaggaacggattttttagtttttttaaatcatgtgtatgcttcttatgaaactaagatcacttttgaccataggattggcgttatattcaatatatgttcaagagacaatcatggtcaataagaacgtcaaatatagaagggctgacgtagacgccgttgtctctcgctactgtgcggtggtaatttgaaccttttgtccaacgtcttcctcgccgtattgcatcggattcttgcatatatttgctgcactttctacgtcaattactatttgattcgtggctaactgtgtcacattttacttaagattaattttttaaattgaaaaatcaatcttaaacaaaaagttagataaagtgtggcaatttaggcagcaaagcgaagtcaatccgaggaagtatatccccttcctataaccagtaaacaaacagggtctaatcattctaactccatttagaagtttgactttccttctctcacctgtttttgtgcgttgtcaattcccaagcgaaccaaaaccatccattgacaggcaaggcagctacagttacgggcgtgacgcccgcgtgaaaccagcgtctcgtgcatcctacggccaccggctttccccattttgtccttaactcaaacgcgcaagccaccccctcttcgcttccgttcctgtcctctcctctgtccctctacggtgcttctgctcgccggcccaaaatcgcctcatcgaccacgcccccttccaggctcccgtctccatgggtctcctctcaaacaggtcaactctcagatccaatctttctctggtatttgttcctagaatcatccgtattggctagtctcacatctctgcaggggcggttattttttttccttcttttgtgtgattttttctttgtgttgggacaggattgggagggagagcctcaaggcgggggatcatatctactcctggagggcggcgtgggtctacgcgcatcacggtgaggtgattcgtattgtattgcttttgcatatgcttactccgttgtatttaaacttcgattggacgattggatcacattaaattgccaaggttttgggctcatgaattggcgaaatgggacttggtttaaattttatgctacgaatttgctaaatggggacttggatcacattttataagctcaatgctaaaaacaagcatacggatttgcatatcagattctatattctatttatttgcaatcaaagataaaagaccaaaaaattgatatccaaataagtatatgctttcatccctattcttatcgccgatgtcgggtgctttgggttaggaggggatttctttgaagtctgaactgaaaatgattttaggatatagatctagttagcttcttgggggttggattgattctctagatatcaacaccagcaccactaaatgctgtgcatgctctgtcgcaccgatcttcagagtttgaagtataaactcaataggagttctatgtcagaccaaacaaaatagacaagttccatttggaactagatagatccccctaatcccgtggaaattgaattgatccctgtgaaatttttgccttcagatgcctccgtactgcctaccttcctcctcttctttttatttatcatttcccaaaaatttcctcccccatggatccctccaaataacgtttagggctggtttggtgatgagatttggaggggatccatgggagaggaaataccttgttgaatagcaagagatttcctcccccgtggatccctctaaatcctttgtctccaaaccagcccttagtactttgccgtatgcatagatgtttttggcctttgatcaccttttgacaggtgctacatgggaaaaatgaaattgttattacagattgtatatcgttgggtaaccttgtaggaataggaaacgttgtaggtattttttttggggggttggggggattttcttatgtaccatgaatgttccccttacctgttatatgccactcccacgcattgtgtcactgagacagtgacctaaacactgaacccaccttgtgaattgtgatgcattgaggagtttttaatggacacagttctatgcaatttgaggcgccattcacagtaaatttgttacagatgtaaccatacgtttctcgcaggaatat

SEQ ID NO: 1194 - DNA, 741 bp, Zea mays
  Intron number 1 from transcript GRMZM2G367023_T01 (locus G RMZM2G367023) derived from phytozome v7.0 (chr-ID 1; pos 9 8318953 to 98319693)
gtcctccttcgtaagcacacccccttcctgaatacccgcttctatcaacttcacatcccgctactatctaccgtgttgtgctgccgtgaacaaaaaaaaaaaaaatagaaatacaaggctgtgtttcttttcttttttgaaataaacaaaggcttagtttctgtaagcaattgtgctgtacaactctattctgatcaattgatgcttccatgcccaatctcatctagtactaccctacttcatgattcaacttgttgcatccttaagataattcaccagatctcatagcaccaggctacaagttcaagcagaactattgaagataattcacatattcacacattcattcttgttcagttgtttgcgattttttaactatatgaaaaatagtgccacaaaatgtgctcaaaataacgacatgctatgaaatactactccctccagtcagatccatatgatgtttcagacagcaagtctggcttgcttttaactttagtttgttgttcgaaatgtcatatataagtgactggatgtggtagatgattgtagtgtaccagttctatggtcattatttagatacctagctgattgcggagaccatctttgataacttattactcacataatgctgtattgaaagaaatactgttgtattatcatcacatgatgtctaatactttggttcttgtatctgaacattctgtagaaatttaaggtcactcctgtgggtgttgagctcct

SEQ ID NO: 1195 - DNA, 7505 bp, Zea mays
  Intron number 3 from transcript GRMZM2G012350_T02 (locus G RMZM2G012350) derived from phytozome v7.0 (chr-ID 2; pos 2 28335261 to 228342765)
tttctgatctagttatcacacactttctctccaaggtacggttcatcctgatttattagagggatggctcaagaactgtcattgtgaattatgattagcttttctgcttataatatgagacaaaaactattatatattattaatttgcattatctttatcaagcatctagttttgctagaacatatggggctttccagcaagtatagtttcttcatttattattaatcgaattgtcatttcgccacaattcaactaacaacttgcaaaaggacctctagctgagttggttaggtggtttgagtagcacttctcaggtcttgagtttgactctccgtggagcaaattttaggccggggttaaaaaatcccctcgtctgtcccatgccaaaggataggtccaaggtttggctctgatcgtggtcaatgctcacatgggctacggcccgggggttgtctgacccccacaagttgagtttttttgttagagattgtatctaggcatatcttttggatttataattgccttgtactccaagccatattggcttgtcttgtactccaagccatattggccctatgttatggtcactccctacctaagggtgtggtgtttcccatctatcttctacatggtatcaaaagtctaggttttcctcctgctgccttagtccactagccgttgaccctcttccctggcgccgcctcccctccactccttcgggtgcctcctgttactaaccttggggttcacaatagataatcagtccctaaggactataggttatatatataggcagtaggcctgggccttaacacccctcctcaaactcaaggtggaaatggaggatctgaagctttgagtttgatcaagtgaaactgatgttgtgctcttgtttgcgctttggtgaagaaatttgccaattgagattccgagggcacatattgaagatcaatagtcttctgctgacaatgggatcaagtaagagatgcatcaacaccgatgtgtttagtaagttcatgcttcactggatcatgagcaatctgtatagcactcaagttatcacataacagagctgtaggagtgtcacaagagacaccaagatcagccaagagccaacgcaaccaaataatttcagcagtggtagtagcaagtgcccgaagttcggcttcaacactagaacgagatatggccgcttgcttcttggatttctaggcaatgggagatgatccaaggagaatacagtaacctgtagtagaacaacgttcaacaggatcacttgcccaagtggcatcagaatacacatgaagctgaagtgggctattagaagcatagagtaaacatctggatcttgtcccgcgtaaatatcgaagcacacgaagcagatgaccatagaactgaagttggtgttgatacaaattggctcaacatatgaacaacatgagcaatatcaggtctggtgatggtaagataaacaagactacccacaatatgacgatatcgagttgagtctgctagtggtgtcccatcctttgacgaagttttaaatgaatatccattggtgttgcaactgtgcgtctatcagtaattctagagcgatcaagaagatcttgtatatacttggactgagacagataaaagcccttttgagtccgctgaacttcaatcccaagaaatagctaagtggtcccaaatcagacatctgaaattccttactaagatgctgcttgacataaggaatatgttctgagttgtcacctgtaatcagcatatcatccacatataatagaagtaaagtgcggccttttggagagacatgaacaaacaatgcatgatcatgttcactagaagaaaaaccatcagctgtaatggcagagatgaatcactcaaaccaagcatgaggagcttgtttcaggccatacaatgcgcgacgaagacgacaaacatgccctgaaggagtatcaacccccggaggaggatgcatataaacttcttcatgtagatcgccattgagaaaagcattcttcacatccatcttggagatagaccaagaagatgaggctgcaactgcaatcaatgttcgaacaatagtcatatgcgcaacaggtgcaaaagtctcatcataatcaagtccttgagtctgttgaaagccacgagccacaagacgagctttatacctctcaatggaatcatctgattttgtcttaactttgaagacccagtgacccacttacatgtgataggaacaacatgtgagggtaaaggaacgatatcccatgtaccagtgcgttcaagagcagccaattcatcaatcatagctagctgccactcgagaatcctagaagcttcctgatacgtagtgggttcaacaattgctaattgttaatttgcgaggatataattgtcttgaatcaacttattctattaaaaataaacaaaagtaaataatgatcaactacatcattccaccaaccaaacatccaataataggatgcaacttgaaaacaaattcaagcttgaaaattgaattcctagggcaaagatctagaagactcaaaatggttagggacaatatggtaaatctgacgaaatagagatatcaagttctcaacacgagctcaattccttcccgcagcgcagttgctcaagtcagcaaactgaacctgtccggatccgtgcgccgccgccgagcacccctcgacgccagcggcgatggcagccgacgacgtgcgcgagctcctcgtctccaccacagccgacgcctctgacccgtacacgcccctctcagtgcccgacctccgcctcctcatcgaccgcctacgctttcgctcccaccgcctgcacgcctcagccctctcctccgctgcctctaaccgcggggtcctcaccaatgctctcctctgcgtagcctccgccgtcgattcctcctcctccctcgagtcttccctcgactctgcgcttgccccgctcgcctcctggcccgacctctccgacctcagggcccttgccgacgccccctcgctgcccgccgcgacctcgctgagcgccaggagcacctagccgctgcctccatgattgcctcgctttcctcctgcctccgcgaggcccgtgccgcagcgagcccccttgacgcggccgctgccatcgctgaactcaagaccctccttatcgatctcgagcgatctggatctggtcaagacgacccggtcgtatttaggctcctcaggagcgactgggagcaacttatcgacgaggtgatgatgaaattccgctttagaatgatttagcttatgtcagtgtttgcatttgtgctaatgctaattgttgttgttgggttgtggttatgatggtgatacagctgcaagttaggctttcgaagaatgtggaggagtgtgtggtccttgatcgcgccacaaccaccgattaaaccgcgcatgctttggatcaccttgacaacctctttaccgccaacaaagttatatggccgatctttttgagtcatgagtttcactccatgacctaggtcatcatcgattattgcaagcagatgaagattctcgccagcgcccttcgtgaagtcggtgtcatcattgacgatccctagctcgtcgtgaacctccttttggcctcaatgcttgctacaccaacactgccgacgacatcaccaacaccaaacccctgtcgtccttcatcgaagcacacaacatgctggtcctcaaagaactgttcctcgctaacgacgtcaataatgcctagtctaccaccctccttgtcaatgacactgacaatggtgggggctgttctggtggctgcaagggccctgctacctcatctcaggaaggacactgttgcctcaactttgccactcgtcgtgttagcatctctcgccatgtcatctttgacgaacaagtcttccccttcaccacgtcctctctgccatggtcacgctctttcgattttcttgctactagtgatgtggcaacttccttcgtcgtctcgactgcggtcactctgtcctttatgggtgttgagcaatcgctcccttccatatgtgatccatcctccgctgacgttgagcagtcgctctagcaatccctcccttgattcgttggcctcccctacttctattgctcggacatccatgttgtgcctgctgcactggctcctgctgtccgatttggacatgtctatgaacgccgccccctgcctgttccaccggtcgctccagcttgatggtttggttcggtctttgtgcatcggcctcagtcggccaacatccatgggccgctgccggctaggcgctctgctgcttcacctatcgcccctgtggcaccctctcctccatagtgtcccatgcagggcgccccgccttcgacacttttgcgggtcatcaccattcaccaggtccatgatatcttaaggcgcttgtctacaacttcagtgctacaaatcttctgcctccctggtgctataaagctaccatagtgcgcctgactgctcaccgacccacatttgtgggctgctatgactgatgagtaccgagcgatgatcgacaacgacacgtggcgtcttgtcccttggtctcctgacgccaatgtggttacagggaagtggatattcaagcacaagtttcactcggatggtatgcttgcttgccacaaggcacactgggtggttcgaggcttttcacaaccgcatgacgttgattacgatgtgaccttcagcctggtggttaaacttgtcaccatttgtgttgtccttagcattatcgctttttgttcccagcccattcgtcagctggacgttaagaatgtattccttcatggccaccttgcggagatggtctattgtcagcaatcgtctagctttgtcgaccccttcgctcctaatcatttttgtcttctatagaaatccttctatggtctgaagcaggctactcgggcgtggtaccaacgctttgccacatacatacactgccttgggccatcattcgaccttagacacgttcctctttgtatacaaagatggagaccatgttgcctagttgcttctcgatgttgacgacatcatccaaaccgcatcctcaacgcatctgctacaacacttcaccgtgcgtctctacattgagttcacctcggcatctctgtcacacgctccattgacgacttcttcctctcccagcaacaatatgctattgaccttctgcagttggctggcatggccgagtgtcactttacatcatctctcgttgacacttgtgccaagctctcttccatcgatgacgcacctgctgctgatccaaccacgtaccggagtctcgttgctgactcggcatatgctgtaagcaggtctgtctctttatgcatgatcctcgtgagccccatctcgcattgattgagcgcatcctccagcatgtcaagggcacactgtgttatgacctttacactattattggtctggttcagtccttgactccttacacagatgttgactgggttggctatcctgattacccagcgttctacctctagttaatgtgtctaccttgggcgataatatcgtctcttggtcctcaaaacgacagatgattgtctccctctctaggttcgagacaaagtaccatgccatcgcccatggtttcgctgaatggtgctggttacgacaactgctataggaacttcacatctccgttctttcggtgatcattttgtaatgtgataatgtgagtgttgtatatgtgatagccaatccagtgcatcaccatcgcacgatgcatattgagatcgacatacacttcgtccacgagaaggtcgccttgagccaagtttgggtgttccatgtgccgttctctcaccagttcgccgacatcatgaccaagggcttgtcttcagttgttttctgatttttggcccaatcttcgcgtctggttttctcttgctgcgactatggtcaggtgttggagattgtatctaggcatatcttttagatttgtaagtgcctcatactccaagccatattggcttgccttgtactccaacccatattggctctatatatatggttacccctcacataagcgtgtggtgttttccatctatctttctacattttgtcaatctttctttgctatataaactaatcctttgattggttcaactcatcaactgcaaatatatgatttgaatttgatttgcagccatccaccttttaattcttctaattgctgtagtgagcattatgtgatgttacaaagaatgcatataaaatcactaaagcacatgttgtgttaaccctctgttttggttatagtatcacacttgtcaccaactaaacgtttgtgtcctacaataagaagaaccatctgtgctagagaaaggaacagagggacctaacactatccttacaaattacaatcaactttgggattcgatgagcttcctattttcacttttccacttttcttgtttgtagacattttgatggtataattctataactacactctatgtgaagttagttttgttgattatccttactaatataaatcacgagtttcgtcgtgcgtctttccccctccccacgcgcgtaccaagtgtcgccagcgtttcccgcacgccagcgaaatatcaaaaaaagttcaactatcaggattcgaaccgtggtctctgggaagagagcactcgcttctaaccactgcagctcatattggtctgtgttgtacaaataaactgtatatcatatatagaagggtaactaactagtattctcatgaattggactccctctgtcttgaaaagaatgcaattctagcataataccaagtcaaaccattctggcttgaccaagtacaattgtcaatatttattataccaaataagtgtcattagattcatcatggaatacattttcatggtatatctatttggtgtcataactattgatactattttctataaactcggctatactttatattgtttgactaaggacaaactttagataatagacatgttagtttaatatggtgcatttttgggagtaggctctgcccttgtattttctctttgcttaatgaaaggacacagctctcctgcactgcaccgctcgagaaataccccctctaatctcatctttttcaggacggagttagtatctactatctactaacctaggtattgctcggctcagaaaatatatatgtagaataactagaaaatacgttatccctctaatccgcactttgcattatcgaacctaccaccaattgaaaacttgagacaaatatatttttgtagttccatgatgggaataatcgaatttggtgaaaaagaacatagtgatatgagctaacttacaaactgcacttattagctacaggaaacttagggttctatgaacttccttgtttaagttttcttgctttagacatttgcattgcaagctggcagctgctgtttcaggtagtttttgactgatgctttaattatgtgttttcaggctgtaccaa

SEQ ID NO: 1196 - DNA, 16917 bp, Zea mays
  Intron number 3 from transcript GRMZM2G021587_T01 (locus G RMZM2G021587) derived from phytozome v7.0 (chr-ID 2; pos 1 97936871 to 197953787 reverse strand)
gagtatcgctgccactgcaacgccctcttctccaggtccgttcctccgatccatagtcgattcccagaccaacggcgaatctagaaaaaactagaagggggtgtttctaacttgtgggtgcatagtcaagactcaagaggtgcatattcttttccgcgaaattcaagcatgcatgcaattggtttgcactttgcacggcctactaatacagtttgtactcagtcaaaaatgatatgtttgcaagggtctgcgcttatttagcactgtctacaagtgaaaggaagcttgctactacattgtttgtttcctcttgctaaggtttagcactgcattttttactaaagtttatctcctaggaaaccaaacaggaaaactaaaagtgatgtgctaaagttttgcgttcattagcactttagctccaccaaaaatactaaaccgtgctaaaaatagtttccaacctcatttttagatataataagtttagcacttatatctaaacggctctcaagtgctaaagtttagcagcactatagaaacaaataggatagtgaatcaaatactatcactaattaatgaaccatcgctgtaaattaaccaccatgtagtgtatctgttctaaaatgtactcaatagagaacagatggcatatgattcactaatttaatgtatagcgcacataaataagtagcttagttatagattttttttcttctataaataagtagcttcctgtccttgtagaattttcactcaataaataagtagacttcctataaaaaaagtttaatgatcggctagatattattggtttaatattaagtatagcttacttttactcattcaagattttgtatgcaatctttaattaataaaaatcttatgctaataaattgccagttactactccggtcaaaaatatttgccacacttgacttgcactcttcaattcgatctgtacacagaatacggggtacccactcctgctatattaaggtgagtcctcgagggccaccgttaaggatttcataggcaaccgactcagtatggggctaaggcacaccatatggagtcatggctaggccaggctcgcctcttaggctggagcgctgtttccatcaagcctcataaagggaggaatcaacaacttcatctataggtctagggtcctacaaataggacccggacctccctatgacccaacggatccccagacaaagggatccgaggggagcataaagccccggaagagaatacactttatctggttacagcagcaagccttcagaacggctccaggcatggaaaatacatacgagcctcaggcaaggtgaggtccgaaaccgctacgtgtctaggaaggggcggcaggagcctagaccccctcgggtgcgggtcgagcccacaattgggaaagacttgggaaaacaatgtcaccacttatccccaagtctgcccctcgcccagataggggtccggtgctaacacgtggctagacgcccctagagtaagccaccgggcgatgactgacaaaaagcctctgacataaggctcaccagcatcgagtatagatgggatacatacttacccacactagcagcaggtagcgtatcccacacattaaatgtgtgcagcaagccaggactataacatgtggtttttattgttacctgcacgttaccgagacaaggggcattgacctagggcgtcgtttggatgcctttcattatgacttctactgttctttgtgcgttatcgaggcatgaagagacggacagagaagactagacgacaccgcccattacactctacgcacgacaacgtactagactacgccgcaacctacatcgaggtctgcgttccgattagacaggacaaggtggcaagataaggatgccagaagatcatgcagtgcccaagaagggatacgagctcacgaagatctagtgttgtcagcgctatccagttgtttctcattccatattgtaaactctcctaggcccacctgtcagggcctaaactcccttgtaacgtgcctcccttggactataaaagggagagcacttgctccgtagcaagggaggtcgattcacactcagatcttcgactcccagtcctcaagcaatacaactcacaatggatgtagggtattatgctctgacggactgaaccactctaaactcttgtgttcatctagacggccaaacacaatcacctaagcctactcctcatccgagtatcagggcgggtccaagccgccacccgactagaggattcctgaaagtcgcctagagggggggggggtgaatagggcgaaactgaaattctcaaaaataatcacaactacaagccgggttagcgttagaaatataattgagtccgcgagagagggcgcaaaacaaatcgcaagcgaataatgaggtgagacacgcggatttgttttaccgaggttcggttctctcaaacctactccccgttgaggaggccacaaaggccgggtctctttcaaccctttcctctctcaaacggtccctcggaccgagtgagcttctcttctcaaatcacttgggaatcaaacttcccgcaaggaccaccacacaattggtgtctcttgcctcaattacaagtgagtgtttgatcacaagaaagaatgcgaaagaaaagaagtgatccaagcgcaagagctcaaatgaacactacaaatcactctctctagtcactagggctttgaatgaagttgggagaggatttgatctcttttggtgtgccttgcaatgaaagctagctcttgtaaggtggttggaaggtgaaaacttggatgccatgaatggtggggtgggttggggtatttatagccccaaccaccaaacttgaccgttggctgggctgtctgttcgatggcgcaccggacagtccgttgcacaccggacagtccggtgcccccgccacgtcaccagtgccgttggaaatcgaccgttggagttctgacttctgggcccgccttgatgtccggtggcgcaccggacatgcactgttcactgtccggtgcgccggcatgggcgactctgaccctgcgcgctctgcgcgcgcattaaatgtcgtcgcaggtagccattggcgcctgaagtagccgttgctccgcagatgcaccggacagtccggtgcacaccggacagtccggtgaattatagcggagcggctgcagtgaaaacccgaagctggcgagttcctgaggccgcccttccttggagcaccggacatgtccggtgcacaccggacagtccggtgaattatagcggagtggcctctgaaaattcccgaaggtggcgagttcgagttggagtcctctggtgcaccggacatatccggtggtgcaccggacactgtccggtggcacaccggacagtccggtgtgccagaccagaggtgccttcggttgcccctttgcatttttgttgaactcaacacttggtctttttattggttaagtgtgaacctttgacacctgtataacttatacactagagcaaactagttagtccaaagatttgtgttgggcaattcaaccaccaaaattatttaggaactaggtgtaagcctaattccctttcaatctccccctttttggtgattgatgccaacacaaaccaaagcaaatatagaagtgcataattgaactagtttgcataatgtaagtgtaaaggttacttggaattgagccaatataactacttacaaagatatgcatggattgtttctttcttatttaacattttggaccacgcttgcaccacatgttttgtttttgcaaactcttttgtaaatggtcaagggtaaatgagtaagattttgcaaagtattttcaagatttgaaattttctcccactgtttcaaatgcttttcctttgactaaacaaaactccccctaaaggagatcctcctcttagtattcaagagggttttgatatatcatttttgaaatactactttctccccattttgaatacaataggataccaattgataaatactcttggaaaacactaagtttttgaaattggtggtgcggtccttttgctttgggctcatactctctccccctttggcatgaatcaccaaaaacggaatcattagagccctggaagcaatgtcttcctctttggtcataaacaaatgagttaagattataccaaagatgaagtccttttgttctctcccccaaagatggagagtggcttggagcgacggcgaaggatgggttgcgcagtggaagcctttgtcttcgccaataattccaattccctttcaatatacctatgacttgatttgaaatagacttggaaacacattagtcatagcatataaaagagatatgatcaaaagtatataaatgagctatgtgtgcaatctaacaaaagaagttgcgggaatcaagaatattgagctcatgcctaagtttggtaaaagtttgttcatcaagaggcttggtaaagatatcggctaattgatctttagtgttaatgtaagaaatctcgatatcccccttttgttggtgatccctaagaaaatgataccgaatggctatgtgcttagtgcggctatgctcgacgggattgtcgaccattttgattgcactctcattatcacatagcaaaggaactttggttaatttgtaaccgtagtcccgcagggtttgcctcatccaaagtaattgcgcgcaacaatggcctgcggcaatatactcggcttcggcggttgaaagagcgaccgaattttgcttctttgaagcccaagacaccaaggatcttcccaagaactggcaagtccccgatgtgctctttctgttaatcttacaccccgcccaatcagcatccgaataaccaattaaatcaaatgtggatccccgagggtaccaaagcccaaacttaggagtataagctaaatatctcaagattcgttttacggccgtaaggtgggattccttagggtcggattggaatcttgcacacatgcaaacggaaagcataatgtccggtcgagaagcacataaatagagtaaggaacctatcatcggtcggtataccttttgattctcggccttacctcccgtgtggaggtcgagatgcccattagttcccatgggtgttttgatgggcttggcatccttcatcccaaacttgcttagaatatcttgagtgtactttgtttggctaatgaaggtgccttcttggagttgcttgacttgaaatccaagaaaatactttaactcccccatcatcgacatctcgaatttctgtgtcatgatcctactaaattcctcacaagtagattcgttagtagacccaaatatgatatcgtcaacataaatttggcatacaaacaaatcattgtcaagagttttagtgaatagagtaggatcggcttttccgactttgaagccattagcgataaggaaatctctaagacattcataccatgctcttggggcttgcttgagcccataaagcgccttagagagcttatagacatggttaggatactcactgtcttcaaagccgggaggttgctcaacatagacctcttccttgattggtccattgaggaaagcacttttcacgtccatttgataaagcttaaagccatggtaagtagcataggctaataatatgcgaattgactcaagcctagctacgggtgcataggtttcaccgaaatccaaaccttcgacttgggagtatcctttggccacaagtcgagctttgttccttgtcaccacaccatgctcatcttgcttgttgcggaagacccatttggttcctacaacattttggttaggacgtggaactaagtgccatacctcgttccttgtgaaattgttgagctcctcttgcatcgccaccacccaatccgaatcttgaagcgcttcctccaccttgtgtggctcaatagaggaaacaaaagagtaatgttcacaaaaatgtgcaacacgagatcgagtggttacgcccttatgaatgtcgccgagaatggtgtcgacggggtgatctcgttggattgcttggtggactcttgggtgtggcggcctttgctcttcatcctccttgtcttgatcatttgcatctcccccttgatcattgccgtcatcttgaggtggctcatttgcttgatcttctacttcatcaatttgagcttcatcctcattttgagttgatggagatgcttgagtggaggaggatggttgatcttgtgcatttgtaggctccttggattccttaggacatacatctccaatagacatgttccttagtgctatgcatggagcctgttcttcacctatctcatcaagatcaacttgctctacttgagagccgttagtctcatcaaacacaacgtcacatgagacttcaactagtccagtggacttgttaaagactctatatgcccttgtgtttgagtcataaccaagtaaaaaaccttctacagtcttaggagcaaatttagattttctacctcttttaaccagaataaaacatttgctaccgaagactctaaaataagaaatattgggctttttaccggttaggagttcataggatgtcttcttgaggattcggtgaagatataaccggttgatggcgtagcaagcggtgttgaccgcctcggcccaaaaccgatccgaagtcttgtactcatcaagcatggtccttgccatgtccaaaagagttcgattcttcctctccactacaccattttgttgaggggtgtagggagaagagaactcatgcttgatgccctcctcctcaaggaagccttcaatttgagagttcttgaactcggtcccattgtcgcttctaattttcttgatccttaagccgaactcattttgagcccgtctcaagaatccctttaaggtttcttgggtatgagatttttcctgcaaaaagaacacccaagtgaagcgagaataatcatccacaataactagacagtacttactcccgccgatgcttatgtaagcaatcgggccgaataggtccatgtgtaggagctccagtggcctgtcggtcgtcatgatgtttttgtgtggatgatgggtaccaacttgcttcccggcttggcatgcgctacaaatcctgtctttctcaaaatgaacatttgttagtcctaaaatgtgttctccctttagaagcttatgaagattcttcattccaacatgggctagtcggcgatgccagagccaacccaagttagtcttagcaaccaagcaagtgtcgagttcagctctatcaaaatctaccaagtatagctgaccctctaacactcccttaaatgctattgaatcatcacttcttctaaagacagtgacacctacatcagtaaatagacagttgtagtccatttgacataattgggatacagaaagcaaattgtaatctaaagaatctacaagaaaaacattggaaatagtatggtcaggtgatatagcaattttacccaatcctttgaccaaaccttgatttccatccccgaatgtgatagctcgttggggatcttggtttttctcatatgaggagaacatctttttctcccctgtcatgtggtttgtgcacccgctgtcgagtatccaacttgagcccccggatgcataaacctacaaaacaattttagttcttgactttaggtacccaaacggttttgggtcctttggcattagacacaagaactttgggtacccaaacacaagtcttggagcccttgtgtttgcccccaacaaatttggcaactatcttgccggatttgttagtcaaaacataagaagcatcaaaagttttaaatgaaatggtatgatcatttgatgcactaggagttttctttctaggcaacttagcatgggtttgttgcctagagctagatgtctcacccttatacataaaagcatgattagggccagagtgagacttcctagaatgaattctcctaattttgctctcgggataaccgggcagggtataaaatgtaaccctcgttatcctgaggcatgggagccttgcccttaacaaaattagacaatcttttaggaggggcactagttttgacattgtctcccctttggaagccaatgccatctttgatgcccgggcgtctcccattataaagcatgctacgagcaaatttaaatttctcattttctaagttgtgctcggcaattttagcatctagttttgctatatgatcattttgttgtttaattaaagccatatgatcatgaatagcattaacatcaacatctctacatctagtacaaatagatacatgctcaacaatagatgtagagggtttgcaagaattaagttcaacaatcttagcatgaagaatatcatttttatctctaagatcggaaactgtaactttgcaaacatcataatctttagccttagcatttaaatttttattttctactctaaggctagcaagagaaatattcaattcttcaatcctagcaagcaaatcatcattattatctttaggattggaagttgaaacaatgcaaacatgagaatcaaccttagcatttaaactagcattttcattcctaaggttgtcaatcatctcacggcaagtgcttagctcactagataatttttcacatttttctacttctagagcataagcctttttaaccttaacatgtctcttgttttctttaattagacaatcctcttgggagtccaaaaggtcatccttttcatgaatagcactaatcaattcatttaatttttctttttgctccatgttaagattggcaaagagaacacgcaaattatcctcctcatcactattattatcatcactagaagactcatatttagtggaggagttagatttaaccttcttccgtttgccgtcctttgccatgaggcacttgtggccgacgttggggaagagaagtcccttggtgacggcgatgttggcggcgtcctcgtcatcggaggagtcgcttgagctttcgtcggaatcccactcccgacaaacatgggcatcgccgcccttcttcttgtagtacttctttttctcctttcttctccccttcttgtcgtcgcctcggtcactgtcacttgatataggacatttagcaataaaatgaccgggcttaccacatttgtagcaaaccttcttggagcgggacttgtagtctttccccctcctttgtttgaggatttggcggaagctcttgatgacgagcgccatctcctcattatcaagcttggaggcgtcgattggttgtctacttggtgtagactcctccttcttttcttccgtcgccttgaatgcgacgggttgagcttcggatgtagatggatcatcaagctcgttgatcttcctcgagccttcgatcatgcactcaaaacttacaaaatgcccgattacttcctcgggggtcattttagtatatctaggattaccacgaattaattgaacttgagtggggttaaggaaaatgagagatcttagaataaccttaaccatttcgtggtcgtcccacttgacgctcccgaggttgcgcacttggttcaccaaagtcttgagccggttgtacatgtgttgtggctcctcccctttgcgaagccggaaccgaccgagctccccctcgatcgtttcccgcttggtgatcttggtgagctcatctccttcgtgcgtggttttgagcacatcccaaacctccttggcgctcttcaacccttgaactttgttatactcctctctacttaaagaggcgaggagtattgttgtcgcttgagagttgaagtgctcgatttgggccacctcatcctcatcataatccttgtcccctacggatggtacctgtgcaccaaactcaacaacatcccatatacttttgtggagtgaggttagatgaaatcgcattagatcactccacctagcataatcttcaccatcaaaagttggtggtttgcctaatgggacggaaagtaaaggtgcatgtttagaaatgcgaggatagtgtagggggatcttactaaacttcttacgctcttggcgtttagaagttacggagggtgcatcggagtcggaggttgatgttgatgaagtgtcggtctcgtagtagaccaccttcctcatcctcttttgcttgtccccactccgacgcggcttgtgggaagaagatttttccttcttctctttgtggtgagaagaagatttcttctccttccctttgttggaggagatcttcttcttctccttcctcttggtgcgggactcttccgatgaagtgctcccgtggcttgtagtgggcttttcgccggtctccatctccttcttggcgtgatctcccgacatcacttcgagcggttaggctctaatgaagcaccgtgcctctgataccaattgaaagtcgcctagaggggggggggggtgaatagggcgaaactgaaattctcaaaaataatcacaactacaagccgggttagcgttagaaatataattgagtccgcgagagagggcgcaaaacaaatcgcaagcgaataatgaggtgagacacacgggtttgttttaccgaggttcggttctctcaaacctactccccgttgaggaggccacaaaggccgggtctctttcaacccttccctctctcaaacggtccctcggaccgagtgagcttctcttctcaaatcacttgggaatcaaacttcccgcaaggaccaccacacaattggtgtctcttgcctcaattacaagtgagtgtttgatcacaagaaagaatgcgaaagaaaagaagcgatccaagcgcaagagctcaaatgaacactacaaatcactctctctagtcactagggctttgaatgaagttgggagaggatttgatctcttttggtgtgccttgcaatgaaagctagctcttgtaaggtggttggaaggtgaaaacttggatgccatgaatggtggggtggttggggtatttatagccccaaccaccaaacttgaccgttggctgggctgtctgttcgatggcgcaccggacagtccggtgcacaccggacagtccggtgcccccgccacgtcaccagtgccgttggaaatcgaccgttggagttctgacttctgggcccgccttgatgtccggtggcgcaccggacatgcactgttcactgtccggtgcgccggcatgggcgactctgaccctgcgcgcgcattaaatgccgtcgcaggtagccgttggcgcctgaagtagccgttgctccgcagatgcaccggacagtccggtgcacaccggacagtccggtgaattatagcggagcggctgcagtgaaaacccgaagctggcgagttcctgaggccgcccttccttggagcaccggacatgtccggtgcacaccggacagtccggtgaattatagcggagtggcctctgaaaattcccgaaggtggcgagttcgagttggagtcctctggtgcaccagacatgtccggtggtgcaccggacactgtccggtggcacaccggacagtccggtgtgccagaccagaggtgccttcggttgcccctttgcatttttattgaactcaacacttggtctttttattggctaagtgtgaacctttgacacctgtataacttatacactagagcaaactagttagtccaaagatttgtgttgggcaattcaaccaccaaaattatttaggaactaggtgtaagcctaattccctttcaattccccctccgataaattcattgtgtaacaacactagagtaggtagagtattagagggggagagagagagttaggagggagcatgtcgtgtgtcgatggtcgtgttgaacttggtcacaattgggagtaagcacgtaggcagttagaaaggtttggtttgtagtgtgtgttgattaacaaatacaaaagagaaaaagaatacaagctcaaacatcactgagcatcaagactttctagctcccctcacactgtggctatggtgggagttctaacataatagttctaattttcatctttatgtttgccttctagtcatctagatgaagaatgtgtcatggtaaccttggttacctctagatgggaccacttgggttagatttaatttaatgccttaggttagagtccccttaagtgttgctcattccctcccttttatagtccaagggaggagagacgttacatgaacctctagtcccaccggctaagacataactaaccgattattatattatttttggagtcgtactggggtggtccatcctccgatcaaggtgtggtgtcagagatatccttctcaggtggtttctatacctaccacatgggtaggtatgataagttgcgtatataaatgttggggtttgtgtcgattggtatgatgtagttcgtagtcaatgtagtcctttattcttgattttattttacgatacagttcacgtgtgcacacatggctacagggtcgacacacatataacatagtgatcttgagtgccttttagactaagtcatggcgacaacacgtttgtcaggcctataatattgttgatcacacattcaatatgttgtacctaagacttatccattaagcttttgctatggacctattctcagatccttaggtgtggggcccatttcccagggcctaacatatccttcttgaaaggatcacgatgcccaagaggggggggtgaattgggcttttctaaaaatcaacactaaataaaacctaagcaagagctaagcaagagcccaacttcacccccaacaactagcactaagataataatactagaaatgcaataacactaagacaatacttcaaatacttgctaaacaaatacacaatgtaaaatgcttgaattaagtgcggaatgtaaagcaaggtttagaagactcctccaatttttccgaggtatcgaagagtcggcactctccactagtcctcgttggagcacccgcgcaagggtatcgctcccccttggtccttgcaagaaccaagtgctcactacgagatgatcctttgccactccggcgcggtggatccctcacgaccgcttacaaacttgagtcgggtcaccaacaagatctccacggtgatcaccgagctcccaacgccaccaagccgtctaggtgatgccgatcaccaagagtaacaagccgtagactttcgcttgaccaagagaagcctaatgcaaatggtgtgtgctctaggtggctctcgctagcgctaatgaggaacaaatgcgggattaagattctctaatctcctcactaggcttttggtgcttgcaatgctctaccaatgtactggaattaatgtgggcagcatgacaataaagatggtgggtggagggggtataaatagccctcacccaccaactagtcgttaccagcattgttctgcgcatggatgcaccggacagtccgatgcgccaccggtgcgccaacggtcgactccaacggctagttctgacagctagccgttgggcagatggcacaccggacagtgaacagtcactgtccggtgcacaccggacagtccggtgcactgtccggtgcgccactaaaattccactcgggaacttggcgctctcgggtttcttcgtgggaaaactcttcccctgggccagcttggccccacctggcagagggtgcaccggacagtccggtgccccagggccagaaaccctattttctgttatatgctatttttcaaatcggttttcgttctaacttgagtgtatgttctagggtgtcacctagcactatatgtgagtgtgaatgtgcaccaacactacactataactctcttggtcaaactactcatcgacaacccctctttatagtacggctaaaacagaataaaagacctaactaaatcacgagtgtccacaactccttgacactcggactacgtagtccttcaccttttgtttcgtcgttttagccgtcgcttcgagttcttatctccgggattgttttcaccgttgtagtacttctacctgtaatgcgacctaatttaccatatgtctctgcaaaacacacgttagtcacatataacattacattgtcattaatcactaaaaccaaccaggggcctagatgctttcacttctgcctcgtaacagaattactcaagcatgtcgagtcacttgtcatcttggtgcatcaaggtcgaaaagctttagggcctagctagttagcgaagtagcaccagggaggcagggagcttaaggaccttagggtggatcaagagtcccaagtgcctaagtgtctttatatgctttgaggcccgatctacattgaacaacaataccacgttgtgacttgttccctcgtggcatgatgacccaaggggcttatccctataagtgcactgtggcacgagggctaggggcttattcttatgagagccctatgcactagggacccaagggctttagactgatagctattccttggtgcacaagattatcaaggacttatattattcattttctagactttctcagacactacatgccctggaccctaagattggcctagaggcacgactaatgggccctaggtctctttgtgactttccatgtcttaatgtgcatgttttttgggtgtcctgatgtcatgcctcttggcatcaagctcctcctttggccaaggccaagggaggtctccatggcttaggacaccaaaattggtggtcctaatatagtggttccacaatagctttctatactagaatccttgaatgtgtcttagtggctgctagggtatgtcctttcttgggcactgatacaggaacctgggtccattactagagggatgatgtagttgggccattttttctttgctagatgccaaatgtaatgggttccaagaatggtcatcctatgactgctcaccttattgtcggaggagccggtaggcctcttatgatacgtaagtccttcgggaaactgatcataaggggtggatttgaaccaaactagaaaaatgatccaccattgtagattagacttataccatgatttagcggtcctttgagttctgtcttagagcctgaacattgtgcctttgggctagcaatcagtccttgctaatccttagctaggaatctaaggcaccggtagttgtgcacacttcgtagcagcacccctttgataatatgtggtagtccatgggcctagaatcacatcattagatgtgtgaaattttagttatccctaatttcttaatgggggaataaatctagaaatttttttagtccctaagtgagagcgagagccttgagtgctcatgacgagtggtcccatcatgtatgatgggaatcttaggagccatcgccatagtggctaggtggtctctctgtatacctatcttgtcatacgtcttgccttttaacatggttcgtgcaatactttgggttcttcacctagtgaatcaaagagaatgagagagaaaaattttagtagtcttatgtgaaagctttcctttctcatgcgaactcatgacctcttagccttcttcttcctcttatcattctttgcaactttcatcacgatcatatgtgtcctcgatgatatccacttccatccttgaccacctttcctaggcgcatgtgctgaacaatgagggcttacaagattcgagagatccttgggtgaacctcactaccactctcgaggcatgtctgccctgctacctttcctctgaagacccctcaagaggaggccagggaatacatcgccttctatccgcatctcatagccgagttcatttcctctttctcgctttttttatgttcttgacttttatggtctttagcttaggcatcttacaccaagtgatgtctttgatctattcacttttgtctacctttgtgaggcttttgttaggacttggggttattctgcacttctctgtaaaccactcaaaataggcataattttgtagggaacatatcaagtacaaagagtgcaaaacatgcaaaccaacataagaatgaaggtgggaagaccttttaaaaataatctagaggaggttgaatggtttatttgaaatatggtattttaaaaaagttaaaatgtatctatattcctcgaacttggcatattgtgtcacttgggacctcgaactcttaaaactagaaaaacagttactagaacttggtcaatccatcgaaaaccaggtttgctcaaaccagatgccgacatggcgtgccaagtcacttgggtccctgaatttagtctcttgtgtcacttaggtcctagaaaatttttattagttttctctaacctggtatgtgacaccgacatacgatttgagtaaactcgtttgtggatggaccggaagacctgttttttctggttttgagagtttgaaaacctaggtgatacaacatgcaaagtttgacaactacgaatgcatttttactcttttaaaaagttccgcacctccattcttatgttgatttctgcggtttgcaccaatacgttggtttacacctcatatgttgtttctatttagtaaggccagaccaatagcctaaaacatctagttttgttttgaacgtcttgacatctgattttatattggttgttatgttctactcactccgtcccaaaatattgttttttctaggcttatttcgtctacattcgaatagataataatgaatgtagacatatatacaactatattcataggttaattaatgaatataagtttagtctaaaacgaattatattttggaacgaaacgagtattattaattgataaactacatgaataatgtgccataataatttttattatccttacatgtactcattgtctctagattttgactcatccatccatgtacgcaagcaggaaagacaacttcatcacccaccgcgctacctgcg

SEQ ID NO: 1197 - DNA, 22934 bp, Zea mays
  Intron number 1 from transcript GRMZM5G829467_T01 (locus G RMZM5G829467) derived from phytozome v7.0 (chr-ID 7; pos 3 4982670 to 35005603)
tgcttccgtggtggacgagaagaaagcgacgaagggcgctgttgggggccttcatcttccgaaggccctcaaaaacacaactaacatgttttccaagtataatacattcacagggaccttcggcctcggaatgaagctgtacacgatattaaaagcatggtctgggagaaggatgagccagttccgaagctacgcatggagaagcttcggcttagcggtggaaaattaaaccgacttaaagaggaaaaggctatctagtcctcgatagattatccttaagtcaatagtaaatataaagggcatggctgtaactttacacaggctgcgtcctgtgcctataaatagatgaacagtaacaccgtactgttcacgttgacctgtattcatttgcacgtcacacttggattctcaccttctatcaagccgaaggtataaatgtaattcgatattgttcatatttattcatgatgatataataaaaatatcctaatggtatcatatgtctattcatgttattccccatgtttcatatgcttctactttcattattttatactgagatgatgaaggtatgtccttcataaccttcgtctaaagatcattatatcctaagggagataatgctttggaggacgaaggtctttaaccactaacattttgtgttgccttgttcttaactcatagcatttgagaacaagtctccaacattggcgtccacctccggtgaactcattcgaccaccttcggcaagctgtgaccttcgtcatgccgccgaagaaagctccagcgctgggggctgcattgcagccactagacgtcaactaagaaacatcgcgtgaagccagaagccaaaaaggaaggctacaagtccaatgcctcaggaggaggagctggaccaagaaataagggacctcgaagccattcatcaacaggtccagaggaagaaggagaagatgcttcgtctctccgatcttcaaagtaagatcgatgaggctgctgaggaaatgcatcatctcactcaagatgaccaggatcgaagacctcagcgcagagagcttcgtcaggacagttcctacgatgatgatgagtggtatgatgatttccatcatggaaattttgcttttgatgatgcttctcctctgtcagcagaactacaggctaccccatggccccatcatacaagccaccccagctccccatgtatgacactcagatccgaagcagtttctgatgagctacgaagcaatcatatcttcatatgggggcaataccgcagtcatggtgaaatccttcgttatggcagtcaagaatgttgcgcaaacctggtactcctctcttcggccaggaacaatcacatcatggcagaagctgaaggacatgctgatcaccagtttccaagggttttagacgaagcctgttactgctcaagctttgttccagtgcacgcaagaccacgaagaatacctccaggcgtatgtccgaaggttcttgcgtctgagagcataagcgcccacagtgcccaatgaaatcgtcattgaggccatgatcaaagggcttcggccaggacctacagctcaatacttcgccaggaaaccccctcagactctggagaagctgcttcagaaaatggatgagtacatccgggtcgataatgatatccgctagagaagggaagaagcttataggttttctgagatgactaggggcttcggaggaagaatccaccctaggcatgtcaggtcaatccacaactccagttagagtgatgccagaggaagccagtttcagaggccacagcatagctcacagtctttagggcaacagcagagctccttcaggccaccagctccaaggggcagaggcggcatgggcttcggaggaagatatgaggatcaacccaggaaactctattgcttattctgtggtgaagacaagggccacactacaagaacatgtcaggccaccattcagaagcaaaaagagattgtcgaagcagaagcgcggtagaatcagccgaagccggttttacatactgcttcgtgctactcttcctatataccagaatacgtgggtaatcaacatatagcctctgttgcttcggcaagtcattcacaagcttcctggccctagctcccactaccaccaccattgccacctactcatacccgaagccagcagccagaagggcaccagcgcgcccaacagcagcgcgactttagggaggagtccgaagctcgtatagtcaatagcactgtaccagaatcgaagcatatataccaaggaatatcctacttttgatgtacttttatcttttatgccattttattttttgtgtgagaaacaaggaagaacttaatttcaatttttttataataattgtgcctgcaccagagtgaattatatcttcctcatggatttacgaagcttgaaagacgtatctaagaaagcagagccaaaaattatgacccgaaactgcaaaaaagtcattcctaagggagcgcaacgtaagttttctactcaaaagtcgttccaaaaggaatgcagagccaaaaattatgatccgaagctgcaaaaaagtcgttcccaacggagcacaacataagttttctactcaaaagtcgttcctaagggaatgcagagccaaataccaccgaaatagaaggtgaagaagctcaaaagttgttcctaaggggatgcaaagcttaaatgccactgaaatagaaggtgaagaagctcaaaagtcgttcctaaggggatgcagagcttaaaaagactcaaaagtcgttcccaaggggataccgagtcttatgttttatagtgtgggcgcgtgcgtgtgtatggtcgacatcaccaccattttgcatcatatcattccgcataacattgcatcatacatcatatcgcattaacgacacaaaaattgaatacaaagcaaaacttcggcaagtgctttgtcaaaatgaaaatgtgcttcgggaaatacagttttatcagacttgccatagaagggctctttctttacgaagcatgaaaagaagggaaggtgttttttcgccaatggctcaaaaacggtatgtgtgcaaatttcatgcatcgcaaagagatatattacaataatttacatgtcccatcaattgttccatacatcaaatattacaaagtattcttacaataaagttacaaggtattatcacaatagtctactcttctctaaggatcttttctgcagcttcgtttaacaatttgtcgacaacttcgtcgataatagaatttgcaatgcttataacatctagtgcttctttcatctccggatcagcgagggggtcatatggctctggtagcggtgatagctcagctgtagtaggtaaactattagttcaaagctacaaagtaagtaccgaagttaaaattaaaaaacaatacatatgcacttttcacgttcagtagcctcttcagttcgcctagcttcttctcgggcgtcatgggtgtctttttcattcttttttataatttcattggctaattctcggtcactgttcacccagacatcagaataaaacttttcgcccactaaagttgcttcggctgaagggtccttcgtgtcatttatggagaaggcggcttcggcctgagctgcagcttgcacgtgttcgcatctagccttctccagaatagctgcgatccgggcgccgaagaaagcacaaatatctccgcgatcattcaaaattttctcaaaagcttcggcttccccgcttatccactcaatgacgccttcggggtcgcctcaaatgaagttctcctcagaggagtaggcaccaacttttgcaaaactgtttttcaaaattttcacgcagtctaaggatttttcgaagcatctttccttggattcgtgaagctcctcaatatttttctccagcctggtcttccaccattcacttatttcttggctggccttcgcgacttcacaattttctttggcttcggcagttgtttccgaaggtcttcaacctcggctttttgggcttcggcctgagcattgtacttagcttcctcttctttcattttattcaccaatgaaattaaaattttgtctttctctagaccttcgtttctcagctcaattacctctgagcgaaggttactgagagctattgtacaactttcgtcttcggcgctcttttgtgccctcaaggcattgctaagaatcaagccctgcaaagaaaaagaaagaattaagcatgacaatgaaatacttcatttccaactttaaagttaacttctatacctttatactgttgtacacaaggctatcagcaagatcatccttcgacatagccgaaaggccttcctcaagcttcgaaaatcccatacttttagctatctcccagcaaacagacatttctttgttgtccgggagacagtataggaaatcatcttcgttagtgcccttgaacactaaggcccccttcggatattttagtttctgggcgtagtgtctggcttctaggatttcttcttcggataattttttccctgaagcatgtcgaataatgtaatcaacatcttcggctggagcttcgggggcaggagattttgctttttccatcatatcttgcctcgttgtcatgccagtatctgaagtttgttgctcagctttatcttcagacgcggcaaccttcattttaatgggcactgaaggcccagcttcggcttcggcctagactttgacggcttcgacaattttcttagtaggagcatggctcaaggccattgtggtctccatgacagtgtctagcacgctggccatcctccttctcttgggagttgcggtaggagctttttgcactttcgacaatcctacccctgctggtgggctcaaaatttctagcattttcactgtcttttccacttttggctcttcggccgaatcatctttggcttcggttggcccgactgtaggaaccttcggcactacagtagacccttcagcgcttcgggcggcgggagcggcttgttctacttcggcagtagaggaggtcccctcacccaattcaggcactacgaccgaggccggtgtgtcaaaaccttcattatcttgcccttcggtacagcggtggcggccgaaacggcaattttcctcttttttcctttcctcaagggatagctatagtcaggatatacgaagccaattgcgtcaaaaaccctgtttaatattttcttgccccgacccccgaaggctgcggacaaggcatcatcttcggccttggaatatgtcccaagcagctcgtcgctggtagcttcaatgcatttcaaccagcatcatttggtttgtcaaacttctctctgaatctgaaggtatatttcaatcgaactaagtcaccttcactggattcaacggtagtctccttcggcatttcccagctatccacaagtgccacaccctataggctatgtgctcttggactatatctcttgtggcaatgaaggcacaaacattgctaaaggcctttgaaagttgcctagaggggggttgaataggcaagttaaaaccttttcaacaaaaaactagaagcaaactgggtaaaactgaattgatctcgaaattcacccagttaactttggtaatgagatgttctagataatccacagggttcaaaatagtagatctgagaagggcacttctcaaaatccacacaccaaaaagatatgaacaaatctttcacgaaagggtgagagaacgaagaacacgaataagcacaatgaacaagaacacaaaagacacaagatttatcccgaggttcggtcacaccacaaaaggtgccctacttcctcgttgaggcgcccacaaagagccgggtctctttcaaccctaatcctcccttcgccgaccaaaaaggtcaagcccacacaataatctttgctcaaacgagcgggtaatacaaactttcttgtggtcttccacaagatttggagactcacaagagacacctagtcgtctaggagctagaagctccaagagtaatgaatccacaaagaactcgatgtagtaccaaagctctaatcaagaagaagagcaagagagatttagagatgaagcacaaaaccgcagctctcaagctcactcaaagatttctctccaaagatttaaaatgggagaggcaagagatgtgtgtgagagagagagggaggtgtttcttgggttagaaatggagttcaaatcgtgctcaccgctgtggggtgagaggtaggagtgagtatatataggtggagctcaaaactagccgtttgggcagatttttctgcctgagaccggttgaaccgccccctagggcggttgaaccgcccctggcaggcctggcagcctgtctgccagtctgactggcagactgacgcgcagactggtcaaagttgaccaacaccggttgaaccgcccctgacagctcctggcgacctgtttgccagtctgactggcagactgcagatcagaggtcagaggggtcagagaccagctgaactgcccctcaggaccagttcaaccggtcttgaccagtgagtttaggagagaaaaccccagctcaactgcccagaggcaagttcagctggtgtatggtcaaagaggttcacagctgaagttgagttcagctgaagttgagaaagttcaactcagctgaagttcagctcagctgaaaagctcagctgaaaagctcagctgcagctgaagaagctcaactcagctgaagtcaagttcagctggaaagctcagctgcagttgaagaagttcagctgcttttcagcaagaacactctaggtttctcaaccctaaccacggtcaaccatagaacgttaaagagatttttgcttttcaaaaatagcttttgaatagagaggtttgagctttggcaaacaccaaccttctttttggatccccctttatagtacgacgattcctatactcaagttaaataaaataaattgaagtaaactccttgagtcattggtgtctcatgtgtgatttctccatggcattgcttcataaggatcacaaacatctttgtctcaccttttgaagcaaactcaaatcaaaccctgtgacttgtaccatatcaccttatatgagttcaaatcatggcttcaagtcaccttactgatgcatcaacatgttgtaactcttcatagttgattagttcatcgacttaatgcaagtactctctttttcaccttagccatggtacctcggtctacaagccgtcgcttggccttcaccttcgcttagttcctcgaagccctttccttgctatcttcaccctatcaagccattcttgaatcacatcctattgagcatccattgagagaatcatttcttcaatattgtgaaccttgcttgaatgccatctagatataactgctaagatcaatcaagctctagtttgattctcatatattcatatatggactaatagtaatatggtcaagccaattcacgattcctcatatcttattcactttggcttgaccaatccttttaatcacttcaacctctattctgatcatatgtatgcagtgatttcttaggtcttgcccatatattcaaaccaatatagagagaccatattatatccatttgcattgtctcactggatttaaccttgtgttgaacctttgttcactgatcattatacactattcaagtatgttcatcatactgaatttcctgttcaacacttagcaaactgttagacctttaaatgtgttgttatccaaatcaccaaaactcacaaaagggatgaatgcactttcaatctccccctttttggtgattgatgacaacacatttaaagcttacataagatttgataaataagattttaaatcctatgatatagtttcctccccctaaatatgtgcatttcagaaaataccaattttgtactcaaatgccaaaagcacatatttgggtcaaagtatggagacaacttatatcatacaattcatagggtgcagtgtgtcataaaataaatgtgatgctcatgacatggaatgcacttatcaactttcttcatcttatgtttttcttatgacttcccctttttgttaattatttctcccctttttaaaagtcttctaacacttagttacataagactaaaggtaagctttaatgcacaatttctccccctttgtcataaatctccaaaaaggatacaaagaatataaaggatcgaaattatgattaagcgagatgtgaacacactatcatgaaagggatccttagatggcataaaggtaatggataagtgtcataagtgatgtacctttgcgttttaccttttcaaggagtttccagacttgtgttggatttagaattcatttgcaagctcttgttggcataattgtgacataggtccaagatatcaaatgaagattgtcatactaactgaaagataaatcttgatacctagagtctagatgtcacctagcattttcttatcacaacaagaggcaacatgaaaattgcacaagtatggattatgcaactagtgatcatgtatgaaaaatatcaattgaaaaacactaattgatacaatttgatagataaatagatcactaatagcatattacactaagttctcctcaagttttagtgcacacacacatatatatatatatatatatatatatgaattcaattgatatctgttgagagtacttatttgcaacttaaagtaccattggcataaaaggagtatcaattgaacataatcatgcaacataagaaacatgtgcactatttaatcaattaagttctagacaggagaatttataagctatgctacttcagacatttgcaatccaaaaggatgtgatacatatttaccaattttagatgacgttggagtagcatataaaagagaaactcattcccttatgaaatgtataaaagatacatttattggagcaaagaatttttgatacccatcaaatttgcagtggaagtgattgtctttgcccgaaaattcctttctaatttgagactacacacataatagacttggaaatgaagttagtctcaaagattcaaattatagaccattctccccccaaatgtgtgcatacaagtgatgaatacttgtttagcttatgcacttggacttgtgaggccaggggattaagttctacaatttgaaccttggtacaaataaagtatgaaaaatatgaaattgaaccaatttaaggaattactcataatcaaagggtatactaatagacatgatatgcaatattttaagccaagattcaagtgcaaccttatgatgtgacttaagatattgcatatacatgcatgcactaacttgtaagagcctagatacacaaatgtaatacaatagttcatggagtgacacacctttgttctatgccatatggtcttcattataatcatgaatttctatcttagcttttgataggcttgacatttcaaagagaaacttatcctctttaaacgatcaagagaaattcattctcttcaaagaactacacaaattcactaaaagaaaatgttagtctttaaggacacaagatatagaatgagctccccctaaatgtatgcatcaagtacttgaattacttgtaacatgcacttgattcaattaagattcttagaggagttcatcatatatcttggtcaaggcataatatatttgaaactattgaatttatgctagagaacacatccccaatagaactaatccatggggtgacatgtggtaaatatttgatcatttccttggaaccactcatcctcatttgatgttctccaaggtgtgagactacacaacatgaacttgaaagaaatcattagtctcacaagatataggctaaactctccctcaatttgtgcatgcaagagtacacaaagtacacttatgcacatcaacaatacgaggttaaaggagatgtttgtactatatcttggtttaacataacatgctttacatagatgatgaaaattaaaccaattgaaagtttaagaattggaagtatatcaattgaaattctgaagggtaaagcatgctaatatgaccctcaaacctcataatgaaggatatcatataaatatgtcactacatcctcattatttggttgacaaaaagtgtaactcccttcttgaatcactatgatttcttttctctttatgatttcatccaaccaggcaatcttgaacttcattcatcttggcatggttcaatcatacatgatatgagacccattgaaactcaatgattgaaataaccaagactcttatatccgtagattttgaatccatcttgaaaacacttggaaggaccttattgaaacacttagaaaagagagcattagaaacacaagagagggtttcacaaatgatgatccttatatgtggatcgcaaatgaatcatcattcttagaacccaaaaggatagattaaattcctttaaattagtgcatacatatagttgatgtcaaagttttatgcaccattgaacattttatattgcaaggaatttaacctatactatggtacatttcactaaggatagaatactaaaacaacttaaggagaggaagttttcataccttggcctcttatcaacttcatcttactttagttgaatagtatcccttaagcttgtgatttatccaatttaataataagcaccatctcttaatatagattttctatggataaactcaacacaagagatggcattagtagcacaagcactagtttcttatttagcaatcctttatatgtggaaggcaagtgagttgctaaaatagagaaacctcataatatggactaaatttcccttgagccctcatgcacaatatattttgaatgacatggataatatgcatggttattcaatgaagtctaaaagggctgacttaatccatattatggtaagtgtctaataaagaagaatcaaatccaaattaactagatagagaatacatcacataattttggattgttcaccatatgaaaatattcatttatcttccaattagacctttatttcataatcaataactgatgtatatcctcaagtgcttcttttcccttagtggctacacaagtcacaaaagagataagatttgaaaataatatgcacttgagattcagttgttaccacccttgctactatctccaaatatgatttatatattcattatcgagcacccaacttgatccattgaaggagtgatcctgcaaaacaagtttaagcttcgtattttggtacccaattttaattgggtcctttaagattagtagtaagagccttgggtacccacacattccttattgtggcctttctctttgtgtaggcatccacatatacttgacaaccatcttactatggttccaagttaatatgtaaactcacagataagagcaagagttaagaataggagccttttctccttttcttgatacatcattgtgttgccttcttgatgatgaacctagcttgaccttgggtgcacctaccttatcaaggttagttgcacaagcattcatatcataaagacaagttatgcatggaatttacaacttagtgatccaattcaatgtgaagcatatggatactgattgaagtagatttctaagatataaaaatatgggtttccaaaatttagagagtatggatcactaattgtaccttttacagtttaaaaatcatatccatgttagtgcatatgtatgtgatgaatatcaacaaaaaggattcttatgcacttttagatttaacgataagggaattttaaactacatcaagagtagctatttagaaaacaaagattacaatccatatgaatgagatacaaatttaccattttggattgtcttagtatagcttactcaagtgaaacttattctctatgacacaagatatataatgttctcccactagatatgtgcatcaagtatttgaatgacttgccacatgcactttcaattcagttaagagtctcatgaggagtatattacatatcatggtcaaggcatgacaaatttgcaatgaattaacttatgcctaagaatacttaccaccatatagaatgtaccatttattataccaatttgacagctcttactatctgtggtggtgtcaccttagtattcttcttttcatcatttgtggagacttccttctttgttatctcttttccttttaaaactagtcgataaaacacttgaaaagaggtattagtagtacaaggaagtatttaatgaatgatgatatctatatatgaatggcaaacaaatcatcatttatgaggcgtaaaggcataaattaaattccttttaagttaatgcacatggagcagtgaattcataatatgcattaatttacaaatttaagccaaaaggaatttaaccttcatattgacattcctttccatataatatattattaccaattgaaagaatgccacttggaaggaactactattgatcaactaccaattgaagcaatttgttccatacctttgccttgaacattcctaatcttcattttaggtgaagattaacctttaaagcttgtgattttaccaattgaaagagcacaatctctacttatgaatttccattaaatatcttaaaagagattgtattagtaacacaagcaatagtttcctatttagcaacctctagtatatgaatgacaagaaggttactaaaacaaggaaacctcatgatatgaactaaattactcttacaagcatcatgcataacatcaattgtaaaaaaaaagatgaaagtagcatgattatttaattaagtttacatggcaagtttaattcatagcatggtgagtgattaatgaagaagactcaaaaccaatttaaacaagaatgaatacatcatatagtattggttcgatcttctttgaatgttgaatggcacactccatttgggaaacacattctcatgttgtgagactacataaacacttagatagaaacattagtctcacaactctagtcatatagagaattccccatttggtaagtgttataagaatttgaatttcttacttagcactctattcatttaagaacatgggataatactctttatgtctaggtcatggcaataatatgatgattaacttgaaatatgccacaagatacatacaatcaatttaaagcatgtagattgtcacaatataaaaatatgaacttgcaatctaccatataattagatcctttccaaagcaaggtaaaatcttttaagttcattctcaagtgcttcatttttcctatgtggctacaaaagacacaaaggaatataccaattaaaagcaatgtgcacttaagaattaattgttaccatcctttggatatcacttggttgtaggccttttgcttgattcccacaaaggttaatccttattccctacaacataagttcttgctagagatgaatatgaagttagtgatataacaactcaattcatctttgggtcaatcttaaaggatagacaatgtaagattgatagcttgagataagaattgagttgaaccgctcaagcaccccaaagcttcatatcatctctgggtacctgcaaaacttattaagtacattttggtacccatctcatgataggtccatcaaggttagccaataaggacttaggcacccaaatagccttggtcctagaatgtggtgaactcatcacctttctagcacaagagtcaaatttgggtctcctaagcatatttgaatgtattgacaagttaggcttaggagttttaccctttggacaaaccttgaatagatgacctttttcacggcaattgtagcaaatgcgatgcttgtccttgcaatgcatttgccttttgctttcatcctttttgatggttatctttcttgaccgtgcaaggtcttgattcttcatgtgggggcatgaatcaattctatggcccttctcctcgcatccatagcacctcctatcgcttctctttgatctttctttgttgaagcacataggtacattgttagagcaaatcatatgagcattaattttctcaccatggattttgctcatgtccttcttggaaagcttggtattcttttgaaggggttttgtgcatgctacggttgtccccttctcaagctttttcaccatattatcacagttatcttgagaaggttgagcatgacactttcccttcaaaagagttaagctctttcttagccttccaacttcttccttgagctctttattttcttgtgtgataaaaatatcactaattcttgaaatttctagctcaatggaagattggctttcttgagagcaacatttgttagcacatgataatatagtttctatttgagtacatgtgcatatgtgaggttggtatgatttcaaattagttaacacaacctcatgagccatttctaacatgatatgtgaatccataaattcattatgagagcacacaaacatatcatgtttttcttgcaaagctagtttttcaatatttagcctttctatcgtgttcttgaacatagcatttttattttctaattgagcaatatatgatgaatgattaacaactttaatttgctcaattgaaatgtcttcatacctttggaccaaatcatcatgagagcactttagcttctcatgctctttggtcaacttctctaagtcttcgatttttctgatgaggaagtcttcttgcttatgaagcatttctttttgttcttccgctcttttcatgagtttgagcaagctcatccgatgtttcttgcttagctgagtgaagaattgttgaagatcatcctcatcttcactatcactttcttgctcctcctcatcctcactttcgctttcactgtcactcccattagcaataaagcacatatgagaagtagatttgacagacgaaccttgtgaagaggtggattcgtcgtttggtctccatcgatcattttcttcttcaatcttgttcttcgcctcatcttccttcattttgaggaacatcctttcggcgattctcatggcaagatctattgccctaggatcaacatctgcaccaaaagataaagtcgaggcaacctcaactttttcaagcttagaagcactttcgtttcttagtccccccgacatgatcttttcctcacgcggttaagcgttagaacgaggattagcctctgataccatgtgaaagttgcctagaggggggtgaataggcaagttaaaactttttcaacaaaaaactagaagcaaactgggtaaaactgaattgatctcgaaattcacccagttaactttggtaatgagatgttctagataatccacagggttcaaaatagtagatctgagaaggacacttctcaaaatccacacaccaaaaagatatgaacaaatctttcacgaaagggtgagagaacgaagaacacgaataagcacaatgaacaagaacacaaaagacacaagatttatcccgaggttcggtcacaccacaaaaggtgccctacttcctcgttgaggcgcccacaaagagccgggtctctttcaaccctaatcctcccttcgccgaccacaaaggtcaagcccacacaataatctttgctcaaacgagcgggtaatacaaactttcttgtggtcttccacaagatttggagactcacaagagacacctagtcgtctaggagctagaagctccaagagtaatgaatccacaaagaactcgatgtagtaccaaagctcgaatcaagaagaagagcaagagagatttagagatgaagcacaaaactgcagctctcaagctcactcaaagatttctctccaaagatttaaaatgggagaggcaagagatgtgtgtgagagagagagggaggtgtttcttgggttagaaatggagttcaaatcatgctcaccgctgtggggtgagaggtaggagtgagtatatataggtggagctcaaaactagtcgtttgggcagatttttctgcctgagaccggttgaaccgccccctagggcggttgaaccgcccctggcaggcctggcagcctgtctgccagtctgactggcagactgacgcgcagactgaccgcagactggtcaaagttgaccaacaccggttgaaccgcccaggggggcggttgaaccgcccctgacagctcctggcgacctgtttgccagtctgactggcagactgcagatcagaggttagaggggtcagagaccagctgaactgcccctcaggaccagttcaaccggtcttgaccagtgagtttaggagagaaaaccccagctcaactgcccggaggcaagttcagctggtgtatggtcaaagaggttcacagctgaagttgagttcagctgaagttgagaaagctcaactcagctgaagttcagctcagctgaaaagctcagctgcagctgaagaagctcaactcagctgaagtcaagttcagctggaaagctcagctgcagttgaagaagttcagctgcttttcagcaagaacactctaggtttctcaaccctaaccacggtcaaccatagaacgttaaagagatttttgcttttcaaaaatagctttgaatagagaggtttgagctttggcaaacaccaaccttctttttggatcccctttatagtacgacgattcctatactcaagttaaataaaataaattgaagtaaactccttgagtcattggtgtctcatgtgtgatttctccatggcattgcttcataaggatcacaaacatctttgtctcaccttttgaagcaaactcaaatcaaaccctgtgacttgtaccatatcaccttatatgagttcaaatcatggcttcaagtcaccttaccgatgcatcaacatgttgtaactcttcatagctgattagttcatcgacttagtgcaagtactctcttcttcaccttagccatggtacctcggtctacaagccgtcgcttggccttcaccttcgcttagttcctcgaagccctttccttgctatcttcactctatcaagccattcttgagtcacatcctattgagcatccattgagagaatcatttcttcaatattgtgaaccttgcttgaatgccatctagatataactgctaagatcaatcaagctctagtttgattctcatatattcatatatggactaatagtaatatggtcaagccaattcacgattcctcatatcttattcactttggcttgaccaatccttttaatcacttcaacctctattctgatcatatgtatgcagtgatttcttaggtcttgcccatatattcaaaccaatatagagagaccatattatatccatttgcattgtctcactggatttaaccttgtgttgaacctttgttcactgatcattatacactattcaagtatgttcatcatactgaatttcctgttcaacacttagcaaactgttagacctttaaatgtgttgttatccaaatcaccaaaactcacaaaagggatgaatgcactttcagccttctggcatgcttcgacatcaccttcaatagccaccttcggcctttggaggccaaagcgagaccagatggggcactggatgatttccttgatattctttctttcaatcggatcatttttaacataaaaccactcctccatccaggccccaggacatcttttccggtatgttggcaccgggtagcttgcattagagcgggcaatgaacccataacaaccgaagttgttgtggtattgttctttgctagtagccttcgtctcgtataataactcgtgcatattgcagaagcactttgcgctcggctctagcccctggctccttatagctcagacaaacatccccatcctaattatagcttcgagggtaatctgatgaagaaagatctggaatatctttaacacttcaaccacaaatttgctcaactggaaccgaaggcctgccttcaagaagtttcggtaaataacaacttcattttcctcaggagcaggggcagtgctgtctccaccaaccctcacaatagacatgtcgcaaaaatatctccctctcatggtgtcaacatgactttgtttgatggtcgatttcccgaagatggtatggcttggccgccagggccggtactcagaatcttcatctccactctccacatcataactatcactgtcatcagaatcttcagacaaaccctccattatctccttagtaattttctctgtattcgtctttaagtcaataataaatataaagggcatggatgtaactttacataggctgcgtcctgtgcctataaatagatgaacagtaacaccgtactattcatgctgtcctgtattcatttgcacgtcacacttggattctcaccttctatcaagccgaaggtataaatgtaattcgatattgttcatgtttattcatgatgatataataaaaatatcctaatgatatcatatgtctattcatggtattccccatgtttcatatgcttctactttcattattttatactgagatgatgaaggtatgtccttcataatcttcttctaaagatcattatatcctaagggagataatgctttggaggacgaaggtctttaaccactaacattttgtcacacccgtttcccaaggggcagagccgggtgcatcgcatatgtgtgccaagatctatttccacacatatgttgacatcacaagtgtaatatatcaaaaggacaatgcataaaagcgtaaataacgattatattaacatattacacttcaaacagacataatgtcttaacctttattcatcaaagtacagcgaaacatggacatccatccacaggaagatgaccgggggtatcactagactagcatccatggagctcagcatcataacttcacctgcaaacttctgatcaaaattaagcaagggtgagctcacttatggtcggggctcagcaagtgggggaaaactaatgcaagtttaacaaggtgaggctaaggttgagcagtaagcattttagttggtcaacattttattaacaacaccaatcttactaataagtgtgaatcccaagtattcccattaaacaaaggtacaagtgtatatcaaaaacacttaagtgaaaccacttaagcaaaccattggcagatcgtcggatctcgatttatttccatcttcaagttcaattatcatgtgaggagtccaggctgctcataaccgtgagcagggctgatatatcagttttacactctgcagaggtggcgcatctttacccatgagtcgcgattcccttctagcccgggttagctagacccgtattcacttccgaggtgaatgaccagggtctcactacgaggcttcttcctagagtcctcattacgcaaatgttggaaatggtcaactacataaggtacacctaccgtaaccaacttatagtccagtccacagggtaaagctttgggaactatgcccgtatccaatctgcctgagccggtactataagcgcttgctaggtgcccccgttcctggtcgaccacgaccaacacccaacataagacttccctagttatttagccaagaccagagccatgatagttctcatggtagcaccgttttcctgggtggtcactccatgttccaattaatatgcaataatcttgtttaaccatcgggttaacaacaacaaagtaatcttaccatttggaacattaatatcataaacaggagtgactgcataaatttcaagttgtagcaatagcatagctacttgattagatcataatcccaggttaaacaaggagtaaggttggaaaggttatctaaataggtaacccatcaaattatgcatatattcatcgaagaataaactttattaaatgtattgtttgggatcaaacagagtatgcagagggagaagtccacttgccttgcttattgaaaacttgaggttcttccacggataggaatatatcttgactcttaactactagatcaaccactaaatatcacacaaacaaacaagaagaacaaacaccactcaataacatacaacattcaccatacgtaaagctaaaagaaagcttaacgaaaagagcattcgcttttcaaaaacgttgcgagtaatggttataataagagggtattctttttaaaaatgtgtgatctatactttataaaacaagacataagcttaaaatatcttaattaaaatatgcaaatattaggttcaccaatttaatcttttataaaacatcatatgtgatacgtctaagataaagggtttataagatgataaaacacgttataacaatattaaacctttttaccttttagagaagatatatgttatatatctaacgataatgagttataaaacacattattaaacattacttttataacaagctcataaacaactttttatgtgaaaagatcataattatattattaataactatttaagacgagttaggttatgggtcttaaatggattttcatgcaaaagataatgaacacataaccatcatttaatttcattaaaaagcacatagcctatattattatatttgaagtcaatatatataaagtaacattttaagttataaaagaacttaaactcttattactttattttatcctttaggaaaagctaagtgattcgtatgtaatgtgcactaaattctatgaaatcattaatcatgccataaacctagttaagaacaaattgactataggtttgattaataaattatgataaatgataattaatctattaattatctttaattctattgtaggaacaaatgatccagataattaaaatgaatactatatttattggtatattattaactatcattttagttatgacagtgtgagcatttaattaagccattatatcattattagaaaagttatatgacatattactatttagtacggctatacttaaacatctataacgaatcttattaaatcaaaatcaggatgtctatcaaaagggtcattttacagttagaaacaaattctctaaatctttagtaagaaacatatgtttaccaatataactatcaatttctttattaggaaagcatgagtgcctaattaagttattttaatattattataaaattctactatttcagttttctcctttattttctaaatagaatttatacgtataactaaaaattgtttatttaattcttctaacattaatatactaagaattatttgtaaattactaaatgggacttttaataacatattcatggttattatgacataaataaatagtttactaattctaagtaatttaagtgctatacttatgaatacatttatcatgaatagtaaaatctatattttcatttgaccggaaatacgtggcttaaatacttatttcaatttcttatatcacagaatttatacttatatcaatattaaccgattatcgctctacacactaaagcgaaattaatcataaacatttctagtatgaaatcactgaagtagtgaatagtgaccgtgttcatttttagaattataaactcacacacattttaaaatattgtcgcggggttcgattttggatacacgtatacatcggaatctctaaatcatacacgaatcgccaagtcgcataatattacaacgataattcacaaattcataaattaattcaacacatgatttagacaataagttaacgggttggggttgtcttcaaccttgggtgaacggatgacggcgaacggtgtgggcacggtcgccgggctgctgtgtgggcgagcttcacagactccgggacggacggcgaacgacggacaacgcataggcactccgttgaacgacaaacgggcgcggacggtccgacgacgaactttacggcagcgaacggcgagggagagagaaaaccgagaggagggagcgagcttggggtagggagagagaagagctcggctgcccaatttatagagaagggagagggagagagagagagccaggaagagggagaaacgaccatggcttcaaggctgtcatctacgacgtccatgaagagagggattaatggggaggaaaacgactccattgaaggtccataacgcaagaaagaaacggtcgcggatgacggggtcacacgggtcggctactcggcgtcgggcgctcggtgcacggcttctggcgcggtcgtgcgggcgtcgcacagccggtcttcgctggcgtgcagggcgcgcggtcggtgttggggcatggcatcgagcgcgtaggggcgggtgacttcatgggcgcggctagatagaatcctcgacgcgggtcgctggcttgctcggcttgaggcgcacgtgcgagctcgatgggcgcagggggctgctcagtcgggcggtgcagtgcgtcggagagaggagcgaggagagagaaagccgggtgagagagagagagagaaaggggaagagggaacggcggcgacggctaggagttaggggcggcggcttagggttagggaagggggcaggggcggccggctcatgggcctaatgggccaagggttagttatgttagttttttttctatttcctttttctaaatttaaaatcatattttaaataaccctaaaattcataataattaaaccaaaattatttttaaataaaatattatttttgactaattattatattatttatttggtttttcatttaagaaaaaaatgatattcaatatccaaaatccattatgagcaatcaaaaatcattccaaatgcaaacaaataacaaacacttaaaataaaatttattaccattaacaactaaatgtattacttttatttgatgatttttatggtgttacacattttgtgttgctttgttcttaactcataacatttgataacaagtctccaacaggcgcatcggaaaggagagc

SEQ ID NO: 1198 - DNA, 24852 bp, Zea mays
  Intron number 2 from transcript GRMZM2G050126_T02 (locus G RMZM2G050126) derived from phytozome v7.0 (chr-ID 7; pos 1 49004418 to 149029269)
ttcaggaggagcttgacgccatccctaaggccaaggtatagacggcgctcctctgatttgagtccctacgcattctgatccgccagattcgtgcgtgttgtcaatgccacaatcaacaacaatcgtgttgtcgtcctcataatcataccatgtttcacttgcattaactacgatgctagcataaggagcaaggtactcatatccgagagataggtgtgggtgtggcgatttgaatcgatttgcatctagctgggtacacccaaacacgtgatgcatcaacccaaagggatcacacacaccaaccttccccacactcgctgactccacatgccacgtcccagacaattactcaactgttagtatttgcaacatccacggctgccataatatcaggagctgctggtgtttaagacgactagacgagtctctttagctagtagattagacaatgccttggacatagtgagagtataagaactgttgagcaatcgtgcatgaagtgagtcatattcaatccgaacactcataacaaatatatatttgaagaatttctcaataaacctatgagatggacatggattagttgtataggccggtaccatgtgtcagcagtaccaaaggcaatgacgatgggcaagaagtactgaaagaaaagatgaaggctgaagcaggaagaaaaagggaacgcatgccaaatcccaagtacataggcgagcagtggagaaattaggccagtcggaccaggcccatcggatgatatatatatactatgtgctgtaataagacatgtgaacttggctgaacctaggcggcggcagacactatcacaatacgaaataccacccagcggcggatttgctgcggaggcgcacctgtgtgttcgtcttgaggagtgaaagtaatagcgatcgtaacagttggtattcggagccgtgctggagcaccaccacgactaccggacgaggctgcaattgaaggccgaagctatggcaccggcgaagagtgatgatctggtgacgtagttgttggcgaaaattgaggaagggaacaaagagacacatccgagaatggaggtgacgcagacggcgattggcaacatggaatccacggtgaagagcgtgatgggggaacaagtggagttccagaggtggcgacccgaagtggagaccagggtgacagagatcgccgaggcgctccaagccatccagccaaggtgaatgaagtggcgcagagatctgtatctgcttcatcgaaggcagaaattaaggcgacgaatggtgcgtcgggtttcgcacatctggaaccaccttctacggagacgatgcacgggcataatcgccaccactcgtcagacccttaccggagagcgggtgctgtcgggaacgatatgttccggtcacccactccggtcggagttacgatcccacccctcaaattgtgatccattccaattcgaaaccatggggtgaaattcttttgggggttggtctcacggatcggggatgggttctgcagttcggaatatggatttcccttcatgtgatggacccaaccccaaaattatggaaacgacggtgtgaaacttattttgaattttatgtcgtagagccagagatgtggattaagctggccatcatgcatttcaaggtcccaacagtattttggttacatgctgtagaaaatagattgagggagatgaattgggaagagttttgtttacacttgaatacccgttttggtagagatcaacataatttgctgattaggcagttttaccacatctaccagcagacatctgtagcagaatacatagaggagtttgatattctcatgcaccagttacttgctcatgaaacccagttaacttcatccatgatcactgctagatttgttgatgggctcacggatgagattaaatctgtagtagtaattcaaaggccttcagtgtaagtagagggactctaactctcatcaagaggatgacactatgagttggggcaattttctgtttatttcctcaaacactacacaatgccatacccttagaggggttggggacacatatttatagccctaggggctgcactaccacaccttctcacacacactacacaacaggattgtcctctagatgctaaagagactacagaggacagtcaaaagcgactgttgtcctctagatgctaaagcgactacagaggacaatcaaaaagcgactgttgtcctctagatgctaaagagactacagaggacagtcaagctgtcctctagatgctaaaggactacagaggacagtcaaaagcaggctgtcctctagatgctcaagacttattccatcattctccccctaagtcttgggcgtcgtcttgtgagaaagttgggccatcccggacctggagcaaagctcaacaaacttgatcttcccaaggggcttggtgagcaggtctgcaagctgatccttggtgttgatgtagcgcgccttgatgctcccttctgccaagcagtctcggatgaagtggtatctcagccggatgtgcttgctccgttcatggaacacggggttcttggccaatgccagagcggactggctgtccaccctgagttccaccgctccaatgtctctcccgaggagatcaccgagcagtcgagccagccagagagcctgagtcgaaatagtggacgccgctatgtactcggcctcgcagctggacatggccaccacctgctgcttgaccgactgccagctaatgaggcacttgccgaggaagaagaggatcccgcttgtgctcttgctagtgtcgatgtcaccggcgtggtcgctgtcgctgtacccgacaaggtgtgcctccctagggcacctcgggtagtagagaccgtggtcgagagtccccgcaacatagcggatgatcctcttcacaacctgctcatgctccgtcgtcggtcgctgcaagaaccgactaacgtagccgacggagtatgccaagtcaggccgtgtgtggacgaggtagcgaaggctccccacaagacgccggtactgtgtagcatccacctcctccgtcgtgctgtcgcgactcagcttcagcctctcctccatcggagtgagagctgggttgcagtcggtgagcccagctagctcaacaatgcgcttggcgtaggcggtctagcgaagtgtgatcccggagtctccctggtgcacctcaattccaggtagaaggagagatgccccaggtcactcatttggaaggtggccttcatctcttccttgaacgctgccacctctgcatccttggcgccggtgatcaccaagtcgtcgacgtagacacccaccagcagggcacttcctccattgccccgccgatagatggccgcctcgtgcgggcttggcgtgaaacccattcctttgagcgtggaatccagcttggcattccacgccctcggtgcctgtcgcaggccatagagagccttgcgcaggcgcaacaccttgccctccttgccagggatcgcaaaacctggcggctggtgtacgtacacctccccctttaagtcgccgttaagaaacgccgacttgacgtccatgtgatgaacgtgccagccctgttgggctgacagcgcaaggaggagtcgcacggattccatccgtgccacgggggcgaaagcatcgtcgaagtcgatcccctcctgctgtaggaaaccgcgtgccaccaagcgagccttgtgcttgacgatggcgccggcttcatccctcttcaatttgaacacccatttaagggtgatcgcgcgatgaccatgagggagatcagcgagctcccaggtgcggttcgtctcaaccgcgtctatctccgactgcatcgcggcacgctaagccgcatgtttatcggcctccgcgaaagaccgaggctcaccatcgtcgcatgcaagatgcaactctcctgccagaatgcgagatgcagggcctggcatcgacgggtcgatgagaaggccctccacccttcgataccgcaacggctcgccgtcgtagcacgcgtcgacgcgctcctcgtcgcgggacagaggggtcacgagctccactgggtcgtgctcgacacgagctggtgtcggagaggacgttcccggagagggtaccgtcggtgctggagtacgtggtggcgaagagctcgctgtagccagagtcgtggctggagtgcgtggtggtgaagagctcgttgtagcaggagctggagagtttggcgctagagtcggtggagacttgggggctggggtagacctgctcggagaagagttgcctactcccctagctccctcaaagtggacgtactcgatggtgaagtcgtacgtcggagtcgcgccgtcgtccaccgccttgtcccacgcccatcctcgcccttcgtcgaacactacatcgcgcgccgtgcgcacacgctgtgttcttgggtcaaggatgcggtaggccttcgagccctccgcgtagccaatgaacacccccggggtgctcctatcgtcgagcttgctgatgtggccaagctccttggtgaacacgaggcagccgaagacccgtagatgagagaccgccggcttgcgcccatgccaagcctcgtacggtgtcatcccgttgagagccttggtgggcgagcggttgaggatgtaaaccgctgtcaccaccgcctctccccagaagacagccggcattcctctctgcttgaggagagcccgagccatccccacaactgtctggttgcgccgctcgacgacgccgttctgttgcgggctgtacggcgcggagtagtggcgctgaacgccctcatccgcgcagtacgacgcgaactcagccgccgtgaattcgccgccgttgtcggtgcgcagcacgcgcagcttgcggccgcactccgcctctgcagcgacctgcacacgcctgatggcgttcgcagcctctcccttgctgccaaggatcatcacccacatatagcgggagagatcgtcgacgagcagcaagaagtagcgtcgtcctcctggtgtggctggtgtcaccgggccacacaagtccccatgcacgagctcgagcctctccttggctcggaagctcgactgctggggaaaggggagccgtctctgctttgtcaacacgcagacatcgcagaattgctccacatggtcaaggcacgacagtcctcgtaccatctccttggcactgagccgcttcagggcctcgaagttaaggtgcccgaagcgctcgtgccactgccatgccccgtcgtttcgacgagcagcaaggcagcaaggttgtgccaccttcacattgaggatgtatagccgatttggactcctgcgtaccttggcaagaaggcgacgagagggatcccagatcctcatgactccgtgctcgacctccacgcgcgaaccgttctcatccagttgtcccaagctgatgatagagttcctcaatgcggggatgtagtagactccggtgagcagcctgtgctcaccagacgccgcggtgaagacgactgagccggtgcccttgatctctacgccggaggcgtccccaaacttgacggagcctcggacgctagagtcaagctcggtgaagaactcccgtcggccggtcatgtgatgagtggcgccggtgtcgaggcaccatccttcgatcatgtctttgctggagccgtcgccgaggaaagcgcgtgctttcgactcatcaaggtggaggagttccgctgcggccggtgccgctggagatggctcgatgcttgcatgtgccaggagcagggcctcctcctccgcctccgcttgtgcgacgttggcctggccacgtcgtggctgccgacagtccctggcccagtggccaagcttgccgcagttgtgacaaccgtcgtctcgtgccggcttcttgttgccgacggcgccgccttgggcacctccacgggcaccaccctcagaatgtcctcgcgccccggcctgggcgcctccacgcgccttgcgcggcttgccgcgtttgcggcctcgtgtcgaggaggactcccccttcttcttgtcaccatggcaggcctcccactgctctcgagtgagatgtagcttcccgccgatagtgataggcccagagagagcctgtggttcgtcgccgtcgaccaccttgaggcgaccaatcgcctcttcgatcgtcatcgtggagaggtctagcagagactcgatcgagcgagcaatctgcctgtacttctcggggatgcaacgaaagagcttctcaacagctctctcctcatcgtaggtgtcgtcgccgaactgcaccatcttctgcaacagagtgttgaggcggagagcaaagtcatcaacatcctcacctggcttgaaggccaggttctcccactccttgcgaagtgcctgcagtgtggtcttgcaggcacgatcgctgccgatgcgggtcgcagcgatggcgtcctaggcctccttggcagtccgcttctgggaaagcgaaaactgtatctcgggcgggactgcagcaatgagggcatccaacgcccgccgatcctcgtggtagtcgacgtcgtcgtaccgaactgcttcccacatgtggcgaacctggagccgtaccctcatcaccgcggcccactcgacgtagttggtcttggtgagggtaggccacccaccgccgggaccgatgtccctgacaatggcctgggccatgcggcgaccatggtaccgatccggggagggagaaccgcgccgcctgtagaggccgcgatctccatcgactcggtcgccgccgccgggagcaccgccggcgcgtctacgcccgtctgggctgccgccgcgtgcgccctcgcctggagcaccgtcagcgcgtcggcgcctatctgggctgccgccacgcgcgcccccatggggatgcgcggctgcccactgtgccgcctgctctcgcgctgcttccctcgccagcctgagctcttcgtcggtgttatcgtcgacagaagcagagctgccagctctactgccgcgcagaacctcgagctctgttgccgccgcacgtgcagcatccgccgcctccgctgcttctacttctgctctcgccgctgccagttccgccgccgccaaccgtgctgccctcgccgctgtcgctgcagccgctgctgctgctcgctcgcgttcttgtgccgcggcgacctcggcctcctgctggcgccgcacactcgaagtggccgagcgtagggacatggtgggctagtgaggggtcgctgcgtgtggaagaggctgtctcagacgaaaggctgctcgtctgagcaggggaggaaggaacagttggagctcttgctgccgactgagtgtggggagaggcgtgggaaggagatgagcacgagatgtttaggctgcaggatagtttggctctgataccaattgtaagtagagggactctaactctcatcaagaggatgacactatgaattggggcaattttctgtttatttcctcaaacactacacaatgccatacccttagaggggttggggacacatatttatagccctaggggctgcactaccacaccttctcacacacactacacaacaggattgtcctctagatgctaaagagactacagaggacagtcaaaagcgactgttgtcctctagatgctaaagcgactatagaggacagtcaaaaagcgactgttgtcctctagatgctaaagagactacagaggacagtcaagctgtcctctagatgctaaaggactacagaggacagtcaaaagcagactgtcctctagatgctcaagacttattccatcattcagacctagatactgcttgctcccttgctcttttacaggaggacatcctgacaacctcaggattcaggaaggaaggatggtagaaggacggaattcagggggtttatgaagccacatcaaaggtgtgctggtagaaacacctcggctgcgcagattataggagtgagtatcaagttggctggacgagcgggagcgaaggggcgccgtgctgccgctcggctgggaacttaggtgaggtgcggaacacaggtgaggcagggaacaatcacttcttagattgatcaatgcttccaattgattacagacgcctggactttatagtccaactctaaacagactccttaatcttaggaactctaacagactctccttaaaaaacagactccttaatattaggatctctaaacagattctccttatctaaggatcctcctaatccttatctatatgtccctctataatgggccgactagagggctgtttaggcctcctactataaaccataacatttctccccccctcgacgaacagctcgtcctcgagctgaaactgcggatatgaagccttgaactgttgtagaggttcccatgttgcatctactgactgagtaccattccagtgcaccaacacctgccattgtccgtgctgcatccttgctcttattatcttctctggcgatggcagaagccggccattttgcataggtgggaggtctgggggcaggacaggaggggtaccccggaaaggcttaaggagtcccacgtgaaagacatcatgaattcgtgccccttctggtaactccagacgatatgctactgcgcccacgcgctcaagaatacgaaatggtcccgcatatcgcggtcccaatttccctttgggtcgttcgaccagtgactgagcttgtcgattgaggagacggagccagacccagtcatccacatcgaactcgagatcccggtgtcagccatcataaaactttttggcatgctcttgagcttgcagcagcctatctctgacttcccctagaaatatatctctttcccgtagcatatcatccacaacttgagtgtctgctgtcccctgcttatatggaatgagaggtggtggatccctgccatatactacacgaaaaggagttgtcttcaatgctgagtggtatgatgtattgtaacagtattccgcccatgcaagccagtccacccaagctcttggcctgtctcccgtgatgcacctcaaatacatggcaatagttttgttgactgcttccgactgaccatcagtttgggggtgaaaagcagtactcattcttaacttgacacctgttagcttgaacagatccctccagttatgtccggtgaaaactggatctctatcgctgactatggaacttgggaacccatgcagccgcactatgtcaataaaaaatgctcgtgccacagtcgcagctgtgtaaggatgactgagggcaataaagtgggcatatttagagaaccgatcaaccactgttaatatgacagacttaccatggacctttggtaaaccctcaatgaaatccattgagatgtctgtccatatttgtattgggacttccagcggttggaggagccctgcgggatgcagcgactctgttttgttcctctgacagattgcacatgatttgacccaatcttgtaccagtgtcctatccttgtgaatgaagaaatcagctcttaatcgatgcagcgtcttttgtactccaccatgtcctgctgagtgtgcggcctccagtattgagggaatgagtttggatgatgttgggataaacaccctgcggccgtgcagtatcaagccttcccgtatctgccatggggcctctagggatccctctgtaatctgagcctggaggagtttccactcatcattattagcacattctgcctgcaattcttggtacagctggaatgttggggttgatatggtatggactgaactttcagttgtgtccctgcgagataaagaatcagccactgtgttgagtcgtcctgcccgatattccactgtgaagtcaaagccaaacaacttactaatccactaatgttgtggtaccgtggatagtcgttgatctagtatgaacttgagactgaaatggtcagttcgtaccacaaatcgtctgccccataaataaggacgccagtgacgtattgcctgtaccaacccaatgagctcgcgctcatatgcttccaattttatgtgtcgggctgcaaatggccggctaaaaaaagctattgggccgtgatcttggtgtaggacagcaccaaaccccgagcccgaggcatcacaatccacagtgaaagtccgttcaaagtcaggaagctgcaggactggtgctgatgagagtgcccgtttgagcgcttggaaggcggagtcggcttctggagaccactaaaagccttctttctttaggagtttggttaacggtgcagcgattaacccaaattccttgataaatttccggtagtagcctgccaatcccagaaatccccgcagtcctcgtgcctttgggatcggccaagaagtaactgcttccaccttgctgctgtccatagccactcctttagctgagatgatgtgccctaaataagcaacggatgtcgcgccgaattcacatttggactgtttgacaaacaaattgttggtcagcagggtctgtaggacagccttgacatgtatgaggtggtctgaccatgtggcactatagatgaggatgtcatcaaagaatactaggacaaaccggcgaaggaactgacccagtacttcattcatcaacgcctgaaatgtcgctggggcatttgagagaccaaatggcataaccagaaactcaaagtgcccatggtgtgccctgaaggctgttttgtgtacgtcttctggatgaacacggacttgatggtagccggatcggaggtccaatttagtgaagaaatgtgccccttgcagttcatctagcagctcatcaaccacgggtatagggaatttgtctttgactgttttctcattcagtgctctataatcaatgcagaagcgccatgatttgtccctctttttcactaggagtactggagctgaaaaagctgatgtgctgtagcggataatcccctgttgtaacatggctgtgcattgtgcctccaattcatccttttgaagctgtgggtacctatatggcctaactgcaacgggtgctgttcctggcaaaaggtggatcctgtgatcacaccttcttgctggaggaaggtcactgggcgtagcaaacaccttctgaaattgcaggagcagacgatccatcatcggtttggtggttgtgatatctgtgctaattgttctcactgctgggtacacattaatggccttccgatctgatcccagtcctttccacacaattcgttgtccccttctccagaaagctaggcacaggttctcgaggtcccaaagtgttggccccaaagtgcgcaagaatttgaccccgagaatgatgtcgaaagaatcaattgggatggcgtaagcatccatcagaaagtcttcctggccgatagtcaagctgatgctgttggagagcttacaacacatgattttatccccattggccacagatgcctggagggctgggcttggctggtagtccagtttcagagcgcgtgccgtgtcttggttgatgaagttgtgagtagatcctgtgtccaacagggttgtaagagctttccccatgatatgtacttccagctgcaaggtactctcagaatggatacccgtgagggcatgtaaggagatcactggtgttgggtcccctggcactgaatcggcctctatagattcatcttcctcatagtccgtgacctcaagatagaacaatttagggcagcgatgtccacggacatactgttcatcacaattataacaaagtccctggcgacgccgctcagccatctcggcaggcgtcaacttcttgaatgttcgctgctgtcctgtactgggagctgcaggaatcgctggttgaggtgccggtactggtacagacgggcgttggggttgacgcatggtcttgttggtggttgatgtcggctggtgatcgagcacttgtgacctccgttcatatgcgcgcgccaaactcaaggcgtgattgatatcccgtggtgccatgagttccacgtcgatcttgatacgctccggaagtccagccgtaaacagatgtaccttctgctcctgtgacagtggagctgtttgggctagcaggtcccaaaacctctcctggtagtcatccactgtcgtgcggaatggaaggcgtgccagttcgccgagaggattgctgcgtaatgggggcccaaagcggagttggcaatgctgcttgaagagttcccatgacatggaaggttcgtcgcgctgtagctgggtgtaccacgtccgggcaattcctgtcatgtgataggatgcgagccagactttctcatcctccagcgtgcgctgaccttcaaagaattgttcgcatcgattgagccactggagggggtcttccttgccgtcaaatagggcaaattcgaggcgatggaagcgaggaactcctgcagtaggagtatggggaatggtgttgagagatggcagtgtaggtggtggataatgtgggatgggcgaaggggaatgtggcaatggtagaagatggattgggagctgggtggtggtgggtggtggcacatcatcagttggcgtcgtggtggggggtatgcctccatacccgggcaagccataggggcagcttgctggaagggacagcgccgctgatgcaggcggagtctccactgctgcaatgcgcgaggacatggaggacatctgcgttgcgaaggcccctagttggcgctggacttcggcaagggcggtggtgatcgctgccaactccgacgcctgggtggcggacgctgcactgtcgtcggtgttggatcctggcatctccgataccaaattggtagaaacacctcggctgcgcagattataggagtgagtatcaagttggctggacgagcgggagcgaaggggcgccgtgctgccgctcggctgggaacttaggtgaggtgcggaacacaggtgaggcagggaacaatcacttcttagattgatcaatgcttccaattgattacagacgcctggactttatagtccaactctaaacatactccttaatcttaggaactctaacagactctccttaaaaaacagactccttaatattaggatctctaaacagattctccttatctaaggatcctcctaatccttatctatatgtccctctataatgggccgactagagggctgtttaggcctcctactataaaccataacatgtgcctactgcccaagtggcgtacacaccaagggaagaccgtcaccgtcagtcgggatccagtatcaaacctgatgacaacagactcacagctttgaaagcatacagaagggccaagggattgtgtttcaagtgtggagatagatgggggcataaccgtaaatgctctactagtgttcccttgcacctagtggaggaaatgttgtcaattcagctgaagaagaggatggcaatgaagagacagaggattaaactgacaaaacaaccgaggaagcagtgttggctatctcagctgctgcagtgagtggaggaggagagggtaacagagccatctgactatgggcttcaattcactgtcaacaggtcctaatacttgttgattccggtagctcagccagcttcatgggaagtcatctaatgggggtcatgtctgattcacagaaattgaaacagcccctgcaagtaaaagtagctgatggcggttgcatgtggagcaattatctggtgtctaattgccaatggctgtgtgtgggggtatcaacttttgtactgatttcaaggtgttacctctgagtgggtatgacttcatacttggtatggattggcaggagaagtactgtcctatgtctgttcattgggcagaaaagtggatgaaatttgaataccaagggaaaacaattcacctgcaaggaatagttcctcagttgcagacatgccaccatctgtcttcttcccaactgaaaggcttagtcaggaacgaagctatggagcaaatcttagaactaagagaagtaactgaaaatgaacagctggacatacccaggcccgtgtctcagttgattgagagataccaggatttgtttcagaaaccccaaggcctacctcccaaaaggaaagtggatcataccattcctctcatgcctggagctcaaccatttaggctgaggccatacaggtatacaccacaacaaaaagatgaaatagagaaacaagtccatgagatgttggatactggagtgatacagcacagctctagcccctttgcatctccaattctgttggtaaagaagaaagatggggagtggaggttgtgtgtggactatagaaagctaaatgcatatacagtcaagaacaaatatcctatgcccatatttgaagaaatcactgatgagcttgggggagctactatctttaccaaattggaccacatatcaggttatcatcaaattaggattaaggagggtgaagaatataaaacagcatttcagacacaccgtggtcattatgcgtatagagttatgccatttggtttaactggtgcccctgccacttttcaggcctttatgaaccaaattctggaacctcttctgagaaaatgtgtggtagtgtttttggatgatgttctggtgtatagtggagcatttagaagagcatgtgaagcatttagaacaggtgtttgagttgctgaggaaaaatcaactcagactcaaacaaaccaagtgttcatttgctcaggacagattggaattcctaggtcatgtggtcagttctagaggaatatccaccgatccaaacaagatcaaggtcattcaagattggccaacacctaattgtgttaaggatatacacagttttcttggaatggctggttactatcgtaagtttgtgtctggttttggcatcatcagtaaaccgctgacaaatctactccggaagaatactgtatttgtgtggaatgatgagacacaacaagctttcaatgctctaaaaacagctctaacccaagcaccagttctagcagttccagatttctccaaaccttttgttgcctgacaccctggagctaaaggatgtggctgtttaccgatgttctgcttggtgtttagacccgtccttggtgcctgcttcaagggagctttggatcgtcgaacctccctttgccgttgatgggatgtcttctggcaggagaacgctgatgtatccaatccgcatcacattctcgtctgccccacggagggatggatccgatcctaagcttcatgctattacttcgggcggggatggttctggtcacgtgcagcagggatcccctcctttttcaagacctccccattcgagtgggagaaggggagaacatggtcattcgggacgtctctcagttcatgagcgtttgggcccaagagatgagaacatgcagcagcggagcattagctccggggtggcagtttcagatttgaggagaactttggaatctgatggggggaccttgtctcctaggctggtagagatgactgatgacatggttcttgtttcaccggtgaaggcgaagcagctgaaagtttattttcgtcaaagattcaagaatgtcctgaaccaggaggaagctggaactcccaattctgtcactgtgcttcctccatccaccacagacgtggcagctgctgacacagatccatctgagtatcctgtttcagatgttgacgctgtgttggcaactctgtctagaacattaacttcctccctgtctgatgtggcagcagcacacgcggctccgtcgaaggctaatgccttagacgttgacgctgagttggctgctccatctgaggaggacatttcagcaacaacacatgctgcgttggctgctccatctgaggacccttcagcaacaacacaagattctgtggagatttgtgctcaagagcaattcatcagcaaattgtcaaaccagatcacacgcgtattaccaatcccaaaatctgtcagacgtcagtcctctatccccctggcagttccaagacgcagccgacgtgtggcgggggttagagttgaatttaaaattcaggattggggaaaaagatctaagaaacaagctatggtggccctaaatattattgaggacaatgaaggattcagccgtcaagctttagacgactacgccaagctcttcaagaatactctttctcgtagtcatgtgcaggctcttgctgccctttttgggtggtctgtcccagataatttagaatatataactgggactggggatattaccgcagcaagcttattttagctggcgatgttgctgatattgtttgtcgatttacctctcattgtttctacatggatccggaaaaaataattgtttggaatgttagaggtcttaattctctagctcgacagaattctgtccgtgagctcctcaattgttatggagcggatataatctgtcttcaagaaactaagatggcacaaccttcttcgcgtgttctcctctctatgttggggtctgattttaccggttcattggccctgccttctaatggttcgaggggtggaatccttattgcttggagacgacacatggggataactggagctaccaggacagacatccatagtatttctgtgcagttttgttcagtggagggacaccagtggtggcttacttgtgtgtatggacctcaatctaatgaagccaagattgaatttctgcaagagctgagacatattagagcagcttgtcagggcccttggatgattactggggatttcaatctcattttgcatgccgaggataaaaacaactcgcatattaatcgggctatgatgggtcgattcaaaaaattggtagatgatctcgctcttaaagaaattccactccatgggcgcaagtttacttggtctaatcagcagaatcagcctactcttgtcaaacttgatagagtcctgtgctctattgattgggaggagctgtttcctggtgcagtgttacaaagtgtggcttctgaagattctgatcactgtcctttattattgggtctcaaagattgcaaaggtgttaaaaggcgcttccactttgaatcattctggacgaaaattgaagggttccatgaagtggtgcactacgcctggaattcggttcctgttggccactgccctttctccacttttgatttaaaactcaaagggacagccaaagcccttcaaggatggagcagcaagaaggtggggcacattgagactcaactgcaccttgctagagatttgatccatcagcttgagattgcgcaggatggtcgtattctgtctgtgttggaaaggtggctgttaagtaaattgaagaagctcgctctggctttggcctcaaccaagcgtatcattgcccgccttagatcaagaatttcttggctcaagaaggagatgcaaattctaagttgttccattcctttgcaaggtacagaaagaagaaaaacagtgtttccaagcttactgttggaaatcaagtccttactgctcatagcgacatagctgcagcagtggatcagttttactttgatttagttggggctagtaaagacagaaatatttcgattaaccttgaggctctggaaactgctggcactccatctccaaatttgatcgagttggacagccccattactgagcaagaagtgtgcaatgctataaattctctgccctctgataaatctcctggaccggatggatttactggtagattttacaaaatttgctggtccattattaaagaggatcttatggctgcggtgattgcgatttggaacagaaaatttgataattttcataagctgaattctgcttttatcactctaatcccaaagaaagataatgctgatcaagtcaaagattttagacctatcagccttgttcacagctttgcaaaactaatcacaaagatattggcttctcgattggcttcaaggctcaacgatttggtctctccaaaccaaaatgccttcattaagggtcgctttatccaggataatttcatgttggttcagcagacggctaaattacttcatcaacaaaggcatccttgcctgatgctcaagctggatattactaaagcttttgattcggtttcctggcccttccttattgaggtcatgcagaatctagggtttgggcagatctggagagatatcatttcagggctgcttctcacttcctctactcgagtgttagttaatggtcatccgggaagcataatttctcatagaagagggctgcgacagggggatcctctttctccgatgctgtttgtgcttgtcatggatgtgcttggtcaacttgtctctaaagcagatgaggaaggtttattacaacctctttctactaggcagcttcaacaccgggtttctctttatgctgatgatgtggttctttttattaatcccgtggcagaggacatgactatgatttcagacatccttcagctttttggtgaggcttctggtttatataataataatcagaaatctagtgtctaccccatcagatgccatgaagacaatttagagattattcaacagttttggccctgcgagatatctagctttccttgcaagtaccttgggctgcccctgtcgttacataaattaagaagggagcaggtgcagcccattgtggataaaatagctaatcaactacctggatggaaagctgatttgttgactaaagcaggaagaagtgtattggtgcaatctgttttgacaggggtgctgatttatagtgttatggctgtagacttgccttctactactttgaaggacattgataaaattcgaagagggttcctttggcgtggtcgtaaaaatgccatgggtggccattgtgcagtggcctggggcagtgtgtgcagacctcgagatcttggtggactgggtattttcagcatcactgaactgagttgggcccttaaaatgcgttgggcttggctgcaaaaaactgagccaggtcggccctgggcatccctgcctttgcataccccgaaaaaaattcgagagtttctacaagtagccttgtattctgagattggaaatggagcttctacccttttctggagtgatcgatggttggatgggcagcagattggggatatcgctccccgacttattgagaccattcctatgaagctgattaacaaaaggacagttcaggaggcgattgaggataatggctggattaatgatattcttgggaatttatctgttggtgcacttgcagacttcctgcgtatttgggatttggtggcacatgttgatctggacccccataaggaggacaaacatatttttcggttggctggtaatggcaaatattcgactaaagccgcttatgaggggctcttcattggatctgtggagtttgaaccttttgagcggatttggaaaacttgggctccgcccaaatgtcgattcttcttgtggctggtggctcacaagaaatgttggacaacagatagacttgagaagcgggggctggatcatccggaaaaatgtcctttatgtgagcaggagagggagacaattgaccatctacttgtgagttgtgttttctcaagagaatgttggttcctccttctaaggcaattcgggctgcagggtttggccccccaaccaacggatattaattttatggagtggtggcatcaagcaaatgaagctattcaggggtccttcagagatggcctaaactccctcattatgctgggcgcttggattttgtggaatcaccggaacagatgcatctttgatggcctttcccctaatgttgctaatttcctaatccatgtgggggatgagcgccgtctgtgggagactgccggggccaaggggttgacatcccttgttgcctccctatctcatgtagcctagagtttttatagatgagtcagtctatgctagtttcgttcaggccgccgtaaggcgtcagttgtaccccggtctattttggaccttgtttatttcttcttttaatataatgatacgcagctctcctgcgtgttcgagaaaaaaaagaaacaaatgcaagtggaatgtgtgttggagcagttctacaacaaggtcaccccatagcttatatcagcaaagcgttgggtccaaagaatatggggttatcaacatatgagaaagagtgcctagctattctgtttgccgtagagcaatggcatccatatctgcaacaaggggaatttgtgattaaaacagatcaacaaagtctaacgtatctcgatgatcaaaggataaccacaccatggcagcaaaaagcattaaccaaacttatgggtttgcaatttcgtataatgtacaaacagggaatagagaacaaggtggtagatgctctatcacccgacctgatttccagtctgatggtgctgacatgcagttgaatgctaccacgtgctcatctgtggttcccagctggctgctcgaagtatccaaagggtatgaaaccgatgagatgtcgaagaagctattaagtatattatctactggggggcaggtggatcagttcacatacaacaatgggataattaaacacaagaatcgagtgtggctaggtgccaactgtgaggtccagactagggtcatgacaacgttacatgacagtgcaacaggtggtcactcgggttttcagtgacctaccaacgcatcaaagcaatattcagttggcctggtatgaaaaaacacattgaggagtttgtgcaatcttgccttgtctttcagccagcgaaactagagaggagtggatatccagggctgctatttcccttgcctatacctgaacattcatggcaagtgattagtacagacttcatttctgggttacctttatcacatcattacaactgtgtcatggtggttgttgacaagctatcgaagtatgcccatttccttgctctggcacatcccttttcagcactatcggttgcaaaactgtacatgaaggagacttatagactgcatggtatgccatcttcgattatctctgaccgagacgccatctttacaagcaagttatggcaagaattgttcaaactatctggtaccaagttatgtctaagcagcgcgtaccatccgcagtcggatggccaaacggaaagagtcaatcagtgtttggaagcatatttgcattgcttcgtccattcttgcccccgacaatggtatgcatggttgtcactagcagagttttggtacaatacatgtcatcactcctctctaggaaaatctccttttgaagttctgtatggttatactccatctcaactggggctggtgtcagttgacaagtgttcggtaccagatctgcaacagtggatgcagacttgccaaaacatgttgcaacaggtgaaactacatcttcaaagagcccaggaccgcatgaaaaagcaagccgataaaggtcataaagaaagggagttcaaggttggagatcgagtacttttgaagctacaaccattctgccagaactcggtaactgagtgactgaaccacaagctagctttccgctactttgggccttttgcagtgaccaaaagagtgaattctgttgcgtacgagttacaacttccaccaggcagttccatacacccagtgttcaacgtctcgcagctaaaaccagtcgtgggttatagagatcctgtccatgacatattgccaaacttatctcatgacttgcaggttcctgaggaggtgttggactcacgtttaatcaggagaggcgccaagaccgtgaagcaggtattgattcagtggacagactcgccggcatcactggccacctgggaatacaagcaagctatccagcaacgttttccgttggcgccagcttggggacaagctgttttcgaagggggaggagatgtcagcagtaccaaaggcaatgccgatgggcaagaagtaccgaaagaaaagatgaaggctgaagcaggaagaaaaagggaacgcaggcaaaatcccaagtacataggtgagcagtggggaaattaggcccagtaggaccaggaccatcggatgatttctatatatactatgtgctataataagacaggtgaacttggatgaacctaggcggcggcagacactatcacaatacgaaataccactcggcgacggatttgccgcggaggcgcacctgtgtgttcgtcttgatgagtgaaagtaagagcgatcgtaacaccatggatatcaaagaactcatcaaacgaccaaaagcagaatagtactcatcaatagacataccattccgctcaataacatgagtttgcttcttgagagtgtgtaagagagcaccactgtcctgaacaaaacagtccttcaaataagatcaaatagctttagtagctgtgaacttggacatgctcataatcatagacaatttagtgctattaaccatggcagccatctctttgccatcattgatctgccaagcgttgatttcaacagcattactacggtcctcatataaggcaagaggatcttcagttaaatgaaaaagcaaaccatgaccacgtagtgcagtctgaacacagaaagcccactctaaatcgtcaagaatgaagttaaccacaatagcattgactgaaacagtgttcgattgatgcgtgacttacaaagaatgtaaataagacaaggacaagataaaccacacaacaacaacagaggtagaagcaatcaacaggaactagtgaagagatgacctgattctctgtctcaaacctgattctctgttccaaagaagcagcagaagacctcaacacttgcagacaccgggagaagatgctgacgacgagtatcaggaactgcgcgaccctggtggagccacgaccaggatccgcatcgacaacaaaggggaggacacgtctgaaggagtcctcagagggggaagacgcgtgtgaacgagttcgcgccggcaacagatgcagtcgcgctgacagtagatgcagtcgcgcctgatggatccaataccatgggaggacgcttctgaatgggggaaggagacttgacgaagaccaatgcggccacaacgacaacaggtggccatggacacacctgaatgggatgtggctgcgacggcggcagcaggtgactgcggaggcggcatggatgttgacggtgacagcgatggggagaagccgcgacgacgactaatgcggcagcagaggtggccgcagatgcagactggatggtgtggagccacgacaacgacagaattggggccgcgatggcgggcgaggtggtggtggagccacaagcccacaacgttggtcgagataggggagcagcgacgacggcgcccgattggaaggcgacgaccggattggggaagaccggcggcacaaaaaaaacggatcaggaaggattaaccctaaccctgacttgctttggtaccgtgttactaaccttggattagagagagtatgactagtccttaggacttggtagaatatatatacacaaataatatggcctcgtgggccttaacaagacgcactaacctgccactaacccaaccagatgtgtagctgctgactagatgggacattctactaggaaggtaattgagttgagttcacatttttttgaagctagaagaaaccaacttatgcacttagagattgcacaataaatctaggtgaatccataaccagcctatgagcttacatattcataatttcatattaccaacagcatggcaacacacactgcacaacaggcaacaatttaatgcaggccattcaaggggacatcaaaggagtttgatgcaatcacttatagcacggaagaaaaccaccagtgctacagcgatgtcatggcagccaagtaaaaagtgtccaaggggcaaccctaactctacttcaggagcaggagcagctcaccaagcggaccaagcctgccctggaagttgcagcaaacggggagcacaacaacatggggcagctgccaggcgtgccacatcggaccttggcgggtcttggcacttctggctgcgagccaggccagcccagggcgcatggagcaaggtaagggggaggaatggcgcactggaggagaaacagggaggggctgcatcttgctagagggagaggaacaacatgggagcagcatagggagggaggagtagaaggggtggcgtggcagctgctgctgttggaggagggagccgggtggaggttctgaggaggggaatggatgcataatgtggagcttttaattatttttgttcttctcttatcttttgatttcctttatttgattgatacaagatgaatactagttgagttcaacaaaactttaattgaacatattcgaaaaagcctagtgaactataatctatacacttaggtgtttctcccttgttcttgtttttactgttatagttggcatgaactaaatttataaattcatttggcattaatttttgaaatgtttaaacattttcgcataatccccccttttcatgtgtactggttgctctattatttctcaggacattttttctagaaagtagaaacccaataagagcccattcttcatcacaaactttcatcattcataattattagccttaataattctcttagcattcttttttttttaactcagtgaaggtttgttccataacgtgaaactctaccatggcttgtcctcttatgggaacctcccttgatcattaacctgaatgccatgcttaagcaatattaaaccatgcgcttaaacaccagtgatgttacattttgtttgcttggaaaattgttggagggaaataaatatatcaattctgttcaatctcttggcagtagatgggttattttctcacttgctactttattgcatatttgcatccatatgcagaagctagtccagcggtccttgaaggaggaagagaa

SEQ ID NO: 1199 - DNA, 985 bp, Zea mays
  Intron number 2 from transcript GRMZM2G350428_T01 (locus G RMZM2G350428) derived from phytozome v7.0 (chr-ID 5; pos 3 784501 to 3785485)
gtggtacgtacgtcatacggtcatagcttccagtgtacgtacgtctagcttccagtgtactttctcttggtatttcctccaaaaaaaaatacaattctgaccttccaatgagccaaacaattttaactattctcgcttagggcttgttcggttagctctcaatccatgtggattgagtgggattatgtaggtttcaatcccaagcaagttaaaattcttctaaattttttctaatcccactaatccatgtataatgggaataaccgaacaaggtcttagagcttgttcggttagctctcaatccatgtggattgagtgagattggatgagtttaaatcttaaacaagtcaaacttcttcttaattttttccaatcccattcaatccatgagtaacgggatgaaccgaacaagaccttaaacggattagagacctggaattctggattaattagcaggtggtatttcaacttttgaagcgacacgtttcatggcgttatcctgattaggagacatgggaatgagatcgtctgtctcatctctgagctctgactggatctaagtttgccaggagaaggagaagcagcagaggtagaatgtagatccttgcaagcctagctctgacgtctatcaaagctcagcagatgtgtagcgtatcccagtgatttgataacacgactccaacaacggagtcgcacgttccggagggggcttcgtctcggttctaattgctctggttccatgacttttacagcacacaataatgtatagggcatttgacggtccagaggagctaactttagagtgtgtttggttccacacaactaagttcaatttacatcaaatgtttaaatagtaattatgaacattaagtagtttaattataaaactaattacaaacactaaaagacgattcgagtttattaaatctaattaaacatatatataataggcgtaattgatatccaaatatttgatacgagttca

SEQ ID NO: 1200 - DNA, 8829 bp, Zea mays
  Intron number 3 from transcript GRMZM2G040320_T01 (locus G RMZM2G040320) derived from phytozome v7.0 (chr-ID 4; pos 2 34329887 to 234338715)
gaagtacacaggtgagccgtgagcatctttagttctttacttccaaacttaaaagttgtgaaatgtctgtttgcttaaagaggccatctgacagtgattttgaagccagtttcattctaataacggcagaatcgctgccaaaaatgatttcttctgaacgtttcatttcgcaaagcaccaataaacaacccaaagctgagctggtttcacatgagaagtgctccctctgtttgcacctcccttttaacttcactcatgtttacttccttttccactgttataataaactccaccaatacccacctctgccacagatatcagattaatctgtgacctgataggatttggttagtgcgtgcatatattttttatttgttgtatgacacttgtatgattagaaaaatggttattctttctccagacatcactcatgtgggagccgctagcactgagtctgtccttctttatatcattgcaagcatatctaaagggctatatctatcaatttaaccaacatcctctctagagctgaaagtttgggccgggccatttgggctagcacgagcatggcacgaaaaaacagcccaaagcacggcacgacacgaagacaaatggatagggctggcacggctcgaatggccgagttatgctgtgcttcaaagttagacacgatgggtgggatgacacaacacgactagatgggctgtgcttaggccgacacaacaaagtgaggcacaaattagaaaactaatgtttaaatggttctttaatgctccaataatttttatctcttcacaaaagttatagaaaacatcggtacttatagtcatcttagtagaatatatgtttttattaaaaaataaatatatatagcaatcatcaaagttataaataatttgaagatgtatttttttaggtatatacaagcttttttctccgtgctatgcttgggctggaacggcacgacatcggcccgctgtacttttgggccgtgctgtgctgtgcctaggtttttggtatttgggcatggtgcgacacagcatgacacgaaattaacccgtgccgtgtcggcccgaaataatttggcccgagccacgcaggctcgacattgcccaactttcagctctaatcctctcaggcaacttgccaaactatttaaaaactagttagttgcccgtgcatcgctacggtttctatatatcatatacggtttctttgtataatataaaccaacacgagttgcagtggttagaggcaagcgctttgttcctagagaccatggtcccagcgggtgtgcctttttttatattttcgctgagcgcgtggggaactctggcgatgctcgctacgcgtggggggagggggacgatgcacgaagaaactcacgctttaaaggtatagcgattattctgattcatggagaaacgtttctgaggagaaactaatctgaaacatttcttggagaatctgaatatctaccaatccaaccataaatgtcctactgttgtcatcgtgattatctgccactacaagaaaacatttacttaagattgtactcaatatcagaaaatctgtccttcaaattacagtcgagcctttttgttcaggattcttacatcatccacagttgcagtgtcctgatccacacttcaggacatgaattcaagagggttcattctcaaccttgcagtcctcccacccattttctcttccttgtctaacagtgccaactttccaacaactgaacacagcttcatctgagttcaatgtctcatttccctgttcatttattccatcccaattcccattcaggcattcacccatagggatgaaaacggtaggtaaacgctaaaaccgtttctgttttcatattttttattgaaaacgaaatcggaaacggtaactccataaacggaaacgatatcggtatttcagaaacatcgaaaacgaaggttcgacgggtaaaatacaccggtaacagtcggaatttaaaatatgatcggtaaacataccaatatgaaaatattccaatataacaagttcacaattatcacaagttgacaaagccagttgactgcatcttggccagaccagctacccaaaagcggcgacgtaagcagacgccaaaagattttatacctagaagaagcaatagactgaagaaggatggtaggggggcgccttccacagctgtcagaaaaataagagtggatattgctagaaccttggggatatgggctgaccaggagggattggctcaagaagctcttgatgaatatgggcggctgttttctaagcctctaactcaggaccatgtcgctgccttagctgcactgttcggttgggcaattccggagaatgctgatgctgcagattcactgttgggacagagtcccattattgtgtagttcccccttttgttcttgggttgggaagctttttctctagtcgtactcctgtcttttgtttctatggatatctcaaaattgttgatttggaatgtaaggggactcaataataagtctcggcgggattctgttcgtagtttgattgattctgtgaagccggaagtggtttgtttgcaagaaacaaaaaaggaaaatatttctagatggacagtcatgtcgacccttggggctgattttgatgaatttgtgttcctcccagcagagggttctcggggtggcatcttggtggcttggaagggcaatgtgtgcaaggctattgcatcaagggtggatgttttttctgtttctgttcagttccagcagagtgagggccccccttggtggttcactggagtttatggcccacagtcggacgtcctgaaggtgcaatttctgcaagaacttcgtaacattcgccttacgtgtgctggaccgtgggctgttggaggggatttcaacctcatttataaagtggaagacaaaaataatcaaaatgttgacagggcaatgatgggccgttttcgtcgtcttcttaatgagcttgaattggtggaaattgatcttttgggtagacaatttacttggtctaatgagcgggaagcgccaacccttgtcagattagatcgtgtttttgtgaccactgattgggaccagttgttcccagattgcattctgcaagctttggcttcttccatttcagatcattgccctttattgctgggcttgagggactccttcatgggtaaacgtcgctttcatttcgaaagtttttggccaaaacttgatggatttatggaggttgtgcagcagtcctgggagcagccgattatggctgtttgccctttacagaggctcgctgacaagctgcggaggcttgccaaaaatctgcaatcttggagtcataggaagacaggcaatatcaagcgacaacttcttcttgcgagggagattattcatcaactggaatctgcccaggattcaagattgctgtcctcactggaaatttggcttcggagacagcttaagcatcatattttgggcttgtcttcctttgagaggaccagggcaaggatgcgttctggtctgagatggctcaaagagggagatgccaacactgcgtatttccagcaccatgccagatacaggaagaagaaaaactttattgccagtttgaagacagaggacagggtgttcactgatcagaaggataagattgaggtggtctgggatttttacagcaatttgttgggatctgcgggacaacgtaacttcactcttgatcttcaatcctttcatcgatcagctgttgatcttaccgagttagaccggattattgacgaggaagaaatttggaacaccatcaaatccatgccttcagataaagctcccgggccagatggctttacaggcagattctacaagatggcgtggcaaattatcaaagtagattttatggctgctgtgaatatactgtttcagggtgatgatagtagactttttctcctcaactctgcatatattaccctgctgcccaagaaagttgatgtggaggaggtaaaagattttcgccctataagtctgatccatagtttcgccaagatcatcactaagctgctggctaatcggttatcagggaaactatcacagcttgtgtcacctaatcaaagtgcgttcgtgaaaggtagatacattttggataattttgttcttgtgcaacagatggcccgagttttgcacaggcaaaaggaaccgagagtgctcctaaagcttgacatcaccaaggcctttgattcagtttcatggcctttccttttggaggtcttacaacatcttggttttggtgctcggtggtgtgatatgttggcaaagttgctacgctcttcttctactagagttttggttaacggtgaaccaggagagttgatttatcatcaaagggggctccgtcagggcgaccctttatctcctatgctctttgtgtgtgttatggacgttctaaattcaataatcttgaaggctgagagctatggtttgttacagccgctgcttcgtcggggaattggacagagaatttccttatacgccgatgatgtggttctgtttatgcatccggtgaggtgtgacttggagacagtcaaacaagttctgaaggtgttcggtgaagcctcaggacttgttactaatttagcaaagagctcgtttactccgatttgctgcaatgaccaggaggttttggcaatccaagagacgctatcttgtaatttggtgaattttccttgcaagtacttgggcctgcctttgtctattagaaagctctccaggagggaccttctccctctagttgagaaggttgcagatagattgcctggttggaaagctgctcttattcacccggcgggtagggctactcttgtcaaatctgtcctctcagctattccagtttaccaccttattgcacttcaatgccccaaatgggtcatcaaagccattgacaagattaggagaggtttcctctggaaaggccgcaaaaatatcaatggtgggcactgtttagtgggttggcagaaggtgtgtgtaccattgactttgggtggtttaggtgttccaaatcttgaagttatgggctggtccctcaatttgagatggttatggttgaagaaaacacaacctgagcggccgtgggctttcttggatgtccaagttcatcccaatgctgctgcactttttgctgcatcggttcagtcagttgtgggcagtggaactgacaccaaattttggactgatcgctggctgcacggtaaaagaattgcagattgggctccttcgctgtttgcagctgttaacaagaaggctgtgaggtcaagaacagtccaggaagcaattaatggtagcagttgggttcttgacattaggggcaatttctcctctatggctttctccgaattcttccagatctgggatcttgttcgggaggttcaactgttatcagatgttccagatcagcacatatggacaccttccccctcaggctcttactcgtccaaatcggcgtatgatctttttatgatgggaagggtgggttttgcgcctgctgagcttattcggagaaactgggcccctccaagatgcaagttctttctttggctcgcgactcgagataggtgctggactgcagatcgcttggcaaagaggggtttggaccatcctgttcaatgccccctttgtgatcaagaggatgaaacggtgcatcatcttttaatctcttgtgtcttctctagggaagtgtggtttaggattttctccctggttaatctgcggcagttctcccccgcgagggatgatttggttttccaagattggtgggctaatttggaggccaaggtcccttatgcgctgcgcaaagggattaactcccttgtgatgttggtggcatggtggctttggaagcagcggaataattgtgtgtttgagggggatgctcctagtggcaaccagattattcagaatatcaaagacgacgctcagaggtggtgtctcgcgggtgccaaagatctgggcaccatctggccttagtttaggagcagttttggctgtttttatttttattttttctctgtactctggtcttctttagaccattggtgtttcttctatcttaatatatctaatgcgcagttctcctgcgcgttttagaaaaaagacaatatgacaagttcacaaattcacaaagatcactagtcacaaattggcaacttcacaaagatcacaactttacaagttcacaatgcacatgtataataggttcacaatgtaacaagttcacataaacacatttcacaagatgacaagttcacaatttccaatataacaagtttacaatataacaattaacaactccacaatataacaagttcacaatataagaagctcacagagatcacaattcataagttcacaagttgtctagttcacaagtccacagttcataagttcacaaagttgacaagtttacaagtccacaattcccaagtttgaaaggtcacaaagcattacacaacgaatacaataagaaacacccataacattcatgccacactagcgtgattaaatagacattgcacttcacaaatcacaattcacatatgtagttcacataaaacctcatatgcagttcacaattcacataaaacctcatatgcagttcacaattaattaaatggacattgcttcaattaaatgaacattgcttctaggtgcagatggactgacatgtatgctggttgcaagagagcagggtaactgtaattttggttgaacatgcaagtatgcaaccctttggtgcatattgacagttcagctactaactaacccaaacctaaacagtctggtcctctaaatctaaaaatacatataagaagcactgaaaaagatcctacacttttaaggatgcagtatcatctgtaacttgcaatcatgaagctaagtaggttcaatcacatcgtgctaagaacatagcacagaccaacgaaatactactaacaaacaaatgatcatctaaaaaaagatagaatacatattttctagaatgcagcgttcagcattcagtataaaggaaacaaacagtagtcactagtcaagttcacctgtactacggggaaagaattttcttgtctcatcctagctagtattcacaagggaagcatgcaactagcacggattttaaaatgacaagcatactaaatacaaacgatcggaattaacaacagctgcagaatataaacaaacacaacctgaagtcctgaactgctgaacaattgcgaagattagggacggccagatgaggggttgtcggcccggtgaaacacagagactgagagagtagatcgagataccgggaggggagggtgaggctgcgagggttgacgacgagtcagtgaggtacaacagcgatagcgtatcgacgacacgacagcggacggaggagctgggagctaggatggacctgtggagccgaagtgcgacagctgccggcgagatggacgagtggcgggatgaccggagaagggaagggaccacggcgggccgacagctggcgtctgtgcgtcagcacaactagagtccaaactcgttgctcgtctctagtctccggtagagtggtgggctgctaggccgtgagtcacggactgtgtcgatggatctctagaggttgggcacttgggctgggctggctactatttctggttaattccgatttgtcatttttggtaaattctgatccaaaacggtaaccgaaggaaacggtcggtaaagtaccataccgattgcgatagaaaattccgattctgagaaataccgttactagcaaatccgatcgaaaaaaaatcgaaaacggtttccggaatactgaaaaattccgaaaccgttttcatccctattcacccacaatactagatcctctccgtcatctcctgggcgtcctgctcctaccagtaccttccttctgtgacacacaccaccctccagtacctactaatacttacagaaattatttcttcaccctaacatgcagttacttgcttatgaagaatgttcaaaattttcagatttcatagtttgtttgttaaatcgcgaaagggcctctagcctagtggttaaggacttccgagtagcacctccaagtcctgggttcgattcccctcgggagcggattttcaggcttggttaaaaaaatcccctcgctgtgccccatccgctctcgggttacgatgtcctgtgcgccaccctccggttgggccgttgcagagtggacagttgacgccggcccgttagtgatggggggccagggttcggggattttctcggctgggaccattgtttcggtctcttcttaatataataccgggagggcggtttttctctccccggcgagttttttttagtttgttaaatcagcaaaatttgcaggatctgagcacaccttggtttgcatgctaacatttgatagagctatacaaaaatatgccagataatttaaagttggtagatacctgtcatgccaagattctagtgtacataatacatagtgtgttactgcgactactgaatgatttagtcagtgcttcatagttggttacttttaagtttgtccctgattctctcttttcgttcttgttttttgctggctttaagttagtggatgctatcttgctgtgtagaaaatggatcgcaaactaatcagtctaccatttcaaagcactcataatctgatttctgccttaagcttattgtaactctgtttggattcatctttatgtagtgataacaatatgattttgatgttaattcaggcaagggcaactcctaccggtctggcagacttaag
